United States Patent Application Publication US 2004/0031072 A1 - sequence listing, part 6

SEQ ID NO: 23716 - DNA, 538 bp, Glycine max
  Clone ID: PAT_MRT3847_121417C.1
aattcggcaccagagatggcttatgccctttgacacctgaggaaactacactaatattgacagctctaggcatagatcaaaatatccaaatttatattgctgctggagaaatatatggcggacagagaaggatggcaagtttgcaagcagcttttcctaatttggtgaggaaggaaactctgttggaaccttcggatttgatgtattttcaaaaccactcatcacaaatggctgcactggattaccttgtgtctctagagagtgatatattcattccaacatatgatggcaacatggctaaagttgtggaaggccatcgaagatttttaggcttcaaaaggactatattgcttgatagaaagcatttggtgcacctcatagacctatacaccaaagggtcattaagctgggatgagttttccattatggtgaagaaatctcatgccaataggatgggaaaccccaagagaagagttatcatcccaagcagacccaaagaagaagactatttttatgcgaatcctcaagagtgtgtgca

SEQ ID NO: 23717 - DNA, 295 bp, Glycine max
  unsure (1)..(295): unsure at all n locations
  Clone ID: PAT_MRT3847_121418C.1
tgacgttgagaaaaggcatggccaagagcaaagtcacgattgacttcaacttgcggccacaaaggcaataaccagcaccatcatcgtcaaatgcaaacaccatagattgagaaattagggagcgtggtcaactgatgctgtgcaaaggggnatttcggaaagaaaaataaaaatttaaaacgttgacagatgtcaatttttaattgagtcgcaggtttttccagtctcttgcatatcggaggatatataacaaagctcttaataaaaacacaaaccctaagagccaaacacgacg

SEQ ID NO: 23718 - DNA, 231 bp, Glycine max
  unsure (1)..(231): unsure at all n locations
  Clone ID: PAT_MRT3847_121419C.1
catcaatccagctactcctactgtcaanaangagcatactgtgaatgaggagaatccaaacgtggggggttgtgaaagctgcggcctgtcaaaactatctcctctgagagctcaagctgttcttctgtgtaaccgccaagatcgctcggtagggtcttgggttctggcacgcgcatgaaacctcacctttgcgggtttgatcagtttgcttggttgactgccccccccccg

SEQ ID NO: 23719 - DNA, 522 bp, Glycine max
  Clone ID: PAT_MRT3847_12141C.1
ctataattaaaaatataattaatcagttttcttaattttaatgtaattatatttaatatactatcaagtatttcaaatattaataattttattatatacatataaattttaaaaatttcaatagacttaatatttgttaagctcgattaaaaatatatatgatcattttcatctattgtagtatacttagtataatattttactaaatatttaaaaatacattttaattatgtccatgtattttttcaataataataaatataaaaaattaattgcttaaaatctagttatatttgagaaaataaaataaaaattattggttctattttaggatttgaagctctgtttgggattctctcaacaaaaaatcaaacatgcactaagtatacaaagagtgtgtgttttcattttgtttgttaatgtagtaacttcttttgtttggagaaaccctaaagtgaagaaaggaggaggaaaaaggtaaagttgtgagaaatggaaagtgtgaaggaggcgcgtgagaca

SEQ ID NO: 23720 - DNA, 646 bp, Glycine max
  unsure (1)..(646): unsure at all n locations
  Clone ID: PAT_MRT3847_121420C.1
ctcaatgaatcgatccanatncnnannnccnntttnnnnnnnnnnnnnnnnnnnnnnnnnnnnnnnnnnnnnnnnnnnnnnnnnnnnnnnnnnnnnnnnnnnnnntttnnnnnnnnnnnnnnnnnnnnnnnnnnnnnnnnnnnnnngggnnnnnggggnnnnnnnnnnnnnnnnnnnnnnnnnnnnnnnnnnnnnnnnnnnnnnnnngngnnggagaaactctcgatgtcatgtagatttactccaatgctaaaaaaactgtttctttaccctcaaaaccctccacggaatcgccaatggagttgctcttaccctcacaaacatttttaatttccaaaaatatcctttttccacttttttatagcggaaacatactttcactgcaccacccagagtgtgaaaaatattgtccatcgcaagtgcaattctgttatataagatacattaaatcatactttcgttatgtaactgaggttgaaaaaacattacaccacagaattgtgattcttgtatagcggaaatatgatttctttgtataatgaatgataaaatcatactttcgaaattttgttttttttttcctactcccataatatgattatgttacaaaatgatattaatatattgtgcatattttttttaaatg

SEQ ID NO: 23721 - DNA, 232 bp, Glycine max
  Clone ID: PAT_MRT3847_121421C.1
ggctttaaaagagtgtaaaataaatacctgaatatggtttttctccctttagtattttacataaagctcaatttgcttctagtaaagccaaagagccttaaatggcactggcttgatccccggattgaatcccctcatttgtaaccaaaaaataagttgcttctatcgaatgaagctgttagaggcgtatattggatgggctaccttaaaaagcttgttaagaaattatatg

SEQ ID NO: 23722 - DNA, 378 bp, Glycine max
  Clone ID: PAT_MRT3847_121422C.1
catgtaggacaaaataaaagacccacatgggaaaaaacgaaaactgcaagaagagagacagagcggttggggagaaagacaatcggcagagatataaataccaccagtcaagacaaccgcaagagtgttcaagaacacaacagagaggagggtgggagaacaaaaccttaacaaaaacgaacatgggaaaaggtaacaaagggggataaaaaggagcacaaagagataaaaccgcactttacctcctacagcggcagagacacaacggagtctaatacacagtaagccagaggggggaagaaatagggggccttactataaaggacaccataaagaccggaacagcaccagaacacggaaaaagcgcaatgataacaa

SEQ ID NO: 23723 - DNA, 380 bp, Glycine max
  Clone ID: PAT_MRT3847_121423C.1
aaaaagggcactatcaaaaaaaggggcaaagaaacgacctctttctttcaaaaagaaaaaggggggggcccgggaaaaagtcccccacttggaaaccattaccggccctgggacaaaaatttaggaccggaaaatacaaaaaacaaacttatttacccggaaagttttttaggaccattaaaaagacagccaaaaacatatatggggaccggagaaaaaaccccacattagggggccaggcgccgcttcttgtatatccgggggaaatataggggggggaaaaaaaaaaaggggccctctaagcctttgggggaccctacgcacatcctttcttacaattcgggaaaaaaagggggattccccatgaaaatcgggcttaa

SEQ ID NO: 23724 - DNA, 276 bp, Glycine max
  Clone ID: PAT_MRT3847_121424C.1
gtactcaattaatacgtcactcaatattataattaccattttcacatgaagccgtatgtatgaattttcataccaattcacttccttaaacaacatcaaagctatcaattattccatgattactatgtaaagatatccttttatacataacttactttcaaacttgatctctttttattttccctattatcacaaaatggaaatggctctctccatacaataaacatcctttgtttcttaaaccttcataaataatttcctatacaattttcccaa

SEQ ID NO: 23725 - DNA, 317 bp, Glycine max
  Clone ID: PAT_MRT3847_121425C.1
ggaagggaatttttatcaacagggccaaaagcaaataatttgatgccataggaagccaaacaattaatttccctaggaattggaaactgccaaaaaccgtcccaccaagcaaaagggaaaactggggtaaaggcacattgattgccctgtttgcaacaactcaatggaccagcttttttgttccaaacatggccccaaccacccttattttttaggccatcagtcaacaaattactttggaaactgttaaggaatataaaccttgaaccaaacatgtcccccaaattggaagctgcaaacagggcaacgactaattg

SEQ ID NO: 23726 - DNA, 503 bp, Glycine max
  Clone ID: PAT_MRT3847_121426C.1
aatataatattgtcactcaaaaaacttttattccataaacaatgtgcataaagaaaagatcaataagaagcctatttgcggaacttctgtaatatttcgcatatgaaggtaacaatctgcattaactaagacttttagcagggttacatgaaaagctcattttgtcatattcatatataacctcgaaaaactaatgaagctgcatattctctgttctgtttctaccttagtcagagtattcgtagtttattagctaaaaaaaagtattcttagtttcgtaactacagagtattgatcatatgatagcctatacaaatacaactttgcattactattttaatgttcagcacttgttgaacagtttcaatttacaaacagtagcaataacacacttttgtatgccatagcacgtgtagcgattgattattatcactaattacaataaaccacaaaaagtaaaggccaggaagaatgtccactaccatacatatcttaataatgac

SEQ ID NO: 23727 - DNA, 319 bp, Glycine max
  Clone ID: PAT_MRT3847_121427C.1
cccagtgcaactgaaaattttggatgctttaaaaactggtttgactccttctcttcattttgttagcaccatttcatcttctgattcggctcatatttttctgaacttaaagcgcaaaaatctttcatgtccaaataagttgcctgaggacgaatgtgattgacatgcctgagcacaaaataatgaatcttgcatcgagtgtatgtgccttgtgcgaacgaaggctgataatgccccaaatacatgcctacgaggtggaagtgatgtttgcctccacgggagccatactgactgtggatcactcgaatcctatattaca

SEQ ID NO: 23728 - DNA, 257 bp, Glycine max
  unsure (1)..(257): unsure at all n locations
  Clone ID: PAT_MRT3847_121428C.1
ggtgcggttgctcccagagtttaaagcttgtttagcagtgggattaagtgtatcccaaaggggtaccttatgcctgaaaaagagtgtaataccatacctaaccttttcnaggaggaaaagaatgaatgcccataggttcccacaatttacttgagagagatagattccgaggactaggttgtcctatgcaagtgtcaccagattcttaagaaagcgccctaagattttggttttattaacttttttaactcatttgt

SEQ ID NO: 23729 - DNA, 499 bp, Glycine max
  Clone ID: PAT_MRT3847_121429C.1
gtcataatttgattatatgaatggatttatttcataacaaatataagattttcttctgctttgctttttcagttactagggagtctgaattgatataggttgaaaatcaaaagcataatctgcagaaatctttgtccagagttagttatttagtttctgaactaaaactgaagtgaaattttgatgggctaattgcttcatactttatatcacacatctcatagcatgttgtaaagtccggatttgttttgcaaaatgatttttgtgctaccatcttgttgattctggcttacggagtgagttagaacctacagtcttgcctattactttttagccaactataatttacgttcttttctttgactaaagttataatatcaaataaggaaatgttataatacatgtagattgaacttgtaaataaatgaggcagataagagaggagtataatgaatgcctattttgtgttggattacatcttttagatataagcgagctg

SEQ ID NO: 23730 - DNA, 341 bp, Glycine max
  Clone ID: PAT_MRT3847_12142C.1
gctttaaaaatgggagggtgtctaccatccaagcggagatccagaagatagtggttcagcttccagcagcacacatcgtttcatgctgtatgcgacagcactttcaatcacatggggagacactccagaatattggacatgggtacagcagaaagaagaagcaaggtacgcatctatctccaaatatatattaaagtttactaaaacacaattcacacaatctatataaaaagtagtgttctaaaaagtagatctctcattcaatctgctcttttattgctaataaaagtttcttctgaaataggaataatgcatcttgcttcgtataaggttagatatat

SEQ ID NO: 23731 - DNA, 656 bp, Glycine max
  Clone ID: PAT_MRT3847_121430C.1
gttatcaaggtatgttatatccctatttataaatcatgaaatcattggttgatatttcaacaattacttatcatagcgtagtctctatgaagtataaactaacaaatattatctatctaaacaaataaactgctttaactaatctaatttagtagatacctattatacagcaattttccctggttaacaaggcaatttatatgatacaatacaattccggctgtcacattaatcttcccaggaggaaaaggcagcaatttcagattaccagcttcatcaatggccgtatgtatgatgaaagaatagcaaagccaaaatgtccgagatgctcatggttagaggatgacagcccaacataaattatgctgagtttatggcaaggctgacaattcaacttcctgagagcagggacgatatgccacaaatgtgttgtcaattgcgaaggaacctgtattaaaacaagtgattcccggacacgtgagtgccttctgctgacttctgtctcccaaactatcgtgtgtggagttggataaagataaagacaatggtcataattccagatgatgggttgtacggttagaggaagtggacatagatgactctgatgggttatggtagcaacaagatgttcaaaatgatcacaagtctcttctgta

SEQ ID NO: 23732 - DNA, 339 bp, Glycine max
  Clone ID: PAT_MRT3847_121431C.1
ttgacgcgtgggctcatatcttatttttgttcgggtcgatcactctcatggcatcagacctgatgattaggatcgggatgaacggatttggaaggattggtcgttcgtcggccaggggggctcttcataggaatgacctggtacttgttgctgtcaacgaccctttaatgaccacgggttacatgtcatacatgttcaagttctacacctttcatgggcagtggtagcagttcgtagtgaagctgaaaggctttaacacccttttcttaggggagaagccggtcaccagtttctggattcaggcaccctgaggaaattccatgtggtgaggcatgggct

SEQ ID NO: 23733 - DNA, 259 bp, Glycine max
  unsure (1)..(259): unsure at all n locations
  Clone ID: PAT_MRT3847_121432C.1
ccaaacatgccaattgtcttaagatacaagcccctaaaaaaacatgatggaatctggtcgttagctgatggctgaattgttgtgacttgtagttggtaatgagtaaggaacttgtgttctacaagataagtgttganttgtataatttagagtatctagtgttcagttatgtataaattacttagcatttaaccaacaatagggggtactacttatttttatgtgccaaaaactaatccagttccaatgaattgtctgt

SEQ ID NO: 23734 - DNA, 289 bp, Glycine max
  unsure (1)..(289): unsure at all n locations
  Clone ID: PAT_MRT3847_121433C.1
ggcncgagctcgagcccaaattaattgagggtttttttacaggcaacgggctccagcatgggggttcctttatggaacagcggaccacacatcaacagctcctgtgccaactagcgagaccaacaacggcgttgacacccacgtgagatcgcaaaagaacctacctccaaagcacatactgccctatgaaccaactaaacccaccgtgaggaccaactccacaccaatgatacgcaccctgggccagcatcacggcaaaatccacacgccagataacaaccgtaacggc

SEQ ID NO: 23735 - DNA, 561 bp, Glycine max
  Clone ID: PAT_MRT3847_121434C.1
tttcttattttttttattttgtctcggtaaatagaatatatatagaaaatagcatcatgtgctatcgaactacaaatccaagagaatgccatgacataacgttagaacttttttaatgtagcattgataatttcaaagccctcaccctgtcaatttggatcaccaagtttctaaacagttgcctcaattctaggcttcatccaaccacgccagtgtgacatgtttagttggcaaccgattttgtcttacaagttcaattgctccattgttgaccattatttgctttccaacaagttcaatgagccaaactgttttgtaaatgtggcttataacaatcagccagagggcaagcagcaaacaaaggaaatcaacaagcaaattcttcaccaccttggagatataaactttcatggtttcgtcattctcaaacagcttctgttactgccctgaatcttcaggatccaattgacttacagtgatggcatgcttttgacagatcggaagaaacacaaatgaaaaagatctaaatacatcagaaaggtgcatagcagaaaccaattt

SEQ ID NO: 23736 - DNA, 744 bp, Glycine max
  unsure (1)..(744): unsure at all n locations
  Clone ID: PAT_MRT3847_121435C.1
ccacgcgtccgacttattacactcctcacgaaactcccactgtttccaatattattcacaatggctccagccccaagggtgatctccgacaaggcctcgatgcggagctggtcgcgctcgatgcgggcccagggcaagctcattgggctggtccccaccatgggcttcctccacgcgggccacctctcgctcgtggcccaggcccgccaactctccgacgtcgtcgccgtctccatctacgtcaacccgggccaattcgcccccacggaggacctctccacctacccctccgacttcgacggcgacgtaaagaaactcgcgtccgttcccggcggcgtcgacgtcgttttccatccccgtaacttgtacgattacgggaagaacggtggtggtgacgtggcagaggctggtggaatggtgtcgtgcgttgagagtgggtccgggcacgaaagttgggtgagggttgagaagctggaattggggctgtgtgggaagagcaggcccgttttcttcagaggggtggcgactgtggtgacgaagttgtttaatattgtggagccagatgtggctgtgttcggtaagaaggattatcagcagtggcggcttattcagaggatggttcgagatcttgattcttccataaaagtgataggtgctgaaataacacgtgantatgatggcctgggcatgagttcacgtaatgtgcacctttcacctgaagagagggaaaaggcactatcaata

SEQ ID NO: 23737 - DNA, 315 bp, Glycine max
  unsure (1)..(315): unsure at all n locations
  Clone ID: PAT_MRT3847_121436C.1
gaaaggatgcgagaataagaatagctttatagttagacacacttcgtcttgttgctgagacaagagtcataatcttggctgtaacaggttgaacactgcatagcaaattctgaatggaaatgtgtggagccacagctctgacatggtctcacaccatctgtccatcgcttcaccttcctcgatccgtctctccattcattccattttactagaccagggaggctaggangagcttcaggtgttggtgtgtctctgatcaagactccagggganattaaatgatcatatctgtaacttgaacaacaaggtttaatg

SEQ ID NO: 23738 - DNA, 181 bp, Glycine max
  Clone ID: PAT_MRT3847_121437C.1
gacacgcgtacgtggatatgtactttgaattcaaatgtactattaacataaccggctccggtattagtttactgagcaagaccaacaacagagtggtacactatacacgcatacactgactagggggactgaaagctatacatcacgaagactctttacatattccgatgagcactgacaa

SEQ ID NO: 23739 - DNA, 918 bp, Glycine max
  Clone ID: PAT_MRT3847_121438C.1
aatttaataatccacttattgattaacacttgcttttcttctttcacctatcgcattctaccgccgtgagagcgtagtgcaggctgctaaggcgaaagcaccggtagctgaggcaccataacatcatgagcaagcgcgattaatccccgatacagagattcaaccacgattcaggaacaaaaacgaaacaacctccgattcgtattggtagcagctggaatcgtatcgaatcctgtagagtaaacagcagcagcaggatctgcatacgatatgatgcttcttcggagaattatcgctgcatgtcctcaatcaaagaggatgttcagctcttctgttacccatggctatgaaagtgctattcaagaactcaacaaggaaatggaatcggtattcggtgaacctcctacaaatggactagctagctctaatttttggaccctttgattgtaaacatttaactgatttacatgttacctaaatgtaagggtaagtctgcgtacaacaaccctcccccatatcttcgcatagtgaagagcctccgggcaatggggtacgaagtttacatgttacctaaatgtggcctaacctacgtgtccgtggactggattgagccctttgaaaacttctgcaatatattaatgttagacattgtaaatataaattgctgcatttttggatttcgcatattaagttggaccaaatatattactcatcattattattattatatggtatttatttaatgaatcaattagttgcataaattgacaatagtagctactagctaatcatgatcatgatccaaacagatgatgatgtttggaatgaattatggaacatatttacccttgcaatatcttattctttcatagctgccgatgccatgtaggcccttaattttgtggaatccaattatgt

SEQ ID NO: 23740 - DNA, 573 bp, Glycine max
  unsure (1)..(573): unsure at all n locations
  Clone ID: PAT_MRT3847_121439C.1
gtccagtgcnagatgaggtggtggggggtgaatacttcctattaatattactggcctgcgtatatacctttgcggtgaaacggggttgaaattttctgcgctcataatgtgtgttgtgaccatttagtattagagtgagctattgtgttagtttcttaaaattagaaaaatgggaagtgagtttctgaaattgagatttattaatagtgactcactgtgcgtgccattatgggctatgagaatagtgagtgataaaatttaaaaattactctcatatgagctaaaataacaataaacatttttctaattttaaaaattatttggggtgttttatgtgctacaacgaaaggctcttgggggtttgtgtacgacatgggaataattctgtgtgaaaggagggtgataagtgtgatatggcgacaacaaaagctttatggaggtttctgtgacattaaagataatattcatggtgaggacaagttatatgtaaattgagttgtgtttttttttttgatgaattttctatatttttttgctgaaatgggaattgatttgggcgtgggcgtgttatag

SEQ ID NO: 23741 - DNA, 704 bp, Glycine max
  unsure (1)..(704): unsure at all n locations
  Clone ID: PAT_MRT3847_12143C.1
ccacgcgtccgagaaaagtggtgagagtgatggcagagactagtgagaggaagaaaccccccgtaatagaaccgccggacgacctccgttgccgccgtaccggcggccacacatggcggtgcaaacactggcggattcacgaccagccctactgcgaggaccatttccttgccttacgagccaataagaacaacaaaaaacctaagcctccttctacttcttctgcttccgcttcagcgcaaagagacaatgcgaagaggcttcgagaacgagacgaagaagaagcaactgttccggagaaaggcaaacacaagaagaagctgaaactcgaatctccgaaggagcaagtggagctattactactcgacaggaaagccaggagcagagagaagatcaagcaaacgcttatgcgattggatgaatgtctcgaaatcgacgacgaaaaaccgctcaaaacgacgaagacgaagtcgttttcttcttcgtccaagtccaacgctgcgaagccaaaaatctctgtttcggagtctgggatgtgtcaccagtgccagaagagtgataggaccgtcgctcgctgtcggaaatgtcgcaagcggttntgcgttccttgcattcggagatggtatccacaaatgaccaagggaggcatagaaaaatcttgtccatattgtcaaggcatttgtaattgcaaatcatgtttacgt

SEQ ID NO: 23742 - DNA, 276 bp, Glycine max
  Clone ID: PAT_MRT3847_121440C.1
ggaagatagattaaatctcgcagtgtacgtgctctgtagtacattggagaggcagcatctgacacatgatctgtttgagactcgcagaattcgcagtttcgaccaaatgagatcatcatatatcaggatgtctcagtagactatatcatcatcacgtcgtccttggagtgacagatttacctagtacaatagttgcgcaaaatgtcacgttgagtcagtctaatcggcagttgcagttgacctagcacacttcatagatattgatcatacagagca

SEQ ID NO: 23743 - DNA, 201 bp, Glycine max
  Clone ID: PAT_MRT3847_121441C.1
ctgatggctctgagctccatcttcgggttggcaactcactgcttctacagcttcatgggtctcaaatctctagaaaggttgggccaactctagaaagctatcttcccattcaaacacagatatgcttaatgtaaaataaattgaaaggttttgaaatgattttatctatttttattaaaaaattgaactgaattattaaaa

SEQ ID NO: 23744 - DNA, 185 bp, Glycine max
  Clone ID: PAT_MRT3847_121442C.1
aaaaattaaagaacaacacgggacaaaggaagaaaaaataaaagacgatcctttcttcatttgcccttgactatttactcccaagagaatttctgaatccgatagacaacattattcaaagagaaaccgatgatgccaaaaaatgaaacattgtttgtctgacctaatatatgatttacccctcc

SEQ ID NO: 23745 - DNA, 1697 bp, Glycine max
  Clone ID: PAT_MRT3847_121443C.1
agctcggagcttttctgaggcgcagcatcagcagtagcatggaatccgaatccaagaacgacacccaagtcgctccggccttaatcgccgttcaccccgaccaatcctccgtcgccgtcgcagtgggcccgcacctccgggtcttcgacctccttagcggttctgcagcttctttaaccgacgactctgatggcgccgtcccgttccacaaggacaacatcagagccattcgcttcggcgcaaaaggaaaactcttcgtgtccgcaggtgacgataaaaccctcaaggtctggtcaacacagtcctggcgttgcatcaccaccgtgtcctccgagaagagagtaactgcagtagcaatcagcgacgacggaacattcgtgtgcttcgccgacaaattcggcgttgtttgggttgtggatctcgatcctccgttacacgatgataagaaaccggcaccgcttctttctcactattgcagtatcatcactagcttggaattttcaccggatggtcgctatattttaagcgcagatcgtgatttcaaaattcgagttactaattttcccaagaagcctttaaatggagctcaacagatacaaagtttctgtctcggtcatacagagtttgtttcctgccttgccttcattcaggctcaggaatgccctcaaggctttcttctatctggcagtggtgattccacagttcgattgtggaatattgactctggagcacttcttgatacttgcgaggttgcaattaaggcaggtcttttagagtctaatggtaaggccgaggagcgtggccatgctgttactgatttatgtaccgtactggatggtttgcttgttgcagtggccattcagagcttgcaaggaatagtattgttgagttgcaatgtttctgcacaaactctttccgttgccaaggtggtttctgttgctggagaggcctttgtccctacctgcttggggagcagcccatctatagggaaattgtggatggttacaggtgtctctggtctacctggttttaattatccctctttggcttgtgtgcgagtaatttccagtattgatgttgagaaagagccagttgttctgggagatgataacattcctgggggagaaaaactactagaaacgttgcaaggatctgcatccgttgatgacaatgcttttctagcagcagctgaagcagtcaaaacagcaatgtgcaacctattgataaaaaaacaatacccttcagagaatagagaatataggaagaaaagcagaaatgatagaaaactcaagggttagttagtattttatttatttttgttttattaatgtatgaagcagcttagaacgattttcttgaatcacaagtttccaaagactatttttgacaatccatttattttatttattttctgataaactgtgaatctgaaatattaaaatcagttcgccatcaaaaaaaaaaaaaaaagaaaaaaaaaaaaaaaaaaaaaaaaaaagaaaaaaaaaaaaaaatgaaaaaaaataaaaaataaagggggcaaggatccaaagggggtaaaacatggaaaaaaataaaaggggggggccttttttataaatgatgctagctaacgtacgcgggcggggcgaggttatatatgggggataccgaaataaatatggggggcgctggtttaaaattttgggaggggggaa

SEQ ID NO: 23746 - DNA, 203 bp, Glycine max
  Clone ID: PAT_MRT3847_121444C.1
gcttgacgtcatgccctctgctcggatcggtagatattttggtttttattacattcgctcacacattttcgctcatatgatacgtcattctaactaagagatcagtacagtgttccgtgaagtgctccacaactgaagaacgtaatgacaccagccatacacatggtatatttacatcatctttattaacacgccattctgta

SEQ ID NO: 23747 - DNA, 442 bp, Glycine max
  Clone ID: PAT_MRT3847_121445C.1
gcccaaactaacaaggaattttttccattcacttaagggagtctttataccccaatccacaaacaaaatatttttatattataattattattatctcgatcaaaaaaaacaaaccccgggtttgtaaaagacatggttttggcccaaactatttgggggggggcgcaatgaaatcttccatttccccgcgagaaaaaccccctttatccctggacctggaaaaagcattttttagggtcattgccctttggctaatttaataacctttttttggggccatcaatctcctaacgggtttttaaacattggatggtggcaccaacttatccctggggtcccaggcttttacaaccaccccaattttgagccctttggtcaccaaaaccctgttctttgggtggtcaaagggcataggccatgctgttattggcccccccattgg

SEQ ID NO: 23748 - DNA, 496 bp, Glycine max
  Clone ID: PAT_MRT3847_121446C.1
gtaattttgattaaccgggagcatgggttgccggaccgtaaaaccggaaacaaaagcgaccgtgacttgattgctataatctatcaatgtctttctacttatcttgtgtacgatttcttgagggaaagaaaatcactctttgtgctggccacagacttggagaatcattgtgtttaccattcttagttgattggctgaacactctcctatttgatataggactgactgtcagatttaaacttgttctgtttgtttttcagtgctctgtttaatttcaagttctagctggtgaaatcttggatgagtgctccaactctactatctggtataggactatggggggagacggttctatttatctgcattgtgtcactctgttcttcgcactgatccggattgtcgttcaaagtggtcttattggagaaacacttgggcgttggtgcaaatgtatggtgcgtgtattctttctggaacaacaggttcactgggacaacaa

SEQ ID NO: 23749 - DNA, 260 bp, Glycine max
  Clone ID: PAT_MRT3847_121447C.1
ggctcgaggtgattagaaatgggaatgtcgaggagtttccttgttggttttataggaggtctagttcttgcagttctgattcaagctcaagaccaatcaggattcatcagcatagattgcggagctccttgcggggggagctatactgagttgaccaggacaggcataaattatatttcagatgcaaatttcattgatactggtgtgagtaggaaaatagtatctgaactcaaaagtgtctatcaacaacagctgtggga

SEQ ID NO: 23750 - DNA, 336 bp, Glycine max
  Clone ID: PAT_MRT3847_121448C.1
gtattatctaaataataaaggtttcaatgatcttaattaatacttatcaaatagtctctataagattatactttaaatcttaaaatacctaactttattttatgctctacatggttagaattagaaattatcatgtgaataaacaactttattccaacatcatataaagattaatctacaaaagtatgaaaccaatagtaatcaacatgtttgttaattaagagttataatataatacatcaaccaacataaagagagtgaagcaaatgtcaaaccattaatccgtcactatcccaacacatttcttgttctacaagataaaagctcggaaatgag

SEQ ID NO: 23751 - DNA, 1501 bp, Glycine max
  Clone ID: PAT_MRT3847_121449C.1
actttaaagactaatttttcattaaattatgcgtatagtgggccatgaacgtacaatctaagagtctaagaccctaactattaataatgggccattcaatttaacggctgcaagaaactatccaaaacctgctccttggatcttctgttctggagtagtactggcttgacttttggaccgcgagtagtcgaccgaggggctatgagatctacaatcactcaatcacaggttaactaagcaaaaatcactagaaaacacaaggtagttcacacggcataatccaaaatgctgttgagttcattttgtgtcacatggccatatttgtggtgttgggactccaccagcttgcatccaattctaaccattctagtcacactgatcagtgtgctatgtttgctaaggtggttcaagaattcaagctatgaagccactcttccatctcctttgcctccaggtccactaggcctgccactccttgggtaccttcccttcctaggaaccaatccccacctcaaatttcacaagcttgcacaagtttatggtcctatctacaagctcatgttgggaaccaaaacattcattgtggttagctcaccctctttggtgaaagagatagtgcgtgaccaagacaccgtattcgccaaccgtgaccctcccatttctgtattggtggccttgtatggtggcactgacatagcctctttgcctcttggtccgcggtggaggaaggcacgcaagatatttgtgagtgagatgctcagcaacaccaacatcagtagctctttttctcatagaaagatagaggttaagaaatctattagagatgtttatgagaagaaaatagggtgccctataagtattagtgagttggcttttctaactgctacaaatgcaataatgagtatgatttggggtgagactttgcaaggggaagaaggggctgctattggggctaagtttagagcatttgtgtcagaacttatggtgttagtagggaagccgaatgtttcggatctttaccccgcactagcctggttagatttgcaaggaattgagacaagaacaagaaaggtctcccaatggattgataagttctttgattctgccattgaaaagcgaatgaatgggacaggggagggagaaagtaagtcaaagaagaaagatgtcctgcaatatctgttggagcttaccaagagtgatagtgattcagcatcaatgaccatgagcgagatcaaggccatcctcatagtttgtgtcctgcgtcgacccctgtccactgctccaacttttcaatcggggcttgcttcgctgttgccgcattctggggctttgatgggggttcctgccctgtccgtggtcgcgctacgatcgggagatcgttcctgcctcagttgccagccggtcgcgtttctgcacttcccagctttcttcgaccaatctcgccgtccgcgtcccctcccccgtcttcttctttgggggatttggatatcctctctctctc

SEQ ID NO: 23752 - DNA, 459 bp, Glycine max
  unsure (1)..(459): unsure at all n locations
  Clone ID: PAT_MRT3847_12144C.1
atgaatttataaagcaggcagagctgtatatatctgccgaggcagattctattctcaagcttttgccaaataataacagctcaatagaacatcctttagcaaaaactgaaattattggtcctatccatgccatatttttgcgtctcctgagatatggattgactacatctgagggatgcccccgatctgccaatttacttatcatgctagatacaactgaaatcattgactggttttcagggatttcttgccagctggctgaaatggcatgaaaattgtgccaactttgatgagataaagctcttgatttcaaatcatgttaggaaatcatgcattcgtcctttagcagcaaaggttcgggtccctgaaactgagattgaaaagccgtttggtgtagaacttagcaggattccatcaacacaggacangagaaggagatgataaatgaagcattggatg

SEQ ID NO: 23753 - DNA, 194 bp, Glycine max
  Clone ID: PAT_MRT3847_121450C.1
gctttaatatgggcctcgctgtcggcgattctacagatatgggatcatgtcatatccagatccgatacagtgttctagaacatgtttgttaaacctacaactaaaagattgtagacactgatgatgcgaggaagatatgctcgacttatgggggaggttagcaggatactatacaactcgtagagtggaatgat

SEQ ID NO: 23754 - DNA, 612 bp, Glycine max
  unsure (1)..(612): unsure at all n locations
  Clone ID: PAT_MRT3847_121451C.1
tttaactggtacgcctgcagtaccgctgccngtgccccggcgacccacgcctcctagcggtgcgaaaacgacagaggggggggggggcaatgtgatgttgagtgagacttaaggaggggtagtgtctatacttcgttgggggctttggggattgctcttctggtttctattattatagtagtatacagggtttattttgatacaattagacgagaggggtagagcataggcgtttttatgctcggttgagtatattctggctagcctctatacaggcatgaaggcgtttcttattatgggaaattgagtttctagaagtatcgttaagggaacttggangcacgaacttagttttctcacaattagtacagggcggatattagagaaaaaacttattaggttttatgtaattaataaccctaaccaggtgacaggtttcgtacttggtgcaggggcggcctacctatgggagggggtgtacttncaccccttcattttttaaaattcactaataaattttcttttaaattaaaaattgtgaataaaatcttatatttttatattttatatcatatacatataggtgaatccattgagtttattttttataat

SEQ ID NO: 23755 - DNA, 382 bp, Glycine max
  Clone ID: PAT_MRT3847_121452C.1
cccacgcgtgcgtacggctgcgagaagacgacagaagggtctccttgacgtaataattaaataatatgtttcctaaacgtcaattcttaaatgtatttaaatatgtagaaggtaaaatccttaaataatgacagttttaaataaacattcaggtgctatcatttaattaaaaaaacttgatggcataaatgtgaagaccttgttctaaattttatctttaaaagtgaaatttataacagtcgttttttaaaatctaaaattgatattttattttgaaatatttgaaacatgattttcattattttggtctataaatgttcaaacaacgataaaataatgtagtagtagtaagagattcgggtatctaatataataaaacaca

SEQ ID NO: 23756 - DNA, 479 bp, Glycine max
  Clone ID: PAT_MRT3847_121453C.1
tctcagaatgtcaaatggctgccatgcaaacacatccacgttcctatgttggacatcagttatgcatttgtgctcatggctggtgaggtccctactgagctacgtacattgtccggtttgtgttcaagttgtagcttgatgagctcttcaataggttttgcgcctctgtcagaagcgtcgtcgcttggatctacatcgaatttgtcgtccaggcttgcttggtagacagctagggcttggactagagacccttcgtccatgctcatgacctgagtgatgccatccgctgtggggtgaggtttggcaggctccctggtgggaggtgataagtgccaaatttaagttatttttaggattaaattgttagcacttatccttagattgtaaatagttttcttataaacaaccattaaatctagttgtttatatatattgtacatttactaatgttgtttaaatataaaagattcatccatgat

SEQ ID NO: 23757 - DNA, 311 bp, Glycine max
  Clone ID: PAT_MRT3847_121454C.1
cctttatggccgcccacgcgtccggcagtgctgtgggagagtttccaacgaggctgcgcagaatgccgccgctgcattgaagggtgcagatcatcgccgcgcaacaaaggtcagcgccagactggtcgctcaacagaagacgcccaaccctacaatcctcccaaccaccactatcggaaccttccctcaaactgtagaactgaggagggagcgccgggaggacaaggttgacaagatctcctaggaagagtacgctaagacatataaggaggaaggtgccaaagttgcagaactgcaagaagagcttgata

SEQ ID NO: 23758 - DNA, 544 bp, Glycine max
  Clone ID: PAT_MRT3847_121455C.1
gccggcctttacggcacagcaccgacagaaacagagcaaaagccaagccctgtaaacaatacgataccactccaaaaggagttggaaagcgacaccacctatgatgacactgacacattcaaaatgttcatgggcaagagtttgtccaagccggtggccgtcatactgatgcgcatgttcgacgagctcggcctgaacacggacgagtttgatgagcgtgccgtggaaatgctggccacattcccctttgagcaggccaatttcatcctcaaagagctcaaggactcgcaactgttcggtgtgcagaacaaaccacaatatttgatgtccgtcatgcgcaactttcgtgaacgacttcgaacaatgggcgtccaacaggcgatggaattgccactgatccccggcccggacccggaaagcatcaagacattaataaccaaatccggctaccaattggaagtgactgttggccagcgcaaataccactcaccgcccggctacgaggggccagacccgaaccaaacggacggcggatgtatataca

SEQ ID NO: 23759 - DNA, 935 bp, Glycine max
  unsure (1)..(935): unsure at all n locations
  Clone ID: PAT_MRT3847_121456C.1
cggctgcgagaagacgacagaagggggtgaattctctttctcttttttatactctgaattctgaatatcatcatcttcatcctcgtggagtagtattttcgatcaatcaatcttctctgtttccaaaacattccaattatttcccttcattcacacatcatggactctttgtctttgcactcaaacctccattccgttaacaataagcgccgccaaatcacacaccaaaactccttcgctctcactccctcctggacttccctaaccgaacagcgcctctactcctccaagctcctccactcgctccgccgcaacagcaaccctaccgccgccctcgaagtccgcgcctccgctgaccgcgtcctcgccgccactgccaaaggccgaactcgctggagccgcgccattctctcaaatccgatctgccggtggaagcagagacaccacaagaaggtcaagaagtactccgccaacaaattcatgaagaagacgacgcctgagattcggagaagcttgccggctgtgcagaagaaagcgcgcgttctcggaaagttaattcctggttgccggaaggtgtcgttcccgaagcttctagaagaagccggtgactatatttcggcgttggagatgcaagtgcgagccatgaaggctctcgccgacctcctcgccaccggtgctccgccgccagctccgatcggtttgagttgaccgaagttgttaattcttactattaggtgtttcttcatatatcgtttatattagtttttagatttcagttccatcttcgccacttattttatttttttctcttcattttttattatttcagttaaaaaagttataatagacagtaagatatgttctatattgttatattacataataatataaatgatatggtatataattagtttacaaaaaaaaaaaaataaana

SEQ ID NO: 23760 - DNA, 152 bp, Glycine max
  unsure (1)..(152): unsure at all n locations
  Clone ID: PAT_MRT3847_121457C.1
tncttcatttgacaggcatganaaaaattaagtggtatncanngnatgnnaaacacncggcattgnnacgtcgtancantgtacganatgtagngctatntgcantactgtgtntattancnctgtttgtttntngggngtttaaaangtan

SEQ ID NO: 23761 - DNA, 344 bp, Glycine max
  Clone ID: PAT_MRT3847_121458C.1
ttgggggggggggggggggaggggggggggggggggggagtgagaaggaagacgaacaaagccaataacaaaaccagaataaaccaacaggcatacccacaaaaaaaacccacaaaacaatttacaaccataataaaccaaaaggtaacccctaaacgctgggaaagttagacctggtgcccgcaaataaagccatatcctgtgtttcccatgcaacaatctataaaggatcgtgatcataaacccccaaattgaacacgtagcattcctagatgtgtaataaatcgtccccctaaatcacccatgaacagttacatgcaaattacttactcctaatgatctta

SEQ ID NO: 23762 - DNA, 299 bp, Glycine max
  unsure (1)..(299): unsure at all n locations
  Clone ID: PAT_MRT3847_121459C.1
gggnttcggnaacgcancgcnntgnaacggagccaaggagncntgngagntancaggaggtgatggatccgtgagagctcattgannanntgtgcngnganagcatctgaggatancccttttctcngctcttnacctcagcagaganggcatctnctgcagtttccaagnctcaagcctcgaggcagattctctggtctaatgtctggctggggttctccgtctgcntcncgnatccatattctntgttncaccntttatagtaattnctctgtggcacatatcacagagctcctcct

SEQ ID NO: 23763 - DNA, 660 bp, Glycine max
  unsure (1)..(660): unsure at all n locations
  Clone ID: PAT_MRT3847_12145C.1
acaaaaacctttcatatagttatgttattggaaacagatgtagggaagattggagcaaaagttatcttcaacgaaagacaaaaacatgatcctaaattgctaactaatccaaatctaaacgaggaagtcacaatgtgactctttgtaagatctgcgaacaagacctcccctgtcttggggccaagaagtagagaatttcacatccgacatctannncagggtcgagcgaagacgaactgtgcaaaaaggggtcaaacgatgcatttcattaaaaaatgattctgaccgacccaactagtcaaacatcatccactaccgacgatgacgannnaatttgaaaacataaaggacaagaatgaaacttttaaaacataatataccaaaacgaaacaactannnaatataatggatcaaaagtgacattaaatcattttagaagttaaaagttaacaaaacacaaaacatttcnnncgaaaaattgcaaaaaaagaccacaatgatacatttcaaaaacataaaagactaatatgaaacttttaaaacttaatatactaaaatgaaacaaccgtgaaatgtatgaatcnnnagtaacattaagtctatgttaaataaatatctcatacagtatgaacatttttttaataatttttttcaaacata

SEQ ID NO: 23764 - DNA, 1267 bp, Glycine max
  Clone ID: PAT_MRT3847_121460C.1
tacggctgcgaagacgacagaaggggacagttcctttttctaactaccatttcctctttttgtgcatcctctctcgtgtcctctccctcttcaactactactactttatcactacactacaacatactctaatggaacaaaccttcctctttctctttccccccacacattagcaacctacgaccactctgcttcacaattccaaaatgggttgctgcgtcagtagtaccaacagatctcattcttcaccctcaagcaagccttttgaccgaccaagatctaccgcgaaaggttcagaaaacagagcaccgccaccggaggaagaaacggtgaaggaagtgttgtctgaaacacccaaatggaagccaaaattcgaagcggagaagccaacagagagcgatgctgagaacgagaaggagaagctgttcgtcaaacccgatgagatctctgaggtttctgaagtttgcagtgtaagtgagagcctgtccacactcgccgaagaagaagcacgtcaaagggtcaacagatctccggcaaaggtgcgcaaagcacgctccttttccggcgagttcggctgccggagggaaatgacggcgaggaagtctccggcgaggaggccggagcagtctccgggaagaaggaatattgggtcggtgagagttgttcaaatggccaatggtggaaccggcagccagcctcgccggcgagactccggcgagatttccggtcgccgatccaggtcgccgggcacccgcaccgacagcatgtcaactagatccatcctgggtcagagcccgtcgaagaggagaacgcacacgaatcaatcaccggctagggtaagaaccggcacggcggagagcggtggccggaaaatggagaattcgagcatggagggtaaatggccttcatcagctattgagtcactagaaaaccctcttgtgtcgttggaatgcttcatatttctctagagtaggtgaaattagtgttgaggttaaagttattagtacttgttagtagtcattattagtgactcatagtattaatttctgtactttgtttgtttaattaactagtgtctgatggtaagcactaagcacttgaatcgagtgtaaatagttgaagtcaatggtcaattgtaggagtgagttattattggagggaaagggtggttggactctacttttacttgcattgcaacatggccttttggatagttgaatacgtaaatggttaaaaaaaaaaattgacctctgttttaaactcgtgc

SEQ ID NO: 23765 - DNA, 485 bp, Glycine max
  Clone ID: PAT_MRT3847_121461C.1
gaacaaacgtactgaacgtatatttattatataactgaagaacaagtaaagaaaacacacatgttaatgtcataaatatatctttatttaagcataggttttccatatatatattattgtgttcctttcaaactttcgatcaaatttgtttcacaaagatcctacttaagttgattggaagaatttgtgtgtctggttggcagaaacttctccctcagttcagcagcatcaacctgtccaaagtgattctcaggaatccaatttccactcttaggatctctcatccaaaacttttcctctttaatattaatgacattatcggatgctgactttgacttcatcgttgtgccttctatttgcttccttaaactttccgctacaacaacataacatctcttcctgcacctgagaagaaaagaaggacagacaagaatgttggccatgatgcttagagttagaaagatgagtgtaagggtgctcgagcc

SEQ ID NO: 23766 - DNA, 1992 bp, Glycine max
  Clone ID: PAT_MRT3847_121462C.1
gagaggaaaatgtaacattttattgaacaaacttgatgaaaaagaaaatttttacattatttaaagtgcaatcactaatagttgtaaaatcaattaacctcgaagaaaactatcataggatcatagataatttggttaacattgacacccataataaaatcatagtgagaataatcttccgtaaacaatactactaacttgtttccatcatgatctctaaggtcattgagcaaaagttgcacatcctttacattggatagcgcatcttgtcttccataggtgaggaaaagaggaaattcatttgaaattttggtcatgtcataaagaggaggaacccgttgtccatagtgttgcatattttgtctttggtcaccgtaatcatactttgctatttttgctgttctaatcatttgacatagatggatcaagttcttggttgctgttggcggtaatccatgatcaagataggcattgaatgcagatgaatttaggcagcagtttggacctgtgattagtgtcagtaggttgtttgagcagttgatcaggtttagaatatggcagatgcctcccactaatttgcttgcagcatccccgtttggaatgaattcacggaggcctaaccagtatagagggtcagctataaatgattgagcagcagttcttgccaccggcgacgtgacatgattcaagtgagcaattgggcaaagtaatgcagctgatctcaacatgtccaacagtttccctcgagacaaatccgctaaaaccattaaggttcccaaggaatgacctgcatagtgcattcgctggccggtttgattgtacacatactgaacaaaagcaggaagatcatacctagctaattcatcccatgaccaatcccaataagccatgtcattaggatgaagtgatatgtgcccgcggctatattttgtgccacgaacattggcaagccacacatcatatccatagtatgggtggtcaatcctccagatgaatcattgggatttatcttggcagacaatggatatgatgtgtggcttgccaatgttcgtggcacaaaatatagccgcgggcacatatcacttcatcctaatgacatggcttattgggattggtcatgggatgaattagctaggtatgatcttcctgcttttgttcagtatgtgtacaatcaaaccggccagcgaatgcactatgcaggtcattccttgggaaccttaatggttttagcggatttgtctcgagggaaactgttggacatgttgagatcagctgcattactttgcccaattgctcacttgaatcatgtcacgtcgccggtggcaagaactgctgctcaatcatttatagctgaccctctatactggttaggcctccgtgaattcattccaaacggggatgctgcaagcaaattagtgggaggcatctgccatattctaaacctgatcaactgctcaaacaacctactgacactaatcacaggtccaaactgctgcctaaattcatctgcattcaatgcctatcttgatcatggattaccgccaacagcaaccaagaacttgatccatctatgtcaaatgattagaacagcaaaaatagcaaagtatgattacggtgaccaaagacaaaatatgcaacactatggacaacgggttcctcctctttatgacatgaccaaaatttcaaatgaatttcctcttttcctcacctatggaagacaagatgcgctatccaatgtaaaggatgtgcaacttttgctcaatgaccttagagatcatgatggaaacaagttagtagtattgtttacggaagattattctcactatgattttattatgggtgtcaatgttaaccaaattatctatgatcctatgatagttttcttcgaggttaattgattttacaactattagtgattgcactttaaataatgtaaaaattttctttttcatcaagtttgttcaataaaatgttacattttcctctctaaaa

SEQ ID NO: 23767 - DNA, 429 bp, Glycine max
  Clone ID: PAT_MRT3847_121463C.1
ggctcgagctaaaagatatgatagcacgacaattattctactacagggaaggacgtctttaccaaggggagtatgcactggaagccattgggaatgctggaactgggctagggatcttgtccataagatggggtagttcaggtcggtgaaaagactggcacatacaagctgctggagacatcaagctacacctgagaaaatgtacaagatcgatgaacatgtagcctgtgctgtggctggaatgtatgtgctgatgccaacatgctaactcatactgctagagttcaggtccatggctatgcatatgcttaccaacatgcaatgcctgctgagcagatggatcaatctctgtgcgatactaggcaaggttacacacagtctgctggtcgtcgtccatttggagtcttattactgtttgctggttgtgac

SEQ ID NO: 23768 - DNA, 257 bp, Glycine max
  Clone ID: PAT_MRT3847_121464C.1
cacgcgtccgctttctcgatgtgcctttgaattaatcgagcccatacggcacaagcgttaatgttattgagaatgaggttttgttgccttttggtttatggaggcatgcctgcctgtaatcaacacattagccagatgtacgaggatatgcatcacgttattattccaaactgtaaccggaaggggcaaaggtgatgatgccgacgatgatgccccgagggcggtgtgccccggagttgtggggcgaccacggggcg

SEQ ID NO: 23769 - DNA, 253 bp, Glycine max
  Clone ID: PAT_MRT3847_121465C.1
agcgacaccgttttgccgtggaaggttaaaagcggaaaggcaagtcccgatgatattgtccacgtccacaacaacgtcgtgacagaggttcataatgataatgacgatgataacgagaacgcacattcaaccgttaactccgtttctgaaattgccaccagcgaaaccgacgctgttgaaggacaacgacatgttcatgttaatcacgttcaatacgaagttcgagtggcccccaaaccgcagtttcgaaact

SEQ ID NO: 23770 - DNA, 289 bp, Glycine max
  Clone ID: PAT_MRT3847_121466C.1
caacaccaccggcgagcctttttataccttaattcttgagtttgagcatgtctttcagaaacaatgaccttatttctactaacaacaaccatagcttgaacatgggtgatgaaccctttggacttgaatttgctaataatttcaagaaaggttcactgtctgtctctgcttgttcaaactacacttcttcttatacggacttcactcctgggtctgtaccaacttcacagccaatgaattttcaccactttgttttttctgaaatagttcctgccccttgcacaactga

SEQ ID NO: 23771 - DNA, 361 bp, Glycine max
  Clone ID: PAT_MRT3847_121467C.1
gtactcatcaaggaagaaaatccacgaggataaggatgctgaaccaactgaatttgaagagtcaggtggacaggcattgtttgatctggaaaataccaatcacgagcttaacagcgatctgaaagatttatacataaactcagccgcgcaagatgatgtttctgaaaaccgctagggtgatgatattcatgacccttacagattaaggaaagggttccgtaacattcatggtaggcttgtcagggagcttgacaagaaactcagtggcgaggatgtaatcttggttgccacccggaggagtttgaggccaccgataaagggttctgctgatcagcgtcctcgcatgcgcactcttactgct

SEQ ID NO: 23772 - DNA, 294 bp, Glycine max
  unsure (1)..(294): unsure at all n locations
  Clone ID: PAT_MRT3847_121468C.1
tgatattctcttggggatctcaaaaactgtagaaagtgccgggaatactcttatgccagctttttctgttccacaagctactgccagatcttctgaaaatgcggaatcctctgcatgatctggaaattggggtttctttcgcttggtcggggtttccttcataaaggggatgaagcaagacccccccggcgagnaggcaccgcccaccngaaaaagggcacaccgcgggcaaacggcggaacgaaaagggaaggggggnggaancnaaaaaaaaaaaaaaaaaaaaccgaccaa

SEQ ID NO: 23773 - DNA, 262 bp, Glycine max
  Clone ID: PAT_MRT3847_121469C.1
gtggggaacacaaaagacgacttcttccactatgatggactattttacacggcaagctaagatctcatagcgctgataagaacttattattggtaatggtagtttgcaattgtcctgcaatggacagaaaacagtattgaattcctaaccttctctgaaatatgacaactaatcttaaaaaactaacctactcccttgaacttttaaaaagtaaacccaataaaatcttcccaaaaacaatagttggccttaaccatccttt

SEQ ID NO: 23774 - DNA, 2041 bp, Glycine max
  Clone ID: PAT_MRT3847_12146C.1
ccagggtagatatctcactatgtcgggtatgaaatgagaagaataagagtagcttggtctctttcgtttgaaacgacgagtttaattacacgcacggcgctttgatccttccttccttccttgatagttgctaccgtgcgagagagattggaagcgtgtggcactggcattcctttccggagcggagaagatgaccatcgacttggattcgatcgctcgccgagtcgaggttgataatcgcattcccatccgctattactatcggattgccgataacctcctcaagcaggcaactatctaccgggaggagcataatgtagttgacttgtacatcattctccttagatttttaagtttggaatctgaaactttatcatatcatcgagattatcaagcttcactggcaaatgaaagagcagcaaataaggagagatcgcgagctgtgttggatgagcttgaatctttgaagcccgaatttaaactccgggtggaaaaaatgaatgactcacatgtaaaagctctattgcctgaagaaaatggtttcaataaggctttgcagagttcagtgaattcatctttgcaatggccggctgtcaataaacagcctgctgcgggattcagttcacagtcttcatggaattatgataatatgttatctttagattcctggcctattgacaagcagtttcagaaactatctgagagtctaccccctccaaataaggagactttgtccagacactcatttttaggaccaaatggccttcggggccaatggcttggacctagtgcggaaataaaggttcaatatccaagcagtggtgagctcacacaggccaaggattcaagcccgaatcaggctgggctatatgatcttgtggcaattaaagatggcgatcaaggaccagttacatccacaatggactcagttctctctttggatgatggaagatggttgcgtcctgctgtggagtcctgttctcctgttgtaactgaatcaagggaggaccccttacaattgctcaacatcaagcaacctttgccgcctcctattcttgctcaggtgtatccagaacgtgtccccattcctccttcaaaagttgcagatccaaggccaggacccgcgaaatcgtctcatgattctggacttggtgcaactacatatcaacacctacatattcctgtcaaaatgatggaagagtttttgagattggcttcggaaaacacaaggaaaaacttggagacatgtccggttcttgcagggtccctgaaaaaaagggtatttcatatcacaacacttataatcccaaagcaagaatcaacttcagactcgtgtcaaacattgaacgaagaagaaatatttgaagttcaagacagcttatcactttttcctttaggttggatacatacacacccatctcagacttgtttcatgtcttctgtagatctacacactcattactcataccagatcatgttaccagaggcaattgctattgtcatggcccctacagatactacaagtccacatggcatatttcatctgtctgatccgggtggtgtgtctgtcattcgtaactgtcagcaacgtggatttcatccccatgaggagcctgaggatggaactccaatatatgagcactgttctcatgtctatatgaatgctaacttgaagttcgatgttgttgaccttcgagagcgatgattgattgattcataaatcatcatatgagtgtgggctctctgatgaaagcagtgatttactttgcatcttttctaccagacgcgatatttaaaattgcattggtataggtggattcttttgtatttatgaatggagagaattactaattgccaattcctcgattttgtactatatctgtgaagcagtaaaaagatagttgtgtatatgatactttataccaggtgaataaattagaaatgtaacaaaattacttctatatgatatattatgtggatatttcgttacatttctaatttattcacctggattagttgtgtatatgatactttataccag

SEQ ID NO: 23775 - DNA, 262 bp, Glycine max
  Clone ID: PAT_MRT3847_121470C.1
cagaggtggaaatttagaggaacctaaaccgtggcgctttgcagacccctcttcactcaatgactttgatacttacagagcttctgagcgatttccacgaccatcgttgtcagatctacctaaaattgcccaagaaacaatgagtgcatatgaaactgtcaaaaagggtgtcaagaagttgatgaggaagtacactgtgaaagcttgcggttattgcactgaggttcatgtgggtccatggggtcacaatgctaagctttgt

SEQ ID NO: 23776 - DNA, 226 bp, Glycine max
  Clone ID: PAT_MRT3847_121471C.1
cgcgatataacgtataccagaccaaaatcaatctgaggagtcagaaagccatggatccctacatgaatagggcatcaagcgcgtgcaattatcactaatggactacatattacggtgctcccatatggaacaataactgatcgataactgatgaatatagaggtgcaattgtgttggacgattaccatttggagcataagcttgcaaactctgacagggaacggat

SEQ ID NO: 23777 - DNA, 479 bp, Glycine max
  Clone ID: PAT_MRT3847_121472C.1
gtcttattatagacgcgctttggcgagagaaaaattagacaaaatcggctcagcttttaatgatgcaaaagaggccattcgtttacgaccaggggacactgtgttagtggaattatgctcgcgtcttctcaaaatcaacgcagagcgtttaaaacaggtcgaaagtgtggaaaatcgtgcggaagaaatgctaaaaattgcatttggagagcaacaaagtgacaaagaaaagcacataaaggccatgaacaatttgcttgttttatgccgagactcaaatagcggggcaatgcgagtttggcaaaatggacaaattgcggcgcaattgttgggagttatcaaaggaaatgcatcggacgaagaagcactgtgtgctcgtaggattttggacgaattggccaagtcacgagaaaggtccgtccaaatgatggaatggctatccgtacaaaccctcgatcgactgccttcccttcgcccat

SEQ ID NO: 23778 - DNA, 197 bp, Glycine max
  Clone ID: PAT_MRT3847_121473C.1
ggctcgaggtccctcaagcttcgttttttagcatatagcatggctgctgacaggtatggacctgacagagaccacacggacacgaatggaaataccagatcatgctatcagaaacaattccctgctggatgcgaagccccatgcgcggctatcctggagtcgccggagcctcgctctaggaccagagacaggattgc

SEQ ID NO: 23779 - DNA, 147 bp, Glycine max
  Clone ID: PAT_MRT3847_121474C.1
cacacgtaggctcttcctctcatgatacgggatccaaatcttgtctctctgcgccagtgtagggtttccgctcaagggttcgaaacgcccgattttctctcaatgtcgaatctgcgattcatcgcaccctaaactaggagatagata

SEQ ID NO: 23780 - DNA, 487 bp, Glycine max
  Clone ID: PAT_MRT3847_121475C.1
ctgtctttgttatgtagaaaaatcatttattttagaatgtagtttgtatgtattatcatgatggtggaaatttgtttggaagattttaagaatcaagatgttttattttggaagagataactttctacactctatagtgactctagttaaccaacaaatatttttatttgttggatttagaacactgggtgtgagttctttttatttaaactatagcagtgttgtgttttaaacttaataaatttaaaagcaattgaaaagtaaagtgaaaaaaaagtaaatgattgaaattgtaaattgaaagcaatagtaaatggcactaaatgtatatgaaagcaaatatgtgcccaaaataatgtatatgcatgaaagcaaataaagtgtgtaaaatgtaaattactgggaaagtaaatcataatttaaagaactgattcaataagatgaaagttctattttctttttaataaaattattagaagaaggaatg

SEQ ID NO: 23781 - DNA, 733 bp, Glycine max
  unsure (1)..(733): unsure at all n locations
  Clone ID: PAT_MRT3847_121476C.1
acacaagtgagtgtgttagtcgagatactagagacagtgagatgaaaatgaaggtgcttgttatgttggatgctacaatactggtagcatggctgtgccatgcgtacgatatgtgccatctgcgaatgaacactgggtatggagcccgcactccggaggcgaaatgcgcatggtggaggcttgctggggaagctcacagcatgtttggctttgagaccattcctgaagagtgcgttgaatgaacataggaatacatgccgtggctgaacaatatagatcataactccaaaacagtgtatgccaacactgcttacttttgatgccacatacctcgtggtccatcccaaggacgcatttgggttcagtatagatggcaccggactgtgtaatatttcatactacaaaaaacatgggtgtggggtggagaaatttaattatgccttgtatgacgaatggggtaacgcgggcagtgcaacggggctgtccgtgactcttaataattacatcaaggtggtgactattggctttaagattatattattgtcgggaggaacactgggcatgcaggccgtatcagaggcgaacttagagaaggctggttaccacacatgggaaaaattaattnttatggatccacatgatgcttgcactccaaatgcagtttcatacaaaacagcagcgggagagaaactgataaggcaggggtacaacattggtgggatcattggggacc

SEQ ID NO: 23782 - DNA, 360 bp, Glycine max
  unsure (1)..(360): unsure at all n locations
  Clone ID: PAT_MRT3847_121477C.1
acggctgcgaggacgacagaagggcccattgtgtgtaacatttgcctaaaagaataattatttagtctcatgagaagcaaccaatttccaatttagtaccatttatcatatatcaagattggaaaatgcataataaaaaatttgttgaatatgcaggaataacttaaaatgaaaaaacaacaataaagaaaaaaataaaaatttaaacttgataaggaactaacctaagacttttaaagagatgtattgtgtcaaaatgtatgcttttctggtgccaccgttgctgcactttttcataggaattaaaagacatttagtatgagttaaatttatcaaccttctttcacagtaggtctcana

SEQ ID NO: 23783 - DNA, 583 bp, Glycine max
  unsure (1)..(583): unsure at all n locations
  Clone ID: PAT_MRT3847_121478C.1
ccacgcgtccgatttttttagggcatttcaggaattgacactgtctcctctgtccccttctactctcttccgattaacaaacaattttattaaccatgatgcagatcagctccaccataccagcacccaacctccacatgttccaaacgagacgcaccagtttccgatgccgtgcttctccgttgaacccaacaacctcgtcttctcctcaatccataaaatcggtctcagattccacccgcctgcacctctctaaccttgacaatctcctccagaagcaatcaccaacgacacagcccaaacaacaagaagaattgaccttagccgctacaattcaaaacaacaaaacaacgacaacggagaagaaaggaaagaacgttcttgaaggcctgaacctggcccgtctctggccggacatganagcaacggaggaaatgtcgccgcgccacctcaaccgccttcagcgcctnctcttcaagaccgacgagtactcgccgcgaaacacccttcgcagcctgtggcgggagtaccacggcagccacgactggaaaagcatgctcgaccccctcgacgagaatctccg

SEQ ID NO: 23784 - DNA, 372 bp, Glycine max
  Clone ID: PAT_MRT3847_121479C.1
ccccctaccttagcctggattcttttaaaccggctgcctttttttttttttttttaaaccaccattggattttttaccccaccttaaggaccggtaacccacctttttccccttaacaaaaacccaaacctttaaacatggtaaataatggcttccctcattttaaactaaccaaaatggactggtccaatccgtatttttaaaaaacggatgggaatgcggaaaaaaagggaaaaccaattgaaccaaccaaccccttttcaaacccaaacttaaagcttcctaatcacatgctatgaatttaaaacagtaccctcacatgacaatctttggctttaaaaggttggactggatctccttgtggggcaaaac

SEQ ID NO: 23785 - DNA, 543 bp, Glycine max
  unsure (1)..(543): unsure at all n locations
  Clone ID: PAT_MRT3847_12147C.1
gtttcttttttttttctgggaaaggaaatgccctcccattcacctccagtttctaatacctgactcctacctcttagtagtcctggctaacaccggtaaggtcgtgtcctacgtgcgcggtcctgatctcccatctggcgccagatactatgatgctgaccgcagtgactcatcctacggcggcatcagagtaccgcacctgacctaaggaccttctcgtgggcgcagtctgaccatccggtgagaagggattgcacgattatcctncacccgctctaagcgtactgtaatacgaggaagctgtggttcgaccattggagcgggcaccaatgccctatacgtagcctcgggatccacttaccctggagggtgccgaccacgctggagcgaacggagggaccgaaagatacaactgagaagacgacgagggcgatctcatgtctcgaataggagccgcgagagaggctactggaacctatcacactagagcatgtacactgtctcgagacgcactctggggatgtgattgccgaatatgtcgat

SEQ ID NO: 23786 - DNA, 442 bp, Glycine max
  Clone ID: PAT_MRT3847_121480C.1
aattggatttgctgcaatgatgcagaaataaatttattaccgttgaatgaagattgaacagtttatattttgactgtttattttaagtttagcatttgagttaaaatatgattcgtgtgatcttcatcggatgatgtccattaattgactgcgtagatgcattaaaactctgactgcagagaatctggatccttattagaggcatagtgatcactatttgtttatgttcttgagttagtgtctgtattaattttcaattcaacacattactagagtcggcatagtgaagagaagatttggatagtatgtataagataattaggttttaatttcagtgtgattattgtaaaaaaaaaaaaaaatattatgcttgtattgatttgaagaatttttcattatcatctaaggtggttaacgaagctgccaattttgctatgatgaa

SEQ ID NO: 23787 - DNA, 743 bp, Glycine max
  unsure (1)..(743): unsure at all n locations
  Clone ID: PAT_MRT3847_121481C.1
aatttcgcatgaacgttattanggagaacagaatgttataagacattataggttgctttcactgataaacatgacgctctggagagtacctcgttctgagaattcaaggccaacatgcctcaatacaacgatgtgatctacacttctatagtgaagaaagaacctgcagcaaaggacttgtttctcatatgctagctagatcgtaagtagacaccctatctaatacgctaaagactcatcgggatctcatagcatgtagaaatcgttatgttgacatatgtgagtcgtgacttccaactaggctctgactgtagaaactacgtgcggaaacagctgtgtgagaatagatgaccagcagctgtgaactgctgtatcgtgtcccacaaaaacacatcgctagatccatcagcttcaatgtgtgtgctaagagaactcatctgcatgagatacaatatgaggacactgatgtggaagactaatgatagtgacgaattgacccttgcttgttagaaattctacgattaatcgacatgacctattcagaaaggataattagcatctaatgcagagagtgtaataaatatgtcttgattcactatgaaacttagattactattatacaagatgctgatactgatgtgggccaaaataagtgtattgtatataatcgggtggccgtcttgcttcagaggattgctcttgccaagcaagataaatcagaagacgaatttactagcaactac

SEQ ID NO: 23788 - DNA, 215 bp, Glycine max
  Clone ID: PAT_MRT3847_121482C.1
ggtaagctgctgttagcagacataaccaataatggggacgagagcatgatggcgaccgctggaaccatgatgcccaagatcaagctaatagggataacgcggcagagactggaaaaggaaaatgacaacctatatgcccaaaaatccctacctgtagtctaatatctgcgggggggggggtcattcttacttgatttcatatcgttggccttttc

SEQ ID NO: 23789 - DNA, 358 bp, Glycine max
  Clone ID: PAT_MRT3847_121483C.1
acctactgcgagccacgcatccgtgatcaaatccacagcacttttacatgcatgaatcttggatcaacaccgtgcattgtggtgattcatgggaactctagattgataaatgagattcgataagcagaaatttggacacattaatagaacatatagttacaaaatggaccttgaagataacctttacattcgctcacagactgcaacaactatcgtaccctattttactatacatattaaggataatttatcgaatagaaactgttaatgacataaacactactactcaaaagccacaaaacatcctgaatcatttacagatcaatttgacttgaattaaccataatacccctattgt

SEQ ID NO: 23790 - DNA, 275 bp, Glycine max
  unsure (1)..(275): unsure at all n locations
  Clone ID: PAT_MRT3847_121484C.1
aattgattgcctgcnagcntggtagcccactgctgctaggtgttaaagaattggcagaaaataaagaacatggttcagcatttgaggataacaaattcctatcaaaagatggaaagcccaggcnaattgtntttgtccagtgatgccatgctgtggttgagcatacaaagaaagtgctagttattgaggatggngaagtagtnncatctcaaggatggtggggttnctatttggnantttgaagatgncagggaaancntggtnnttctctttcc

SEQ ID NO: 23791 - DNA, 262 bp, Glycine max
  Clone ID: PAT_MRT3847_121485C.1
caacaacaacagcaacaacaacaacaacagcaacaatttcaacaacagcaacagcagcagcagccgcaacagcagttgtttttgtttactaacgatagaacccccgctagttatagtaccaattgggcggatcttcatcctgattcccagaagattctccttcagatcgaggagcggatattggagtttagggatgaaagccagagactagatcagtgtagtcgtctttatgattcttcagtttccaacgatggatttgagc

SEQ ID NO: 23792 - DNA, 1046 bp, Glycine max
  unsure (1)..(1046): unsure at all n locations
  Clone ID: PAT_MRT3847_121486C.1
gtttcggaaacccgcggcgacccacgcgtccgggtttagttctttctgtatgggggtttttttccttcatggttacaggtagcattgcggcactaaattcggggatagggttaggtagcgtccttttggctctaggtgtttcaagtctccgggcatacaaaagaggacaaccttcttctttaatgctcaaaggccaaactgcaatagcaagtatattgtttttgcgggagataagattgctagctgcagaggggtcaccacttgtaacttatttcacttcattgatcagtggtgcagtagtggcattttatgtctacagattggtactggaacataaacaaaaaaatgcatcaaacttggaaaatggtgcagaaaattagttaaatcatacaaggatactaaaacttcctgtggtgtacgaccttcctctgaagtggcgtatcatgaactggttttacctttcattgacctctctagtaccctttccatttgcaaatggttctttagagagaaacccatgcttggtaggttgcaggtcctattatacagctaagagcttgttgatagttcaaatagggtcttgaattctgtcttttcccaccaaaaaataattaaaaaaatagaagcagccctcgagtttttgttcacccttacaggagggggaatttgcgcttctctcgagccgtgaaggttttgtgagactttcctcttttgaagtctaagaaacaattttaacgttgatgaggagttacagaggaaatataaacagtctgtagaaaatcacaaattcaagttatgaagttgtcatgaatcaaaggttgatattttacccattagttagcttttggaatttagtttgatccaagtttttttgtttcaaaggagtaaaggtcctccttggcctcaacaaaggttgtataaaaatataggtaaaaactgcacaattataaatctatttgctttccttaacataattaagtggatatattttgttgtacaaannnnnnnnnnnnnnnnnnnnnnnnnnnnnnnnnnnnnnnnnnnnn

SEQ ID NO: 23793 - DNA, 384 bp, Glycine max
  Clone ID: PAT_MRT3847_121487C.1
gctacctaaaacccttgctcctgtgtcaaattgacatacagccacctcacttctgcaactgattacctttaccggattcttgggccagacactatagggtaccggtgcctaaactctgtattcattattcctaaagccactggcttttcattctatattccttcaaagcaatggcagcatctaaaggacccaatagaaaggttcaagcaagggctttcatgaaggagaaaattgtgacaagcctcacagcatctgccttcacaaacttaatgattgctcctgatgaggccgaggccgacatttcgccttatcttaagaacttcttgatcagcatctccgccggtggtgtagatgttgcttccattatcgaaacagtggttcggg

SEQ ID NO: 23794 - DNA, 235 bp, Glycine max
  Clone ID: PAT_MRT3847_121488C.1
catatcagccatggatgtggaacgtgcgaaaccacgaagtgaaaccattgcctgaaggataacttcatccttccaaaatctatctctaccgatttactacttgctattcgcctctcaaaaacaccagcctgctctagtatgcaagcttgcgtaccatctctcatattatcgtgctatcaagctattctccattatcgaagatcacggcctaatacatattgcttaaaaaatagct

SEQ ID NO: 23795 - DNA, 690 bp, Glycine max
  Clone ID: PAT_MRT3847_121489C.1
aatacaaaattcaacgatcttcccatacatagaaattgaagatttttttacagtaccaaaaaacttttacgctgtcaataaattctaattacattcaaaaacaaaaaggaaaagcactagccacagaaaaaaacaaaaggaaaatagtaaataatttattttaacaaataagtaaataattaaattaaagatgagtttctaataatgatactcaatttctcaaacaattctgtgctaccagatgaagacattcaacacattttaaagttgaaaaggtagcacagggctgtgtaactgcctgcagttttgaaaaaataattgcaagagtgatccctatctgttccattcattggctgctccatatctgggggtggtactattcacttgactatatacctctggctttatggagtttccaaaggcattccaacctaaaaggtatggcatgatacaattgaaaagggaccttaaaacttttaggtctgcccttgtaacagggagaaagatgctttcctgaattccctccatgttcgcaggttttttcaaaacgtctttgaaaattcacacaacaaagtcagaactttttttttttgacagacaaattgaatcattttattaaaaaaaccagcactgtcacaagttgtgatacaagctggctgcaacaaattacaaatggtgaaaagggaagcc

SEQ ID NO: 23796 - DNA, 276 bp, Glycine max
  unsure (1)..(276): unsure at all n locations
  Clone ID: PAT_MRT3847_12148C.1
cttggttctgaatctgtctacntgtgcaaatcattctgtanttgttggatactgtataatnnataanagagaantgtggccctacctatttgaattcaggnacaatttattgacaactttagatttgatacctgtgtnagttgtttnaatgaagtttactaactggngtctgtttctcaaatgttcccctattctcctcanagacnccattctattgatacggtcacttcaaatatcacatctntgnatgggcaactatngattatgttcacaatg

SEQ ID NO: 23797 - DNA, 377 bp, Glycine max
  Clone ID: PAT_MRT3847_121490C.1
tctcttttttcttttttttttttttttttaaagaaatttttcaaaggaattctttccatccatttactaccacaaaaataataccaaaattcacaatattcatactcccaatatcttattctcattatatattgttaaaataaaaatttacacccaattttaatactaacacaacctattccttcatataccattatttattttttgaaaaatacattcatatacactactttaataacctcttcaaatttatatgaaatttcaaaaacaccttttaaactattccattattatcattttaatcaattccacataaatcttatttctcactatactttttacattatcctatattaccctttccaaccctcctcact

SEQ ID NO: 23798 - DNA, 428 bp, Glycine max
  Clone ID: PAT_MRT3847_121491C.1
ggttttccggatgaacattggttcttccgggcaaaccttctctcagggaaatttccggaagaagttgttctggagagttaccggagagaggttcttccggatgaccatttgttcttcccgaaactttccaaaactatttcttcaggaagatttggaagaagttttttgggaagtttctgaaagaagttttttggctagaagatccaaacgtttcaagtccgcttttcccccattttttatgacgacgtcttctaccctacggttcttctatcctaggctaaatgctacaagaccattgtacattaaaggggatgagagttaggggagactaacctcgacggcaaaaacgcagcaacaacatcagcgcgatcgaaaatggcagcaggaaggcacggaggagaagaaggagcagaagaagaaaagaaaga

SEQ ID NO: 23799 - DNA, 207 bp, Glycine max
  Clone ID: PAT_MRT3847_121492C.1
gcgaccacgcgttcggaaaaacgttcgaggctgttttggttttttggacccatttatgtcggggtaggggctgttcttcccgtggactgcataggaacaggtgaattcgaatggagcctgccacctatgccgtgtgagatttattaaaagaaaactgagtaaccgtggtctctttttccgaaatgtaataataagagctgttttttt

SEQ ID NO: 23800 - DNA, 514 bp, Glycine max
  Clone ID: PAT_MRT3847_121493C.1
tgtgtcatgtgtgctctaagagtttcaacagatataataatcttcagatgcatatgtggggacatggatctcaatatagaaagggccctgattctctaaaaggaacacaaccatcagcaatgctacggcttccatgcttttgttgtgcaccaggttgcaagcacaacatagaccacccaagagcaaggcctctgaaggacttcattatacccttcaaacacactacaagagaaaacacggcattaaaccctacatgtgcagaaaatgtgacaaaacgtttgcggtgaaaggtgattggaggacacacgagaagaactgtggcaaaatatggtactgtttatgtgggtctgatttcaaacacaaaagatctctaaaggatcacataaaggcctttggccatggccacggtgctgttgacattgattgcatgcaagaagatgaagcggcctccgaaattgaacatgatggggatatctcaatgtgaaaattaataagtttggaaaatcaaaattga

SEQ ID NO: 23801 - DNA, 462 bp, Glycine max
  Clone ID: PAT_MRT3847_121494C.1
ttgttttcctcaaactttttcccacttaattatcaggttccacacacccctatctctctgtctctctcactttgcgtctctcttgcagttagggtttcctctttaagggtgctctttctgtgacaaatctgcgccttatatctctcattggctaaggctcttttgtcttgtgagggtaaaagagcagcttcctaaagggcctcccaacaaggggaaaaaaaaaggtacttcccttttagttcatctgatcaaagaaacctatacatcacaaacaggcaaatcagaaaaaaaatggcatcatcaagctcctacaattctccatgtgctgcctgcaaattcttgaggaggaagtgccttccggggtgcatctttgcaccttacttcccaccagaggagcctcaaaaattcgcaaacgtgcacaagatcttcggtgctagcaacgtgacaaagcttctcaatgaa

SEQ ID NO: 23802 - DNA, 366 bp, Glycine max
  Clone ID: PAT_MRT3847_121495C.1
cgtcgacaaaagatagtctttctaatggaacacaaacactctttctttcgaagccataggtctctctctgcgcttctcgaccttcgatggcgctcgacctttcttcgaattggctcaaccgtctacgggttcctatccaatctgggccttcaatttcctcattcctttttcgcgggttttgaatgggagctgcggaattgcggacaggtgccgcatgtgcagcatgagcattgacagccccgttggagggaaggattagggtttcgtggtttgtgttcggtggcgaggattttcccatgggagatggaggcgttgcgtgtatacctctgcagcagcagcagcatgttattgagcggttgccgaatg

SEQ ID NO: 23803 - DNA, 209 bp, Glycine max
  Clone ID: PAT_MRT3847_121496C.1
cacaaatctggtgtcaccgtatcaactgggctcgctcaactagcttgtctatacccaatcagagctgaatctatgtggtacttagatcgttgggccactgcgactcagcatcacacaaaccaacactcaggtcctatgtcttccactcattttgactgaagcgttggtacaaacagaggaattatggtgcaccttctggactccataaa

SEQ ID NO: 23804 - DNA, 313 bp, Glycine max
  unsure (1)..(313): unsure at all n locations
  Clone ID: PAT_MRT3847_121497C.1
ggagaaactcaaggagttgggcgctgctgttgtgttggagcggataccctgaatttttnnnctnngngttctagtgttttgtgttagtaggagaataatcggaacttgtttgtgggtaataatgatgaatgatgaatgatagatggtaagttatatattattattaaaaaaaaaaaaaaaaaaaaaaaaaaaaaaaaaaaaaaaaaaaaaaaaaaaataataaaaacaaaaaaaataaaaaaataaaaaaaataaataaaaaaaaaaaatataagggggggccccccaccaaggggcccggtaccccgggaaa

SEQ ID NO: 23805 - DNA, 787 bp, Glycine max
  Clone ID: PAT_MRT3847_121498C.1
ccggtccggaattcccgcgtcgctcgcacaaatgggcaacacacccacaagtcatcaaacttcaattgagtttcaaagagatcagtggtagctagtgtggtgcaattgtgttgatcaaggatggaacaaaagaagtttgtggcactattaatggtggttgtggtaatggcttcttctatgtggaaagggtccaaaggtcttagtctctgtaacatggatgaaggtggattggaggcttgcaagccctcagtgactcagccaaacccagttgatccatcccctgattgctgcaaggctttggctggtgctgacttgaaatgcctttgctcttacaagaactcatcagagttgccttttcttggaattgatcgaactcttgctacttcacttcctgcaaagtgcaatctcactcccccagataattgctcataattaagcttctctgaactattatttgtgctctctttgtgtgttgtaatcttttttctgcagatagatgacctattgagaaaaaaggaaataatcgtactctaatttctatatctcttttttttgtgtgctaatatgttttcttcttcttggttgtatacattattataagtctatgtatttaaacgtttgagactgatggactgtttgaatttgttagtatgagtagtacttttggtcaaaaagctcaataatcattggaaaattaagtatgacctccaatatatttaatgtaaagaaccatgacgttagaagcaaatataatctttcatagaaaaaaaaaaaaaaaaagccccta

SEQ ID NO: 23806 - DNA, 2046 bp, Glycine max
  Clone ID: PAT_MRT3847_121499C.1
ccccccccccccgcgccatttgcggcgctcgagccgacggttcccggaaccaaggtgcacgcgaccgtacgcgcgtccggggacccgcgccccgcctcgcgcaacacacccacaagtcatcaaacttcaattgagtttcaaagagtacggaagacacccacaagtcatcaaacttcgattgagtttcaaagagatcagtggtagtgtggtacattgtgttgatcaaggatggaacaaaagaagtttgtggcactattaatggtggtggtggtgatggcttcttctatgtggaaaggatccaaaggtcttagtctctgtaacatggatgaagatggattggaggcttgcaagccctcagtgactcagccaaacccagttgatccatcccctgattgctgcaaggctctggatggtgctgacttgaagtgcctttgctcttacaagaactcatcagagttgcctcttctaggaattgatctaactcttgctgcttcacttcctgcaaagtgcaatctcactcctccagataattgctagttagcttctctgagctatttctgctttttgtttttgtgtgttataatcttttttctgcagatgacctattgagaaaaaagaaaattattgtactctaatttttatccctcttatttttgtggtacaatataagtacctttattttcttctaccgccgccacgacgatcattcttctaccgcaaatgttcgtgatcaaggacctggtcgtggacatgacgaacttctacaatcagtataagagtatcgaatccccaatacccatttcggtaaataatataatcgcaatccttcttcactcgcttcgatggcgacagggttactgaagagggcggcgcagaggctcccctcctcgccggggttcaagctggccctcctccgggcccacgcgtcggaggcccaggcccagcaggtggagcccaaggcccgcggcaccccgaccctcaaaaccttccaaatctaccgctggagcccggagaacccctcaaagcccgagctcaaggactaccagatcaacctaaaggagtgcgggcccatggtcctggacgcgctcatcaagatcaagaacgagatcgacccgagcctcacgttccgccgctcgtgccgcgaggggatctgcggctcctgcgccatgaacatcgacggttgcaacggcctcgcgtgcctcaccaagatcccctccgaaggcgccgccaccacgatcacccctctgccacacatgttcgtgatcaaggacctcgtcgtcgacatgacgaacttctacaatcagtacaagagtatcgagccgtggctcaagaggaagaacccaccggagccggggaaggagattctacagagcaagaaggagagggagaaactcgatgggatgtacgagtgcatactgtgcgcctgctgtagcacgtcctgccccagctactggtggaaccccgagtcctacctcggtcccgccgcgttgctccacgctaataggtggataagtgacagtcgtgatgagtacactaaggagagattggatgccattaatgatgaattcaagctctatcgctgccacaccatattgaactgtgctcgagcctgcccaaaggggttaaacccaggaaagcaaatctcacatatcaagtcacttcagcctaaagcataaaatcctattgttagaggcatgatgatgtttgcatttgatcatttatgttgcaactttgtattttcttcgtagttggggatgatttagctatattcttaataaaacctgagccccttttgtaaaacttgggttttaagtttttattgacttgtgtttctctgaaataaatgttaatagcaaacagaaccccatctcataaaattggctgtagctatgttggatttagatatacaagctaaatactccctggatttttccccccaaaagatttgcactggaaactgggaggcacgcatgtttctttttgtcttaaataaaaatttcaaagttctcttctgaaaaaaaaagacaaaggtcgagcgctctagag

SEQ ID NO: 23807 - DNA, 575 bp, Glycine max
  Clone ID: PAT_MRT3847_12149C.1
gattattaataaataattttattttttaagcatgggaagatgaattccattttttttcttcactggtatgaaaaaacatttgtgaaaaatcaaataccttaaataagtaaacggtggtgccccactataacaggtcagtccaaaatcaagtgtcgcataaaaatccaaagcaagttcaagtttaagattactatgccccggcacgttacttctcacttgttggaagtgatgatgatggcaaaagaggaacttcatgatcatggaccgtttgatttcttttgataccatccatctttgtgcagtttccaaatgctttcggtttcccacagtacgtccaacttacgacacaaagaagccgtttagtttaaccacttctctttgcgatgtttcgttcacaacgttcatgcctctaaacggccacccagtttcatttcaatttgtgaaaccactaacccaaaccaccccatacccattattacattacattaaatatgttcaaattaaaaatgaaaaataaaaataaaggtaaaaggacttgcattacatataaagtctcctaatgggttacaaaagct

SEQ ID NO: 23808 - DNA, 413 bp, Glycine max
  Clone ID: PAT_MRT3847_1214C.1
acggggacgcgtgacgaataagggtgcactagcaagcaggtagtgctgacccctggtcgtgtacaacttttgctcaatatagaaactacttgatttcgggcatatggagggcgcaatgcaaagcggatatcgaagatggatcgcggatgcattgtcggggcagatctatctgaattgaacctggtcatcggacagacaggcgccagggatagaccatgtctgactgatggaagagacgcctaggatgagggagtctaagagagcatccaaagctaccaagctgatcaacctgcacacagaggacgactcgagaaagagtgctgacacataccctcgaacctatgcaacaacagctggtgaaatagcgagcagcgctcctgggattaaacgactagagactgcattgacactcc

SEQ ID NO: 23809 - DNA, 286 bp, Glycine max
  Clone ID: PAT_MRT3847_121500C.1
aatgatgatgaattctgctatgtgtgcagtggtgggtgtagcactttttcttctggcggaggtggggcccatggttgaggctgtgacatgcaccccaacaaagttgagtgcgggtcttccagccttcacttccggtgcttaaccttccaatgcttgttgcacgaacctgaatcagctaacaccatgcttatgtggctacctcacttacgctatcttgaagcagtatgtttactctcctaatgcccgaaaaaccgttgcttcttgtgggattccctttccaacttgt

SEQ ID NO: 23810 - DNA, 365 bp, Glycine max
  Clone ID: PAT_MRT3847_121501C.1
ccatcattgagaccatgaagaagcagggcatcaagtgccatatgaaggctgagatcgagaagatcctccctgctgagtccaactcggcgcactgcggctccgttcagctcaagggcgccccgtccctccccgccaacctgatcattatgggcacgggtgtcgggccatctacgtcgttcctgaaggactcgggcttcgagctcgagaaggacggcggaatcgccgtggacgagtacctccgcgtcaagggccaccagaacatctacgccatcggcgatatcgcccactacccgcagtaccccgccaagttccagcgacgggtcgagcactggaacgtggccggcaaccacggtcgagaggtggcg

SEQ ID NO: 23811 - DNA, 274 bp, Glycine max
  Clone ID: PAT_MRT3847_121502C.1
gcacgaggagaactagtctcgagttttttttttttttttttttcaattcaaagaaggcaacaaaaaaagcattatgcacattaattcttttcgttgttccacttggatggcctcttccaaagagagattcccattccgcaaaagcaaactaaacaagtttgttctagtactctagtctaataccccctttgcctaaataagagaaaagctcgcttaacagtaaagaaaatagtggtatgaaaaaaaaaaaaaaaaaaaaaaaaaaaaaaaaaaa

SEQ ID NO: 23812 - DNA, 295 bp, Glycine max
  Clone ID: PAT_MRT3847_121503C.1
cttcttcctctgagcacggttaaacgaaactttttttttcatattttcacaaagagcgttataaatagctcatctcgcaaccttttttaaaactccttccaactaggacctctagatggttctccctaataaattgaccctgcggggaactttttggatcgcccttaattaacatggtgactgtgtcccccaacatattctttgagccatatttgattctgccccggggggccaccccctggggagcgaggaccatagggtttttgttctaaatttctaaccccttgacgccctg

SEQ ID NO: 23813 - DNA, 171 bp, Glycine max
  unsure (1)..(171): unsure at all n locations
  Clone ID: PAT_MRT3847_121504C.1
ggctcgaggaaacaggctttgacaaaagaactttttcgcactttcgcgagcaacaaccgggaaggggaagggggggcaccgaaaccggacctcccgcgttgaacgtggcctagcccaccacgttaaccgctctggcagtgnnccggatttgctcaaaaccggaacgaaccc

SEQ ID NO: 23814 - DNA, 1204 bp, Glycine max
  Clone ID: PAT_MRT3847_121505C.1
cacagccactatcttggggagaatcccagtggttattttattgtgataagcataatgagtgaatacaaatacagcattatttcattacaaacttgcacggttcttatcaactcaattgctttggtggtgtagttgcaaacttccaagtatagttgcttaacatcccatactctcgtgtcccagcaacttcataaacaggaactgcttcagaaagttccctcaaatcttcttctgtaagcttcacagtcagagatccaatgttgttttcaaagttcttcagtttagtagtcccaggtatagggattatgtcatttccctgatggagaagccatgctaaggctaattgtgaaggagtgcaggcatgcttagaagccaagtcatcaagtcgtttatagaaaagcttgttcttctccaaattttctcccgtgaacctgggatgcatactcagcaagctctgactaggcaaagtctctaccactgcctttcctgcaaaaaagccacgaccaagaggactatatgccactattccaatcccaagttgtctgcagagtggaattatttcttcttcaatgtcacgagtccataaggaatactccatttgcaaagcagtaataggatgaacagcatgtgctctccttatagtgtcagcattagcctctgacaacccaatatattttatctttccttcatttacaagctgtttgagctctcccatagtgtcttcaattggcactgaagtgtcaacacgatgttgatagtataaatcaatatggtccacatcaagccgtttaagactagcttcacagcactgtcgcacatattcaggggtaccttttaccccaaaatccaacccatctggacctgataccgtaacaccaaattttgtagccaactggactttttctcggggaagttgtttcaaagccttaccaaccatgatttcattatcatgattttgtccgtaaagatctgatgtatcaaagaaggtaacacccttattgaacacttccttaatgattgaacatccttcttcatgcgagaggggggcattataaattccagatagtcctccacatccaaagcccaacctagaaacctctaagccttggttacccagtttaactcttgggacttgcatatgtgccttctccatttttcaacgccttgagatgcaaagttgaagctcgagccgattcggctcgag

SEQ ID NO: 23815 - DNA, 182 bp, Glycine max
  Clone ID: PAT_MRT3847_121506C.1
ggaactcataggccacttatgggatatttgcctggtgacgacttgaaaagtgatcaacttgcttcccaccaagggcttgaggcccagcctgaggaccaagttcaacacagtcgttgcatagacacctcactgaatgctgctaacagtgatcttggtgattctggagatcaggcacttgaagc

SEQ ID NO: 23816 - DNA, 567 bp, Glycine max
  Clone ID: PAT_MRT3847_121507C.1
atcacataatgcaagccaatcaaatcatgtaagcgatgcttcaggcattgaggaattggaaattgcggttgctgattacaattggtccctcagacatagacaaatcacatctcttaatctgaaatacttggcttcttggaacatggctcttcgtgtggatgtagaaggcaatggaactgattcacgtgggtcaagatgctacttccctaattttgaggagcattttgatgatgttatctatccgaaaggggatccggatgctgtttccctaagcaagagagatgtagatctcttgcaaccagacacattcattaatgacacaattattgatttttacatccagtatctcaagaatcaaataccggacaaggaaaagcctagatttcatttttttaatagtttcttctttagaaagctggctgatatggacaaaaatccatctagtgcttctgatggaaaagcagcatttctgcgcgttcgtaaatggacgagaaaagtaaatttgtttggcaaggattatatattcattcctgtgaacttaatcttcactgaagttaatagtcatat

SEQ ID NO: 23817 - DNA, 167 bp, Glycine max
  Clone ID: PAT_MRT3847_121508C.1
cttagatcggaggaagagaaacctgcatattccaaagtctgaagtatgtcaagtcgtactagagatattagtgccggctgtcaaaaaacagggtatcccactgaaaagagtcctgcgaatggaactacttatgacaagagttgccgctaatgcactcatggagggtg

SEQ ID NO: 23818 - DNA, 278 bp, Glycine max
  Clone ID: PAT_MRT3847_121509C.1
tgcatatagtgacagtataacctgtctatactacagtagttccagtcctaactttctgaattatttttaaagatcttctctaacaagctatgggaatttggcttcatactctttctttgcaacagcagtgttctgggtgataattttgaattgatacctgttcctttttctgggttttgttggctttttgaaaaattgtctttccttatcattggtgggaggcttgtagcaaagtaccttttttggaaaagaggacgaaaaattgaactaccgcttga

SEQ ID NO: 23819 - DNA, 406 bp, Glycine max
  Clone ID: PAT_MRT3847_12150C.1
gacacatcccatttcttctgcctgcgccatattacacaaaattttcttcgcggtaactcaaaagacaaacatttaaagaaaccactcttgctggctggtttcgcataaacggagaagatgcacttgtgacatcttggggtatccgtgccaataagccaagtgcagctaaatggcttgatcaactacccaaacaaaattgggtacaatgcttcgataagggaaaatgttaaggacatatgactacaaatttgtctgagtctattaattccatgttaaaaaaacagaaaacgtttgtcggtgtcattgttggttgaggagacgtacttcaagaccacataactctttgctattagaggccaacaaacttaggcaatgatcaactccgactcacagtattttgaagtca

SEQ ID NO: 23820 - DNA, 421 bp, Glycine max
  unsure (1)..(421): unsure at all n locations
  Clone ID: PAT_MRT3847_121510C.1
ggtggagctccttttgtcacttgtcataaatgcttaaacctgttgcagctacctgcagattttctccttttcgaaagggcatgtcatcagctgatatgtggagaatgttcagaggtgctaaagttttcaatgcatggaagccatatagattttttctcaccaaataatgctataggtcctccatcaagtgaccttaatggtcgaagcgaggtgattagtagcagaaatctaccttcagcatctcatgccaactattaccattattcagctactgaggccatttcatattatgatgattatggactttctatctctaaaagctactcctcacaaggagagcctgtntctctggcacattctcatcacttgcacagcggtgaatatgctaatccaagtgtctctcatggtacatttgagcctt

SEQ ID NO: 23821 - DNA, 342 bp, Glycine max
  Clone ID: PAT_MRT3847_121511C.1
cgccgccgtagccagagccccgcgcaccgtacgccgtgaacctaagcgccccgggagccgctcgctaatcaccaccagcgcaatggtcctgatcaaggagtaccgcatctgcatgccgctgaccgtcgacgaggtaagcagagtacaccaccggcggcgcgagtcgttcatttgtttgattatattggcggcacgtctaccggtggccgcaacggtcattgaggcccttcttgtgtctcgggcccgccgcttatccctcgccgcggggggccttccgccgaaactgtgggccctttttgattttttattcgtttcaataacaaacccctttggccacccttt

SEQ ID NO: 23822 - DNA, 338 bp, Glycine max
  Clone ID: PAT_MRT3847_121512C.1
ctcattagcttttttacttggggtcttttttggggcaagcccctttacagggcaccctctagtgcgaaatcccataaaatgaccacaaattttttcttaaaaaacattaatctactgccttttaaggggccctgggacttattttgtaaagctcaaaaggaaattgaacaaacaatgggaacccttgcaagttggcgctacctttaactgttaacgcaaaagggaaaaaaaaaggggaacgcgccgtaaaaatctttttatttttaaatctcctcctgggtaagggatattaaaaggggggttacaaaccttgcttccaaggtaaaccccgcaattga

SEQ ID NO: 23823 - DNA, 341 bp, Glycine max
  Clone ID: PAT_MRT3847_121513C.1
ggaaagcaagagtccaaggcgggtttcccctaaaaattagcaaaactttttttgttttgaaaataacatccagggggacccttttttagaaactcttttcctttttttttgagcattaaaagggcattgttccattatcctgccttaaagcttccttggggggggttttataactgctagtttcgggggggggttatgggttttccttttgcttataaacaccaagcctggtgttagaaccatccctccttttgcccaaaaaactttttcaccaaatgggttttccctcccccattggtggaaataatccaacatcctaaagctttcacctttccggggga

SEQ ID NO: 23824 - DNA, 761 bp, Glycine max
  Clone ID: PAT_MRT3847_121514C.1
aaataaaggatgtagttgttattgtcaaaattcctataatatattttcaactttttctcttgggctttattttatatcttaacacttaaaatatccaatgtataaagtttctaatagtttggctttgtacaaatttcatactgaactacacaaagacgcagagctgaattaatcggcattcatcacatcacagcgacacagccctgatttatctttttctgcctttggtaaattactcaaagttaatttgtcagtgtttgagatgatgcatgattgcatgaatatattgtggacatgttcttaagcatttatctgttgttttgttgagtttacctgtttatttatctttatttatgttctattgtgtcactggtaaggcatttcagggtttcaaggcatataattcttcctctactgtattcctgaaatcttggtgcatggctttgttctcctcattaaccctgtaaagaagtgactttcttctgtagtcagttgggattgttctatggtctcataattggccaaatttattttgctgtccaattggcagagctgattaatggaaaatattctcttttatttttgagatgaactgtatgacctccattggtcttactacttgtaatttgtaaatctgctcagtttagttcaagaaagttcttgaaaagttaaacataatattgattggtcttgaaaaaatgttgtgaattgtttcatgggttagcttgagtttttgaatgaagtgatttcttaaagtatta

SEQ ID NO: 23825 - DNA, 306 bp, Glycine max
  Clone ID: PAT_MRT3847_121515C.1
agagtctaaaggtgaagaaagtggtggttttttcacatagaaagctcatgcaaaatgcggcgggtttcatcggcaacaacgccactctcgattatataaggattccttaatacacatggatctcattcaacggctttcactgtttcccaacccaatgcgtcttaacaagacttcaatagactcaattctgttctctaagatccacatttatatctccatatacttacaacgctagacaatatcaaaccattctaattgtataataacgaactaactactaagaacaatgtatcaacttccgatagg

SEQ ID NO: 23826 - DNA, 339 bp, Glycine max
  Clone ID: PAT_MRT3847_121516C.1
ggcaaaaaagataattttatcaagcactattggtccttaattttcccatggggggggaggccaacccaaaaacccaacaccctttgggtcttctcaccccaaaacacgaggatgggaattgcctaaaaaagacccctaaggtgtttatttttcaataaaaaaggaagggtggcccctgaaaaatgcaaaaacttcttttatttttatatttcacaaatgggttttttcccatacaacaaaaaaattttttttgtgcataaaaaaccccgccccccattttttttccccccccaaagatgtattcccgctttatttttacccccattttttttttttttt

SEQ ID NO: 23827 - DNA, 378 bp, Glycine max
  unsure (1)..(378): unsure at all n locations
  Clone ID: PAT_MRT3847_121517C.1
gatctctggtcgacgaaacagaatgagaaccaatacaaaagtggagatagctaacagtgacaagaactaaagcaaaaaatatgaatgagagacatttaaggtttcgatcatatctatgtagagaagacaaggcatattccacgagggaagaagacgaagaaacaaagctatataaagggctgcaagtgaacaaggctgcggggcacatgcagattgtgccgctgctatcatcggagaaaattcaacanaaaaaaaaaaaacttgatagttatgatgaaattgcaaccacaagccatgggtgctctccccaataataaattacggccttaattccccaaccggaattagtaggctcatcagcccattccaattctgtct

SEQ ID NO: 23828 - DNA, 569 bp, Glycine max
  Clone ID: PAT_MRT3847_121518C.1
ggactacgtcgatctatagctaccaatgtaccaagtaccgtacccgtggtgaggagggcggaacggctagcggtaagttgctagaggcagctgaggggagtgtcggtgaagccagaaaggacggttgggcataaaaaaaaaaaaaaaaaaaaaaaaaaaaaaaaaaaaaaaaaaaaaaaaaaaaaccctccttcttcatgacgcactgtcgtcatttcccaaggaaggttccattccgattgctacctcgattactgggtttgagacgcacgtcgaggacactggcctcgaagtagccgtagactgcgggttgcgcgcaaaggcggagttctgtataaggttatataatagatcacttccaactagaaacgcgaaacttgccccgcttgaagcacgcactgaatgtataggaaggctcggctctgtatgctttctgggttacgtcccaaattgcgtcgcttactgctaggaagcaagtcctactaatctctccccacacctccgggctcgaggccctcttacccaccgggggtggggtattacgcacatccctaatactgcaggctttg

SEQ ID NO: 23829 - DNA, 415 bp, Glycine max
  Clone ID: PAT_MRT3847_121519C.1
ccacataaaacatatagattcactgaattaatccatatccaagggggaacgtttcataaaattgaccatttatactctcacatttatgagacccttgtttcagtatgaaatcaagggtcccaagtttgactccggaatcagcctcttgcacatgcaaattaacgctgtctacatggatccatacagggtcccacacttgatcatgccacggctagagttcaaaaaccccacgttgcccttttattctcttaattaaatccttcgaatgccttattttccaacccttaatactaaaaggattttgggtccaccaagcataaggaaccaaagatgcccatcaaacttctattttcattataaacatattgcctcgctccatcaaaagtgttacacaaagtattgttctcgtccattc

SEQ ID NO: 23830 - DNA, 177 bp, Glycine max
  Clone ID: PAT_MRT3847_12151C.1
gggttttcctaatgtgctttaacgccaaattggtgaacacggcctgaggagattcgatgctggggatggtgaatagtaaaccactgactccagcaaccactgtctgataggcttactccaagttaaatggtgcactttagagataggttcctacataagatggctgtgaagggccca

SEQ ID NO: 23831 - DNA, 809 bp, Glycine max
  Clone ID: PAT_MRT3847_121520C.1
ctgctaacaatttgaagcgcctagctgaagaatttggtcctgagtgggctatgcaacacataattccacaggttttggagatgattagcaatcctcactatttgtatcgaatgaccatactccatgctatctctctacttgctcctgtgatgggctctgaaatcactcgttcagaattattgcctattgttattactgcatctaaagacagagtacccaacattaagttcaatgtggcaaaggtcttggagtcaatcttccccatagtggatcaatctgttgtggagaagacgattcgtccaagtctggttgagctcagcgaggatcctgatgttgatgtaagatttttttccaatcaagcacttcacgcaatggatcatgtcatgatgtctagctaggaagcaatcttcaacacgcgttagattgaaggcctgtgtagagatatgctaatattgccacctatcagaatacttctattctacttggtgcttctcggcgttgtgagcgacatcttagtcattaacgattgatgtaattttgtactaatgttgattgtattttgctaggttcttttttgtttcttgtcctcgtagacagcaaattgctggtctctgacggcaaaaaaatgattttcaaatgttaaggactcaatataggttaagtgcgatgaaatcttagcttgtataaaaatgtattttacattggttcattatgcatttttgcaaagggcagtaatggtacatggcccttaaccctattagggtgtgggtattgttaaaccatataacaaatgaaaattctttgtaact

SEQ ID NO: 23832 - DNA, 151 bp, Glycine max
  Clone ID: PAT_MRT3847_121521C.1
gttttaggtggggtttgtactgtggcatttgtttaagtatctttttaggtttttggttgaacgaattggtaatggatcacaacacaagctatggaagatgctcagcgtatttgatgtccggtgctatgtcaaggggatagatgatagaatg

SEQ ID NO: 23833 - DNA, 641 bp, Glycine max
  unsure (1)..(641): unsure at all n locations
  Clone ID: PAT_MRT3847_121522C.1
agtgcttgagatatgcaggagtgaaggaattccatttcgagaagttgctccatcatggtcagaatgtgaaatctggnaggaggcattcatcacaaatagcttgaggcttttacaacatgtggatagtattcaggttccaacagaatggcaatcagcccattctaaaacgtggaaggatatatcatggacaaaaaagcaatttcaggaaaagattatggagaaagcaattctggaagggtacccaataagtaacatatatgcaggttgaagatcccactgagttgctaatatgctgggatgaaacggacaatagttgagcatctagttctccccttctttgggcttatacattggcaattccatattttcttagctcatcaaatagatgacaacagtgtgatctcttggaagatggccgttttcttgaatctgaagtctgaacaacttcatgaataagccagagaccaaatagagagaattggaacaaaaatagagaaatcaagttcttatactgatgtctagcaggatttatttactccttcatacaccacttgtgtgaacattaatatcagcttatatctgtttatatggaaaatgtcttccaaaaaaaatctaaaaaaaaaaaaaaaaaaaaagggcgt

SEQ ID NO: 23834 - DNA, 1112 bp, Glycine max
  Clone ID: PAT_MRT3847_121523C.1
cagaattctaaataaagacaaaattctgtttttgggccaggtttgagcacaaagacaggttttccccctaacaaagagcttcctctttcaaaacacagggaataacaatctgacaccttaatttccttttacaagtctacaacacaacttatgtatcactaaactgtcgcatcatcacttataaatataacttcctaatccgaaattaatataaaaataaatgtccactgactttataatacaaatttataactgcctaaatcaaatgctgggctatcatattctaacattcacttgggactaaatgtcgttgcagatagcttgaggcttttacaacatgtggatagtattcaggttccaacagaatggcaatcagcccattctaaaacgtggaaggatatatcatggacaaaaaagcaatttcaggtggtatatttctactggtgctgcaattaattcacttttttttttttaatgattttctcaactcgagttgcagggtggacctgggatgatcacaactattatccaggaaaagattatggagaaagcaattctggaagggtacccaataagtaacatatatgcaggttgaagatcccactgagttgctaatatgctgggatgaaacggacaatagttgagcatctagttctccccttctttgggcttatacattggcaattccatattttcttagctcatcaaatagatggcagcagtgtgatctcttggaagatggccgttttcttgaatttgaagtttgaacaacttcatgaataagccagagaccaaatagagagaattggaacaaaaatagagaaatcaagttcttatactgatgtctagcaggatttatttactccttcataccccacttgtgtgaacattaatatcagcttatatctgtttatatggaaaatgtcttccaattcattttgcggaaaaaaaaaagatgatgagaaggccctgtgtgattatggaaataaatactcttttgaaagtcaaacagctccgatcagcgatggtgttcttccaggaacaatacgccaactagtgcttgagatatgcaggagtgaaggaattccatttcgagaagttgctccatcatg

SEQ ID NO: 23835 - DNA, 307 bp, Glycine max
  Clone ID: PAT_MRT3847_121524C.1
acgataagtctcttcctacttgaagaaagtaggtttcaaccctgacaagattccttttgggccggtctctggctttgagggagacaacatgactgagaggtccacatacctttactggtacaagggtccaactctgcttgatgcacttgaccagtttagtgtgcccaagaggttctttgtctagtcccttatgctttccctacaagatctgtacaagattggaggtattggaactgtgccaatgtgacgtgttgagacctgcgtcttgaaacctgcaatggtggagacttttgtaccaacttgactg

SEQ ID NO: 23836 - DNA, 2721 bp, Glycine max
  Clone ID: PAT_MRT3847_121525C.1
cgaagctcttattcggctggacctgacccaaaatccgtcttctctttctttctactccgattcctgcgttgcttttggtcttggtcgaattgcgaactcagcagcagaagaagttcctcaattgtttcacctcaaattcgattcgaactatgtaaacgccactgtcgcgtcgggtttgttgtctctgtttttgttgcggtgttactgttcctcggttcggatctccgaagcatgaatctcagcaacggaaagggatccatgtcaacccttactgcaagcgtggttatgaaatccggcgacgccgtctccgaccagtttccggcgggtctccgggttctcgtggtggacgatgatcccacgtgtctcatgattcttgagaagatgctccgcacgtgcctctacgaagttaccaaatgtaatcgagcagaaactgctctctcactgcttagagagaacaaaaatgggtttgacattgttataagcgatgtgcatatgccggacatggatggatttaaacttttggagcacattgggttagagatggaccttcctgttataatgatgtctgcggatgatggtaaaagtgttgttatgaagggtgtgactcatggtgcttgtgattacttaattaagcctgttcgcattgaggctttgaagaacatatggcagcacgtggttcggaagaggaagaatgagtggaaagacgcggagcaatcagggagtgctgaggaaggagatcggcaaccaaaggcttctgacgaagcagattactcttcctcagcgaatgaaggcagttggagaaactcaaagaagagaagggatgaggaagaggagggcagaggatgactcatccacgttaaagaagccgcgagttgtttggtctgttgagcttcatcaacagtttgtggctgttgtggatcaacttggaattgataaggctgttcctaaaaaaattttggaattgatgaatgttcctgggcttactagagaaaatgttgctagccatcttcagaaataccgtttgtatcttagaaggctgagtggagtttcacagcagcagggtaacttgagcaactccttcatgagctcacaagaagcaacatttgggggaacctcaatcaatggaattgatcttcaaaccctttcagctgctggccagttcccatcacaaagtctagccaagtttcaagctgctggacttggcaggacaactgccaaagcaggtatacctatgtctctatccgatcaaaagaaccttttcagttttgagaacccaagattaagatttggagaagggtcactaactcatatggatatccgtaagccaaaaaacttgcttcatggaattcttaccaacatggagccaaagcagcttgccaatttgcaccaatctacccaaccccttggtagcttgaatatgcgagtcaattctcctgccacgcagaacaaacccttgctgatgcagatgactcaggctcaaccaaaaggtcagttgctgagtgagaatgtcaatacgaattaaaccaggtatccgtcatctttgttgcagactacagaagaagaagatctttcaactggtgtttcgggaaatgcaattgcttgttccagaaacattactaccacttataaccctgttcaacagaaatcttctttggtgaaggtggccatgaatagagatgataaatccacagcaaagaagccccaggttgttaggtccctggagatccatcgtaagtttgttgcagctttgtttcaacaagaaggtacctctggtgttaaagaatctgttgtattatttaaaagttatgacatgtttaatgaccttcaccatcagaagtcccatgattgggacttaacaaacacaggcatgacatatgatgcttctcagcatgcaaaaccatctcaaacaacccttttttcggccccacaagacgcgattcatgagagtttttcctctatgcaagagactgatcttcatacagatactacttcaattggaaaagctatgttctccacaggtgaaggcatgcatcagagtagtctccaaaatattggtcaacaccgagcaataaccttcttcttgacaattcagtaagggttaaggctgaaagaattcctgatcctagctgtcagattaataacctcttctctgaccaatatggtcaggaggatcttgtcagtgcatttctgaaacagcaagaaggcgttggaacagctgaaaatgagtttgactttgatggatattccttagacaacattccagtttagaacagattctgcccgttctcttcctaattgcagtcgccaatgcaaatagttggcgttccatttgaaccaaatcgcactgcaattagtttgtttggatcttagtttaaatttttcaacaaatagaatttaattgatgtaaaaaattcaggcttcagggagtagtatgttattatgatttagtctggatgctcaaagatcatttaagtgatccatcaagatgaataacaacaaactttaaatgcatgtgtgcaaaaggcatatttgcaattttttggctgctttcgtttgccaaggttctagcaagcttatgttgttaaggtgtacatgaagacactggtttagggaaaaactgtagagggcaaggctttgatacacctgcagacttgtaggagcattttaacttaataacacattatgaaatattttttcccttactccttggagataacaaac

SEQ ID NO: 23837 - DNA, 149 bp, Glycine max
  Clone ID: PAT_MRT3847_121526C.1
cgtcctttttttttttaaacacaccatcaaactacatgtttattattaaaaggggaacaatactcttgaaaaacatcatgagtacgccatcctattcttaacaaggttcagtcacagtacattacatatctgatgttcagactcgagcc

SEQ ID NO: 23838 - DNA, 445 bp, Glycine max
  Clone ID: PAT_MRT3847_121527C.1
cccacgcgtccgtacggctgcgagaagacgacagaagggatattgcgaaaaaagataaaaaaaaaacaatttaaccaacgtttagttctgcaagaactgcgtaggtctgatttcctcattgcgattgaggatacgtaggaacaaaagccccacttttgttgaccacccaaagagatcattaatggtccaacgccttaacgtttctctcctttcaaaaccaagagatcgtcaatggtccaacgccttaacgtttctctcctttcaaaatcaaaagatcgtttaatggttcaaagccttaaacgacttttgttcggttaaaatatatcttgcgaaaaaagataaaaacaacttaaccaacatttaattctaaaagaactatgtaggtctgatttcctcatcgcaattgaggatacgtaggagtgagggaaacacccttgtcgccccc

SEQ ID NO: 23839 - DNA, 396 bp, Glycine max
  Clone ID: PAT_MRT3847_121528C.1
gggaacactaaaaaacactttaatttaccctaaacccccaggcctttaggcaggggacggttaagttttacaaaaagttcccctgtacaaaaaaaaagtaacaaacttgtttttacccatggatttatcttttacgggacccatgagttaccctatcccgggttgaaaatggaaggcccctcctaaaacatttccagaattagctccttattggcaggcgggaaaaaataattaatttcattttaaaaaacagggatcttaccaaatggaaataaaaaccccaaacttcctttttttaacttatgcaatggaaaaagccaaccctcatttattttttaaaaaacatttttggggctgaaattttccaaaagggtttcctaaaaaatgtttttgaaa

SEQ ID NO: 23840 - DNA, 472 bp, Glycine max
  Clone ID: PAT_MRT3847_121529C.1
agagtagatggtttaaggcaatttaccccaaatttgggggagttaactgggatgtaaagtggaaggcaaaacacatcatcacacacgaaaaaaaaaaagcaatcaaggaaagtatgtgttgttgtaataaggtcaaatacaagttaaagtgaaaggctagtgagtaagctaattgcattgaaaagactacttggataagtctgggatttgtgctctcttagaatctaagcctttgaatcctagaaaaaccaattatttttgtagccaagcctcactacaagcctgtgaaagtccttctgattatgtttatgcatttccgactttatggcttgagatgaagttcaaagattggacctcttgctagttgttgttgatgaatagcttaaacacttgtgcttaagtgaaaccgtatccgtgagaccatggtttaagctactttccttgatatctatcttatgcctaacttcaatta

SEQ ID NO: 23841 - DNA, 347 bp, Glycine max
  Clone ID: PAT_MRT3847_12152C.1
ggctcattgagctaatattagggtttgtagtgtatcaagaacaagcatcactggcgccgaagatcacacgtaaggttagcagataccctgaagtgataatgggaatccgatagtactcgaggtcacacatgtatcacaagacgggtatttgggctatccaggccaattcaggtggcgttttaactcgccactatcctataaccaagcctgaaactctcgctaaaatagcgcccaaattttaccctgtccgatgatatcacgaagccccttgtcatcaagcacacaccgataatagctaagctcagggctagcagtactcacgggatagtgttgactcttcctgccgg

SEQ ID NO: 23842 - DNA, 214 bp, Glycine max
  Clone ID: PAT_MRT3847_121530C.1
gcggtctagttgcaactgggtgtggccggtgaaagccaactagggggtggagtcgagtggaggcaggacaccaaacaacacccaagtgaacctacaggcacaacaacaggggagactgctaggggacggggggaacaatgactatcttaccaccctttgcaaggctgagtacccccccaatgggagggacggtggtaaccaccaacccaccggg

SEQ ID NO: 23843 - DNA, 330 bp, Glycine max
  Clone ID: PAT_MRT3847_121531C.1
aggcaagacgctgagtgctcctgcaggtgctgagcgcgtttcagacagctagattaagccgcagcactccgaccatgaatcaaaccaaatctgctgcttaacaccttgcgatatagctctgttgcctgctcactatatccaaaagggccttctctacaagaagccctcatgaccacttgttagccacaataatggatagagaacctgtcgcagaacctcaagcactctctttctctcaccctcttccatgtctatcctttggatggtcgcctcgccacccaccgaacccatgaccccgccttctatgctgatgcctgatgatagcaacat

SEQ ID NO: 23844 - DNA, 281 bp, Glycine max
  Clone ID: PAT_MRT3847_121532C.1
gccccatcaatgccctggatgagctctgccgcctcatgaagtcctttgtccacccaaagcctggtgctgctgggagtgtgggcgccggcctcatccccatctcctcggagctctgctaccgcctgggggcctgccagatggtcatgtgtggcacaggcatgcagaggagcaccctgagcgtgtccctggagcaggcggccatcttggcacggagccacgggttgctgcccaagtgcatcatgcaggccacggacatcatgcggaacagggcccaagggtgg

SEQ ID NO: 23845 - DNA, 296 bp, Glycine max
  Clone ID: PAT_MRT3847_121533C.1
cggacgcgtgggtgagaggtgtaggattagtgggagctggaaacagcgaaagtgaagtaccactacttttaacgttattttacttattccgtgaatcggaagcggggcactgcccctctttttggacccaactcgtctgagaagtgaggccgaggcttgaggaatatgttgctactctatttgatttatctttgttgttttttatttatttttaatttgtatgttttgattgtgttctgtgaacggtttttgttagctttatatcaaacttgaaattttgcatacaatatctaact

SEQ ID NO: 23846 - DNA, 326 bp, Glycine max
  Clone ID: PAT_MRT3847_121534C.1
ggaataaaggggaccgtcaaaggatggatgaaacgtaacctcgtcactttaggatgcagttgagcgtctgctactagctaccacggacagtcgcactgcatctgataattctcacatccacgatcacatgttgctgagtttgatacagagcatattgcatatcaccgtatgaatgccaatctccctttattactgtggaaactatgggtgatgacatcacactaacatcctctaaatagatccctataaatagactgagagttcaatacatctgtacgttgatcaacacagtaaccgcgttcttgaacatgttcacacatttacca

SEQ ID NO: 23847 - DNA, 2251 bp, Glycine max
  Clone ID: PAT_MRT3847_121535C.1
ggaatgaatgagttgtgtaagaaagagatccatccaatgttgcaagtcaactgagtagtcctgctatgctctgctctgctctcccaaacatctctgacacaacacacaccaaaatgcataattgaaatgacccttttgcccttccttccttccctacttctcctttgactctccgcaacgccaccgcccacaatggacggcaccaccaactccggcgaaccccgctccagttcggtgctccaaaatactggggcatccgaggatccgaatcgaagcgggtcgggtcagaattcgatggcgaggtacaagctgatgtcaccggcgaagcttccgatctcgaggtcgccgtgcatcacgattcctccggggctcagtccgacgtcgtttctggaatccccggttcttctttccaacatgaaggtggaggcttcaccaactacagggtccctccgcaagctccaacaaacagtgcatggttctatggcttctgctgcctctgctacatttccagtaaccactgcctgcttcgataccaatactgttgatgccagaaaatcaagtttctttgagttcaaaccactcagcagatcgaataaggttcctgcagaaactcatactagcatatccaacttcaagtttgttcataaaagctcagcaccagtataatttggtgcttcaaataacagctttgaaagtgagatatcagttccttctagggatgaaggtccatctttaaacctatcatcatatccatgcagtcagagcatgggaagaatactaatgggtcatgaaagttgattacaccacaacacagaaatagagaattaagcgtcacattttgctttcttttttcttatttttggcgggtatagcttcaaaggtgtaacatctcattttctgtaagaaaatgcagatagttcttttatgtttatatcactattccatagttgctgtttagtaaagttggtagcagctccagtgaggtgaaaaaactttttgaacgctctcatgatggtcaaatcactgagatagtttacaagggaacacatgatcatcctaaacctcaatcaagctgccgatactctactggtactgttatgtatattcaaggagagagatctgataaggcttctttggctggccgagatgacaaagcatccactatgtatggtcaggtgtctcatgctgctgagcccaacagtactccagagtcatcacctgtagccacaaatgatgatggtttagagggtgctgggtttgtgtcaaacaggaataatgaagaggttgatgatgacgatcccttctcaaagcgaagaaaaatggaacttggaaatgttgacatcactccagtagttaagcctatccgggaaccacgtgttgttgtacaaactttgagtgaggttgacatattggatgatgggtaccgctggcgtaagtatggccaaaaggtggtgagaggcaatcctaacccaaggagctattacaaatgcacaaatgctggttgaccctgtccgaaaacatgtggagagagcatctcatgatccgaaagcagtgataaccacatacgagggtaaacacaatcatgatgtacctgctgcaaggaatagcagccatgacatggcagtaccagcagctacagcaggtggacagacaagaattaagttagaagaaagtgataccattagccttgaccttggaatgggaattagctcagctgctgaacatagatcaaatgggcaagggaaaatgctgcattcagagttgggggagacacaaactcacgccagcaattccaacttcaagtttgttcatactacctcagctccagtatactttggtgttctaaataacagctcaaatccctatggttctagagacaataggagtgatggtccatctttaaaccattcctcatatccatgcccacagagcatgggaagaatactattgggtccatgaagttgattacacaacagatattaaaataaaaactgagtaacaatttgcttttttcttcttatttttggcgggtatagcttcaaaggcgtaacatctcattttctgtaagaaaatgcagatagttcttttatgcttatagcactattcgagagctgctgtttagtagaattggtagcagctccatcttgacttttaaatctaattgccgtttgtaattgtataattatatccaaattcttctgtataaatatgaagccgatatcaaagttacctccacaaaaccttagtcctc

SEQ ID NO: 23848 - DNA, 418 bp, Glycine max
  Clone ID: PAT_MRT3847_121536C.1
ctcgagccgattactatgaccttcataagggaggatgatgatgatcaagttgatgatgatcatgatcatgatcatgtggatggggggggatcacaaaacaatgcccccaacattacttaaattgtgaccacccccaaaagggaaaactttagaaaattggtgagtcttaggcctaaaagaaaaattaacattcccgccaaaaaaacaaaatttttattaaaggcctttccccagaaccaaaaccaaggatttttcttccaccttttgcttgaaaaagttttacagttaccaacccttaggggggtccccaaatgcccccacaagggagagaaaagctgtttaaagctaccaccaatttcatttttccaaaattgggtttttttacactacttttctgggaactaggtcactgggaatt

SEQ ID NO: 23849 - DNA, 660 bp, Glycine max
  Clone ID: PAT_MRT3847_121537C.1
attgacaaccaaaaatatatttgtcattttaaaaaataaaaacaaaaaatcatgtacggactactaagagtctgtgagagcttgagtgctgaaatgcgtaagcttcacacagtagcttcatttgataaataatttgcttttaaataactaacaatatgtttaagaatgtagctgaactattggtgtgtcccctttacaatcatgatgaattcatgctaacaagaaataagaaccaaattattgtatttttttatataaaaatcattataaaaccaattagtaatgttgtattgatgacacttttcaagtttttctaatatcaaagttgaattcatgctggtgaatatttgtagaagaataactattggatgcattaggtctctcaaaaggagcatggacaatgtggggaagctcaattgtagatgttgttgcatcttccatcatgattattgcttgttcatcaatttgggttgattctttgatcatgtggttggactgccttgtattattgggggagccacctttagtccctatcaaggaagatggttctgccttttcagccttgcttttgctacccatctgagtcacaattgtgtacaaaggcaaggtgctataactgcaaagcacttgaacaattacacccattataagtcttgggat

SEQ ID NO: 23850 - DNA, 327 bp, Glycine max
  Clone ID: PAT_MRT3847_121538C.1
ggctcgagacgcaccgttgggtgagtctgtgagagacttggagctggttgttcattactctgttatgctgggtccttccttcataaaaggatggggtccatccctcactgggaccctccgatcgaggctcatatgttctgtatgacgcactgacctccatctccggcgactatggcgccgtcagacagatctatgattatgcgctgatctacactgtcatatacacagtctaccatgcagatcagcctgtagcagcttctctttctacattagacggcatctgttatgccgctgagaccattcttctagtctctggtcgtgatctca

SEQ ID NO: 23851 - DNA, 371 bp, Glycine max
  Clone ID: PAT_MRT3847_121539C.1
cccagcacctaagggttctgttcccgccccaaaaaaaaaagggaggggtggggttctctctcatgtttatccccaaaccaacccgatgtaacggttttgcaattcccccttcacggagcaaatcccgtacttacagtcctaacactcgcaacaccttcacaaccccaacccttcaaacgcaacatcccacataattttaaaactgggatcaacgatccatgggcatttcacccccccccctattttaagggccatctatagaggggggtttgcattgcccccattgtataatatggttttggtgcccttaaaattggagaaccagctggtccaaattcttcttgggcggccccccattcagcatcttttgt

SEQ ID NO: 23852 - DNA, 499 bp, Glycine max
  unsure (1)..(499): unsure at all n locations
  Clone ID: PAT_MRT3847_12153C.1
nnnggttngntnnnnnnnnnttttttttttttttttttttttttttttttttcccaaaaaaaaaaaatctcagcccaaaggctttttttttatggttttaaaaagcccacctggccatgaaaaacccaaattcctacctaaggacccccttattaaacttttcccccagccgccctttggccatagccatcattaacattttttacaggacccctaaggcaggccttaccggcacaggcacataaaggcattactccattaaggcatccccacggcctctattggaaaaggaatcttctactctggggcggcaaaaacaggggacccttcccccggatatttcttcccctcaaataaccaaattttttcttaggatttaggtttctaggtccataaggggggggggccccccggacaaaataaacaacctacccttgaccgcaaaaataaagggggaagggcaattggtaggtacctaagaaaataaggcccctttttt

SEQ ID NO: 23853 - DNA, 178 bp, Glycine max
  Clone ID: PAT_MRT3847_121540C.1
attggcccattcttggacctattaccaatccttaaattaatcaatcctttcacctcattccattaattccttccaatggccaccaaaggttctattattacctttggaggaagaaaaatccgggaaaggagggtccttttaaccaaaacctcaactattaccagcgaatggccaaaaa

SEQ ID NO: 23854 - DNA, 460 bp, Glycine max
  Clone ID: PAT_MRT3847_121541C.1
cgcgcgttttttcggtgttccttttgacctgccttaccgcgtgaaaagccatgagtcaagccgcgtttcactacccggctaatctgttggcatatagggcatgtttgcgggctatgatgactggcttgatcactaggttcataaccctgatcaaggacttatgagagagctttttcgagaagcatctacccaagctaccgccagggctgcggccacggcctatagcgtggaccctagctgaaaagcttgcagacatgcttgcccacaagcgggaacacaagtggatgcacgatatgaagaccgaaatggacagcgtacgtgcaggaatcccctatggaagccccgagacatgccctacgacatccaggaccattttgagggagcactcgggaacactggcttcaagggctcgaacagggtcccctagctctgatcactgatggaattcgaaccacaattt

SEQ ID NO: 23855 - DNA, 174 bp, Glycine max
  Clone ID: PAT_MRT3847_121542C.1
atgtcgtgtccgggggctccactatggtatgcacacttggcattcgagttgtaccacttggggtatggtggttggaagaccttcccgggagttgtattattggctggccggggtgtggctggagctgtgtgttgggcaggcgttttttctattgcgggaggtccttccacttga

SEQ ID NO: 23856 - DNA, 488 bp, Glycine max
  Clone ID: PAT_MRT3847_121543C.1
ggctgttcctagtttcactctgcaacctacaacatcacggccgtaggttcattcactgactaactccttttaagagagaacgatcgaaaatggcagctggaatatacctcacagaggccctacaaaatattgatgcactcgctgggcctctgcttattgttgcctatcctctatatgccttacttagggcacccgatagcaagcctcctgttgatgaccatcagtggctcacttattgggtatctctactccgagatcaccctatgcgaacttacttcggccagatctataggatggattcccatctggccatatgcgaagctgatccttaccagcatggttggacattccttacttcaacggcgcggcctacgactatgagcactatgtgagacccctgtttgtccatcctcaaaacgcctacatgtggattgcccctagcacagatgacttctcagccaagacggacgacgctatcactgtcgccg

SEQ ID NO: 23857 - DNA, 482 bp, Glycine max
  Clone ID: PAT_MRT3847_121544C.1
caaaagcttccctccttgccattgcagcctcggtcgcgccgctcattgccactacaaccaccgacgcgtcattccttcacctttctatcttcttcaacatctttctatcttcttctcaagagaaacttttctctccaaaacaaaaagcgtgtccaaaagcttccctccttgccattgcaccctcggtcgcgctgctcattgccactacagccaccgacgcatcattccttcccacttgcggcttgcaccgttctttcccaccacggcttgcaccgacactggtcatcgtgcgtctggcgccaacacctccaggcatggttgcatctccatcgcgccaccttcgttgggcttagaagtctccatcacccctctggccatctggttttccccttttctctatttttcctctttactgtattgtttgaatctggatttgaatgacatttttttttcaaattttatgatttttggaatttattgtg

SEQ ID NO: 23858 - DNA, 174 bp, Glycine max
  unsure (1)..(174): unsure at all n locations
  Clone ID: PAT_MRT3847_121545C.1
acacacagacatgaaattatttatacacaatctattctatgggctcaagatcatggactataancaacaatgttggtctgatggcagtgtccacagataaattgggtcccataaaatggccttgcttccaaggaaatggcaaacagggttagttccaggatcaactcccataag

SEQ ID NO: 23859 - DNA, 145 bp, Glycine max
  Clone ID: PAT_MRT3847_121546C.1
cccacgcgtccgccaacccttccggaggggttcttaatttttttaatcggatggaccaaatggtccacttggaggaagaaatttcacagggttagggttgccgagcccattgattttgaggggccagttggccagtacttgttcg

SEQ ID NO: 23860 - DNA, 178 bp, Glycine max
  Clone ID: PAT_MRT3847_121547C.1
cagcccaaccctcaacggggcccgcgctttttaaaatgggcgggcacaacaaaaaatcaccacataatattgctgggaaaggcgtaaccaattatcacttataaccgaaccacttccaaagtagacgagactgaagaacgaggcaaagacgaacgaaatattccagtaaatggctacc

SEQ ID NO: 23861 - DNA, 443 bp, Glycine max
  Clone ID: PAT_MRT3847_121548C.1
aaaagctcgagttaaaagattgccatcctacgaatgggtcatcatcccttttaggaactgactgtctggatccatttgctaattgtgtccatttgaagaatttgcacctaagtgaaatgtcctttaagtcagatttgaaccctaaggattttgtgatatctgctcctaaacttagtaacttgaatctgatgtgcaaccgctttaaatgcaagattgtagttgctgcaccacagctttccaatttcatttacttgtattctacaccttgtgccttttttgagtttcggcttccttctatggatggcttggtcattgatatacatgaaccacatgatcgattggaaaaatgtcgtcgaaggaaaaaagaggagactttacatggtttgatcaatatgttacagggacatcataatgcagaagctgttaaactatccttctgtaca

SEQ ID NO: 23862 - DNA, 465 bp, Glycine max
  Clone ID: PAT_MRT3847_121549C.1
ggagttagtagtaatttaagagagagaaagagagagtgagagagggagacccatccacttcttccatttccacaccttcacacaacacaacataacacaaaagcgctctctctaatatctagagacaggatttccaacacactcacctctcagagcgcgtgcccttcaaacatgatcatcatcgtcttcttcctaggacctgtttcagattcttcgtagaggagtactagggctgatcactggatctttcaaatttggaatgatttgatggggaatatgacttgcagcttcaacaagactgattcaattgagtgctgtgaagctgaaatgcagaaggctgattctcaggaatctggtcctgcgttgaagaagtcaaaaaccaaaattttggcctctcaaaatgtagatcattgcgaaatggaagaaagtcaggatagacttagtgacatgccggaatgtattatc

SEQ ID NO: 23863 - DNA, 384 bp, Glycine max
  Clone ID: PAT_MRT3847_12154C.1
cgaatcgacccacgcatccacgcctgaagcaaccattgcaatcgcaacccaagcctttatcttaaccccacccctctccgggctaaggccagctaccgcacctgccatccatgcaagcaaaactccatcctaatccttatccagccctaatcccctcaatttctacataacaatcacagcatcaaccgtcgacgagaccacacacgcaccatcaaaattagagactgtacctgtcgagttcaccccaccagaacttgacccaaacactcgttacccgatcttctcagacatgcaccagcgggctcctgcacaaggcacatgttgacgaataccatgtcattacatgggactcaccctaagaacagatcttagaaatgcccactg

SEQ ID NO: 23864 - DNA, 2028 bp, Glycine max
  Clone ID: PAT_MRT3847_121550C.1
cttagccggggttaaaccccaaaaggccaagggaaaacataagtgtgactttggtcgtagcaaatgcgtggtaccaaaaagatgcaattaaactattgaattggaagctgagttagtagtaatttgagagagagagagagactcatccacttcttccatttccacgccttcttcattcacacaacacaacataacacaaaaagctctccctagtatctagagacagaatttccaacacactcgcttctcagagcgcgtgcccttcaaacatgatcatcatccacttcttcctaggacctgtctcagattcttcatagaggagtactactgctgatcactggatctttcaaatttggaatggtttgatgggaaacatgagttgcagcttcaaccagactgattcagttgagtgctgtgaagctgaaattcagaaggctgattctcaggaatctggtcctgcgttgaagaagtcaaaaactaaaattttggcctctcaaaatgtagataactgtgaaatggaggaaagtgaggatagacttagtgacatgccggattgtattatccatcatatcttgtcatttatggaaacaaaggatgcaattcaaacttgtgttttatcgaagcggtggaggtacctttgggcttcagttccctgcctgaatttcagcagcaaatcattcatgcgattggttaactttaagaagtttgtgctgtgggtcctaaaccatcgcgattcttctcatgtcaaacttcttgtttactaccgttttggggtagattattcgacagatcaaggtctattgaataaggttattgaatatgcagcatcacatggggttgaagaaatcaaaatcaatctccgggcaaaaaccgctggcagaacctctggcagtccaccagttgaaattcctttttctttatttacttgccaatctttgaaaaagctcgagttaaaagattgccatcctacgaatgggtcatcatcccttttaggttgcaaatcattggacattttgcatctggaacagttttcaatgcatcctgttgcagctgacttttcaaatccatttgcaagtttggcagaactatttggttttacaactttgacaactctgcatctaaataacttcattctgtgttatacaggaactgactgtctggatccatttgctaattgtgtccatttgaagaatttgcacctaagtgaaatgtcctttaagtcagatttgaaccctaaggattttgtgatatctgctcctaaacttagtaacttgaatctgatgtgcaaccgctttaaatgcaagattgtagttgctgcaccacagctttccaatttcatttacttgtattctacaccttgtgccttttttgagtttcggcttccttctatggatggcttggtcattgatatacatgaaccacatgatcgattggaaaaatgtcgtcgaaggaaaaaagaggagactttacatggtttgatcaatatgttacagggacatcataatgcagaagctgttaaactatccttctgtacagttaaggttacttgtggagcgtcagcccttgtgaagccagcatgtttgccttctactaaattgaagtcattgaactttggagttggatcaacatataaaatcttcatcaacaaccttgaccatataacagcctacttccgcaattgttctcagcatgcagactttgagattgtgactgtttagaatgtattcaaaggatactttgcagaggaggtttggctcatgctgaggttaaagttaaccccaatacttggatccttatgatctgaaacaagaattagtgcttggtataatttgattgggaagaaactgggatatattcatatatgtggttgatttttgaaaaacaggctataatgaaatagaaattcaaatactttttgcatttgcatcttgagttcgagttcttgactctctttttaggattaaatatacttttggtccctgttaaacaaaaaaaaagaggaggggggagggcaaaaagcggccggct

SEQ ID NO: 23865 - DNA, 180 bp, Glycine max
  Clone ID: PAT_MRT3847_121551C.1
agtattatggatgatctgttttattttcaactgttggactacaaacaaatgcttgctgcaaaccaaagggggtggtcatattacataaaacaccccaaccgatccccaaggaaaaaaatcactccacaaaagataggaaccgcctaaatcataaaaagaaaaaactctatatcattgaac

SEQ ID NO: 23866 - DNA, 271 bp, Glycine max
  Clone ID: PAT_MRT3847_121552C.1
tatggatgggaaatgcctcactggcgcggtttgcatgcggaaaacccgacatctcagcgttttaatcaatcctgaagagtgcgttgaaacaccaaatgaatatatccctcgcgaacaatatttatcttactcacaagagacttaacacacatgattactcttatgccacagaccttgaaatacattccaaggacacatttctgttgagtatacatggcaccgaactatctaatatttcatactaccaaaaacatggatatggggtggagaa

SEQ ID NO: 23867 - DNA, 246 bp, Glycine max
  Clone ID: PAT_MRT3847_121553C.1
cgcgtcacagtatactaggaatcggccccacgtgttctctcatctttcttctggataaaaaggtaccaaacgagggcgctttctcatgctaaatcgggcatgtcccagaaataccagctccataacccatcttctttttggggtctacggaaaaagggataattttggggctcattaaggaacatttttcatgtgcaggttttgtaaaaagaggatttctagatgcaaaaacctccaggggaaaca

SEQ ID NO: 23868 - DNA, 431 bp, Glycine max
  Clone ID: PAT_MRT3847_121554C.1
cactagtgtggtgcaacgtgccgatcatggaaatggagcagcaatgccagacgaggaagtgctgcatactccatagacactcctgggtgcaaggaagccacggattgcattgcctgaaaagggtggatggtggtgatacaccgaagagaactatagggacaggagggctttgattgtgcgaaggaacccagcatcacaggaagatacccgttcagagccataatgacaaacccatttgtgactaagcatgcatagtgctctacattgataaggtctggaatgacaagtctccactaatgccctttgatcctaacaagacaacataagccagattttgagtggactacattgtcaggaagatataacatacttgaaaaaaaatgtggttttttaaaggagaagagcatgaacaacggaagaaggagttgatc

SEQ ID NO: 23869 - DNA, 807 bp, Glycine max
  unsure (1)..(807): unsure at all n locations
  Clone ID: PAT_MRT3847_121555C.1
gaaaagtcatcatagttgtagaagatgggaagaatttcaaggaccaagagttatgcaattgcctcttcaatagtacaagaaaaccaacaacaaacaccaccttccattacctgcacaacttttaacattcttgcacccatatacaagcgtctcaaccatgaggatcagagttgccgcgaaagcgattacaaagcgtgttggttgaccaggaatcaaaggatattggattggttgttgtatgagagatcttccataatctgtcttcaggaattttggattggaaacgacgagtttgttaatttgtatgacaagagacttggtgatgctggttatattaatttgaagcttggacgaaccaacaatcgtggtgatggtcttttgatagcagtgcaaaaggaatatttcacagttgttaaccataaggagttgcactttaatgattgtggtgatcgagtagctcaattgctacatcttgagttagcttttcccttttctcaatgccaaaacagtgatgttaggcacgaaattctcattgtcaacactcacctactgtttcctcatgattcgagtctttgccttgtacgactgcatcaagtctacaagatacttcaatatgtcgaatcttatcagaaagagtaccaacttaagcctttaccaatcatgttatgcggtgactggaatggaagcaaaaggggacatgtntaccagttcctgaggtctcaggggtttgtatcatcatatgatgcagcacatcattacactgatgctgatgctcacaagtgggttagccaccgcaatcatctggga

SEQ ID NO: 23870 - DNA, 415 bp, Glycine max
  Clone ID: PAT_MRT3847_121556C.1
cggtcctaattccagctcgaccgcacgcgtccgcccacgcgtccgcccacgcgttcgatctctgtcaattctctctcatactctatatatactttcgcgactatttttaccaacatctatgtggataccatctactctaatcctccaattctcatgaactacaactatcttatctaccacatgacgactattagatctctaacttttactcatacatttactctataatacacatatctcttccacttcgaattatttccacttccacattacacatactacctcatatcatcacatctcatcatatccttaatcttttaaacaccaagttgaatacaatgcatatcactaattcataatcttttatgcccatataccataatcaaccttatgtgcaatacttataagttccaca

SEQ ID NO: 23871 - DNA, 283 bp, Glycine max
  unsure (1)..(283): unsure at all n locations
  Clone ID: PAT_MRT3847_121557C.1
cgtacgtagcttggatcctctnagagcgccgctttttttttttttttttttttttttttggcattaaaacaaaaaagaaagcaaaattaatgggggctttttacagacaaaagtataccacacgaaaaccaaacacctgaaacacttacaatggaaaatcaccaactagaaaatacttaaacacagtaaatttatagctaggccacattctaagaagccccctttgtctaatcaacatctgtttcaaaatccagtccacaaacaagccgtgccacaacaatat

SEQ ID NO: 23872 - DNA, 646 bp, Glycine max
  Clone ID: PAT_MRT3847_121558C.1
gggtggaggaaaaaagtagtactaatgtaaaaacggaacccaagttttgtcccgttccattgtatacaagaagataacaaaaaaaattatctgtttatggttctcaaagaattttagaatcagattactttgattgtagtatatacatacagttgatttaaataaaagattattcattattcaatacgatttacccccaaatcaatctggctagtaataataatgtttacaagacaacctaacctccagcaataagcacactccaagcttttcagtcagatctaccaacttcatgctaaatttgttgtgcagttcgaatatcaccctgaaaaggttactgaagtaataatcactacaacaaaattgaacgccgtttcactacgcaaaagagataggatatgtgaaacacaattctggaattattctttgatgccgaaacttctggcaagattgcgatactatgcctcggctgtgtgcgctgaaaatttattaccgtttgtttctttttggcaaaaactggtggaatttcagcctcacaaaaaccatcaacaatgacatccagctaggagatgcagaatccttgacctaatgtcatggagacctacgatatttcatatttcttttgaagttgatactcatgaaaacc

SEQ ID NO: 23873 - DNA, 464 bp, Glycine max
  Clone ID: PAT_MRT3847_121559C.1
cgtaactgtagccacaataatctttttcacagcctattctaagaggcagctaaaggagttacaacagaaagagaatgatctggtctttcaataatccagtaggtgtagtctgggtttatttgctggcagcatgaggcagttactactatcttatactggcacatcaaattgatgcacactgcacagtcgagtgaggttttatttattaagtaacctcatatatgggaggattgaacgtcacatgttggcttaccacagaacaagctaacgcggctaacatcagcattcctatctttttttccatatgttgcttacagcaactgttttctttgatggtgcttccatctcatttcactactagcatgtttggtggtacattttggatgtgattttaagaagctaatagttatagcttctacatcctaaatgtaatttttttcattctgaacaaatttccaaatacg

SEQ ID NO: 23874 - DNA, 265 bp, Glycine max
  Clone ID: PAT_MRT3847_12155C.1
gggttctagcagattatcattcattttagtacttgtggtcgtaacctattcatccatgaccatagactcaagggaaggagagggacgtactctgacaaaatcagaataaatgccttcaaaagatgaaatacctactgttgttcatcttacactggtgggaacactgacaaatttttttgctactctcgctctagtggttgaactacctgcacgacctaaagtacgaactcctgaagtaacagttaaaaacgccaacaaaattcct

SEQ ID NO: 23875 - DNA, 260 bp, Glycine max
  Clone ID: PAT_MRT3847_121560C.1
aagtgcttgacatcaaaatgttctagagtgattatctactagattctgaatcatacatcacatctgactagagaccagtttctttcgaatgattcttttatgtatgtagatctgttcttctgaggcagcggttggccaactatagcccaaaggccaaatttggacttctttttataatttcagattgtctatggctgctttcccactactccagcctaaggtaaacagctgcaatagaagccaaatgagaatcgcaaagc

SEQ ID NO: 23876 - DNA, 532 bp, Glycine max
  Clone ID: PAT_MRT3847_121561C.1
cgtgaatgtaaataaacagtggctttcttgttctctgtctagactccaatgtcggatctgtgctccattgccttcttagttttaccatcctcgttatgggctgaaaagggaaggggggagagagagagtttgcggcaccggatagaaccgcccgaactgagtcgtgccatgattgattacctggctggggcattttctggtggaatatgacggactgttacatcgccccgagatggtattacaattcatattccagttgcatcgtcagcccacatcttcatggtccttactactcacaggatctgcttcaagatcggctggaacatcgacatacactggaatgcttcaggcatcgcacggtattcctagagaacaaagcagtcatgggttctctcggagaaatggaccagcattgctgatgggtatgcgatattcagctgtacaatttacagtaacacacacggagcagactgtcgcctctggctcttcctagacagagaatcagcattgattacgcccttatctatcctac

SEQ ID NO: 23877 - DNA, 163 bp, Glycine max
  Clone ID: PAT_MRT3847_121562C.1
tggtattgctgcgagtagatgactgatgggagaactcgttcttcttcttttgttgttctgtgtttgtgttggtcttttcgctcatctcttaatttcttgctgttctagttcctgtggctgctgtagctcctgctagtgcggctatccgttgctgttgttgcaa

SEQ ID NO: 23878 - DNA, 370 bp, Glycine max
  Clone ID: PAT_MRT3847_121563C.1
gtccatctcctagtcttcggccgcgcctttcttttctttttttggctattcagaaagcattgaagatgattaagctgaggataatgaggtttacccgagccacctccaacctaggaggaggtgggcacaaacctactacacccactgaaaaggattgcataatcattgcgtgaaatccactgggaacttatgcctggtggcttgctcgttcagaaatgggagagcaacgctcgcgcaggggagggaacgatcacggttctagtgtcatctgtttcacaatcggatgaaatttctatcgaggccacatcaccttttggatgattgctaatgattctgacactggcaacaggttttgaaccccgacaagcaa

SEQ ID NO: 23879 - DNA, 261 bp, Glycine max
  Clone ID: PAT_MRT3847_121564C.1
ggctcgagcacttttgtccatggggcatacagattatctaggacggatctaaaagtgggccatgcggacatccgactaagccttttgcagcaatgcattgcctatcattgggcctatatggcaaactataaccttcgtggcgctattgtcttgttgcctgccaatgccttgatctggtgccagtgcttgagcatgaccaagagcctgagattgcggccacaacttctggctccgctgataaggagaggtggctggaggtct

SEQ ID NO: 23880 - DNA, 197 bp, Glycine max
  unsure (1)..(197): unsure at all n locations
  Clone ID: PAT_MRT3847_121565C.1
cacaaataaaaaccaacttctttttttttcatnctctttatcaggggttggtcttcttcttcagacaatgatttgcttttgganngttactcttacccacttttccattccggaattgggcactggtagcttagtctttttatatatttgtctggcttttgtaattcatgaataaaattatttgatatttgagagct

SEQ ID NO: 23881 - DNA, 286 bp, Glycine max
  Clone ID: PAT_MRT3847_121566C.1
gtggctgactgccaagtcctcccggcgacctccgtgggtgctgaaggaggggacgagcttaggagatacatggcattcgccgcacagctgcggacaccagcaacggcaaccataatattcaagggcacaaggctcgggattaaaccagcgcccaaggtggcatctttttcggccagagggccaaacccggagtcccctgagattctgaagccggatgtgatagctcccggattgaacattctggcggcttggctagtacgctttccccttccgggcttccctctga

SEQ ID NO: 23882 - DNA, 649 bp, Glycine max
  unsure (1)..(649): unsure at all n locations
  Clone ID: PAT_MRT3847_121567C.1
acgcatggcaccgcgctacgctaagcctcatggactcctnctagaagacggcacgcacctcttttcttctcttatttctttcttttctctcttctcttttcttttttcttttcttttctttttctttttctttttcttttttttctttttttcttttttttcttgggggaaaccggattcaaaaaaatggggaaaacccaaaaacccgggggaaaaaaaaaaaaaaaaccctaacttttttccctgggacccccccaaccaaatttttaaaaaaaaaaaaccctttaaaaaaaaggggggaaaaggagtaaatttaaacacacacccccacacccttttggggggggggaaaccaaaaaaggggtttgggcccaaaaaagccccaaaggggaaaaggccaaaaaaaaccacaaaaaaaaacttaaaaaccccaatttcaaaaaccccccctgaggggaaaagaaaaaaaaaaaaaaaaaaaaaattttgggggcaattaaggggccaaaaaagggcccaaaaaaccaaacacccaaaaaaaggaagattttaaactttgaaaggggaaattcttgggaaaaaaggggataaacccctttttttttttaaccctcccaaaggcccataaagggataaaaggcaagagggg

SEQ ID NO: 23883 - DNA, 379 bp, Glycine max
  Clone ID: PAT_MRT3847_121568C.1
tgaggcacagtggatcaagtagctcatgccgctctagctcggttcgtcagcactagagagagagggaggccgccttgtacgcagaaactctttgtttgaagatacacgacatagccttgcgtaacatatcactccccctccgtgagtcggtgctgcttgaatcggggggcatgcaaaaatggcttcgagagttacaactcaaaacgcgctcctggttgaagaaactgcgccgggatcactggggtgtgaatcaaacagagggatgactgcctactgagtgttgtagtaataagctggagctacgtagtgcaatgatatggggacggatggatgctcggatgggcattgaacagcgtggggctctacatggattctgtgc

SEQ ID NO: 23884 - DNA, 665 bp, Glycine max
  Clone ID: PAT_MRT3847_121569C.1
gcccgcccttttttttttttttttttcttttccattttgctatttgaccttgcattcatcaaatctactatgttaatgttatgacatgctatgcgccaacgttttatttttctatattttattattaaagaaatcctatgagagtgggtcttgctttattttacccaatgcccatccttttgtttgggaacgacacttacaaatgaatacttctttttctgcacaagcatcaaatatccgttacatgtaataaaataagaatttaacttgtctaaagttaaattacttcccaatagtttctccatttttacttttttaatttccataatttatattttaattgttttttaatttttataattttaaaagtagtttttttagtctatgtattttatttttttttaattcctatagtttgaaattgatatttttagtttctatcctttatattttaattttatttaagtcttttggcatcaaaatatgagtaatattatcaattataattaactatgaaaatattaacaaataattcataactaatttatcataaaataatttgtaataaaaaagtaattgataatttataactaatttgtagctaatattttttatagtaagaattaaaaggtaattaaaatcggacggcgtgggtcgaccccggg

SEQ ID NO: 23885 - DNA, 184 bp, Glycine max
  Clone ID: PAT_MRT3847_12156C.1
cacaaccaccctcgtcttcacaatccgccgattccaatctccaacgaggctccccaaaataaaaaatcgtaagcttacccttcgttaaaaaatcccccaatcccccagtaattcccaatcaagccccaattaatccctcttccaaaatttcacccccatttaagaaaaaaaaaaaaccaaacca

SEQ ID NO: 23886 - DNA, 395 bp, Glycine max
  Clone ID: PAT_MRT3847_121570C.1
gacttggaatggataaaatattattggaattattatacctattcttaaagagcaattggctactcatactgtcatattctagaaaccaaacctcgggttttttctatgattaaaaaaaaaactataacctttttacatgggtaactaagctattggtaattccacccatttggtggtgaagaggaagcttcaacttttattaacctgccctttgactaaactggtgagctatttgataaaagagatctaccaaagggctgcattatgtttgaaactagagatattgcctttggccgggcgctacattaaactctatatttctcttggagaccgctgtgtggaataaaactaccttactggtgaaattccactttctactggaaatgcaaaggggc

SEQ ID NO: 23887 - DNA, 327 bp, Glycine max
  Clone ID: PAT_MRT3847_121571C.1
ggaacacaaaacaaaatttcctatttacaagcacattcccgggggttttcgcaataaaaaaattaaaacccttggggcatttatccaagggccctgagggcaaacccccccgattccttcttggaaaaaactgggtagagggcaaaatcttttctcctggggttgactgccaaacttataaaaggattttccgcccaagatctccaagctaatgtgacacacacaaaaaccattttcactatgacatggcccttcaccaaacaaattaattcaccccctttcagagggaacaagccataacccaacaaacttagactttgaaagaaa

SEQ ID NO: 23888 - DNA, 520 bp, Glycine max
  Clone ID: PAT_MRT3847_121572C.1
aattcggctcgaggcggcgaacgggaaatgagggcaccgcacatatttgaatttgcatattatcgagaaaggagctagtatgcatcgcttccatatcggggacaaattgtacaccagggtttttcatagggttctgagttccatctctcttcttacctttcactttttgactatttttccatgaaccctatggaaaacaacagcagcacaaatgccacatcaaaactaccccgcagagcaaaaagaaaaaagaagggtctgggagtaaatgttgctcaagtagcagacaacacatcagaattctcatttgctatagccaaaactgctgttgctcaaatctgccaatcagttggatacaaaatctccaaacaccatgctcttgaagccttaactaatgtttccacaagatatatggaagccattgtgaggtcagcttcctcttttgccaatgcctccaatcgtaccgactccaacctctttgacctcatcaatggcattcatgatctgtgttctggtctag

SEQ ID NO: 23889 - DNA, 249 bp, Glycine max
  Clone ID: PAT_MRT3847_121573C.1
gacaaaacatggggtacaattggtcttctatatactatgctaactatgatctctctgggtaccagcttgtgtctccaattgtgggactcctagcttacaatgctgatgaagatgcaaagtcaagcaacccttttcagcttgggattgtggctggagaaacgcctatgacaattgacttcaccaatgccacaaagatgaaccaagatggggtcaagcccttgtgtgctagctttgaaggtgatgggagaa

SEQ ID NO: 23890 - DNA, 1932 bp, Glycine max
  Clone ID: PAT_MRT3847_121574C.1
cgggaccggaatgcaagggtgggctcgacccacgcgtacgcgtgttgcgtgggcggacgcgtgggcggacgcgtgggcgtgatcgcatgagaatcacctaacatcggaccttaaaataagagaaagagaacaacgaagaagttgttgtgtcttaagaaagagagagatggcggcggagataccgtgctgtggaacaaagttttcactgtacgttttggtgatcataggtttggtctgcttcgcgggactaatggctggtctcactctcggactcatgtctttgggactcgtcgacctcgaagttctcatcaaatctggtcgtcctcaggatcgcatccacgcttcgaaaatttatccggttgttaagaaccagcatcttctgctttgcacgcttttaattggaaactccttagccatggaggctcttcccatttttcttgattcactggtgcatcccgctgcggcaatcttgatttcggtcacgctcatcctcatgtttggagagatattgccccaagcaatttgtacaagatatggattgacggttggagccacgctggctccacttgttcgggttcttcttatagttttcttcccgctttcttatcctatcagcaaggttcttgattggatgttgggtaaaggacatgctgcccttttaaagagggcagagctcaagacttttgtgaattttcatggaaatgaggctggtaaaggaggagatttaactcatgacgagacaaccatcataactggtgcacttgaattgacagaaaagactgcaaaagatgccatgactcccatatcaaaggcattttcccttgatctggatgcaactctaaatttggagacactgaattcaataatgacaattggtcatagtagagttccagtttatgcaggagaaaaaaccaatattattggacttgttctggttaaaaatctctttatggttgattcaaaggctgcagttcccctaagaaaaatgctcatcagaaaaattcctcgtgtttcagagaacatgcctctgtacgatatactgaacgaatttcagaagggtcacagtcatattgcagttgtgtatagggacctaaatgataaaaatgaagccccaaaaaaagttaaagatggggaactacttgatcttaaggacaagcgtaagaataaaggagagaagacatccttggataaaggtgagaaattggagtcgcattattctttgactacagatggtgctcagcaagcaaagaaaagtccaccagcaactcctgcttttaaaaagcgacatagaggttgttcatattgcatcctggaccttgataattctcccctgccagtgtttcctcccaatgaagtggttgttggtgttattacaatggaggatgtcattgaagagcttcttcaggaggagatactagatgaaactgatgaatatgtcaatatccataacaagataaaagttaacatgaatgcttctaaggagaaggctcctgatgcaaatatgttgctgccttcacaagcagttcaaggacacaccccaactaattcaatttctacagctacttctgcaacgggctcacctaccacaattgatctaatctcagaaagtgagtcactaaggaatcgataattcataaggaataagagaaagacataggtttgtgtttctgttgaaaaggcagagcagtatatagcttcttgtaaaaaattccctgtatgatattatgttaataaattaatgtagagaaaggaacactacggtagcgtgtggctcgccagacaaaacagaatggagttcattttggtttcacttttaatgaaagtggaatcaaaagctatcactttttaatatcacatccagttctgttcattttttaatgtacgaaacataaaacagaatttttatgttatattctatctcattttagcaaa

SEQ ID NO: 23891 - DNA, 272 bp, Glycine max
  Clone ID: PAT_MRT3847_121575C.1
tctttttttttattttttttagatttttatatttaaacaagatcaacccacccaagtgggaatcatttttcaaaggcaaccaaatttttttcccttcccttaataaaattttccccgctttaacaaaaaaataatctatctcactcttaaaaaaacattttcacatggatttctaatcttaccgctttttttacacaccatcacttttacccctactaccatttatcctaatatcctttccacattcaccaagaccccattagtatcttaaa

SEQ ID NO: 23892 - DNA, 218 bp, Glycine max
  Clone ID: PAT_MRT3847_121576C.1
ggagtatcacgacaagtataatacataatttttccctttactctgtatcaccttgccgccgggcgattctattcccccatatttgaaagcagtcgcgcatccctctcaatacagctgagaaaccacaaccggctaaactcattttctatatatacttctcaattatttgttctttcgggaaagtatacatccacataagaatttggggcagccgcctt

SEQ ID NO: 23893 - DNA, 618 bp, Glycine max
  Clone ID: PAT_MRT3847_121577C.1
ccactcgtccgatttaaataatttaattttttttttttttgtaaaatttatataaattttatttaaataacttaaaaaaaagttaaataacaatgttaatatttttttaaaaaaaaaaaaaggggggggggggtttaaaaaaaaaaattttgaaccgcccccttgggaaaaaaaaatttttttttaaggggaccaaaaaaaaacccggggcccccattttaaaaactttttcctgggaaaaaattggtttcccccaaaattacccccttaaaaaaaaccccccttttaaaagtttgaacaatggggaaaaaagccggaacaaaaccccctttcaaagggtggccccccctaaggggaaatgggacggaacactttcgggcccaataaataaaaggatggggggggcccccgggaaagggaccttttaattttgccccccccgagggcccttttttttacctttgaacccttaatttttgggccgctttccccggtttcccccaaaaaatataaaaaaaggggccccccttgggttccccaaaaaaggctaaaaagggcccttagaccccaaaaaacgggaataaaaaaaaagggcccccttttggggcccctcccccc

SEQ ID NO: 23894 - DNA, 584 bp, Glycine max
  Clone ID: PAT_MRT3847_121578C.1
gaaatcatagtaggtatgaccttaaagataattaatataaaaatcaacaaacttactatatatgttaatttgtgattgaatgataatataaaactcttattgtcagcatatagattgtcaacatatagagtattttctcttttactatttcattaatacatgcatgtttttgttttttttaatattcttttgtgaatcttatgttagacattttttagtttttataattttttttttcaatttctcaggtttttcaatcatttttaacttttttttttacaacttttaaaatttttatattttggcctgtggaccagtccattaatccgtgggcgaagttggtaccgagctagccagtatacatatcttgctgttataaattaaacaaagctcttttaatttgagcaattcggggtatatttactcttaagttttagctggttaagatcatgatactttaaatcaaatcaaggtaccctctcgcacccatgctcactatagaatcaaactcattttcgagaaattttcatccaattaatgtaataattgctgttaatttatgcattgcaggcgatattatttca

SEQ ID NO: 23895 - DNA, 388 bp, Glycine max
  Clone ID: PAT_MRT3847_121579C.1
gttttgtcctcagctcctcaacaaaattgttctcaacctttgtccacctgcaacagagctgcatcacatacacctgaatcctcagataagcctatgaaacctcacaacatcaccaccaccctgactgagaaagaattcaaagttctttctgatctcattgctcttaaatccccatgcaatcttctcatatttggctttcaacctcagtaccttatcctctcttccatgaatgcagctggtagcaccatctttctcgatgacgactcccataaaataagcaaggaaagaaaaatctccaacaacactcaaatacacaaacttgagtacaacatgccagcaaaagcaggctacaaacttctcaagcatgcaaggcagaacccggctgcat

SEQ ID NO: 23896 - DNA, 395 bp, Glycine max
  Clone ID: PAT_MRT3847_12157C.1
cgttcttttttttttggatcatattgaccttgtcaaaaacttgagttccttaaggatgatatggtgattatcggtggtcaaaatcgagaactagaggggaggcgttacattgagaccaccccatctttatatttacagtagcgccaaccacaccgtattttttaagccgaaatttgacacactcattttccatgggatgatattttttcaactgaccatcttccggtttttaaggccaaaagaaaggctaatcttaactcggaagaatcctctattagcaggatggttttcattttaggagctgaaccttgcgcaccaacaatgttcaggggctttttgaaagatcctgttccttcgaagacctccaggcccttcgcaacgttttttttttttac

SEQ ID NO: 23897 - DNA, 347 bp, Glycine max
  Clone ID: PAT_MRT3847_121580C.1
taaatggattaaaaagttacaattccctaattggtcaaaaagaacaatccttgttggattaatacgtccaatcactgaagaaaaaccacatgtgcagttgattttttcacctttcaacagataaatgatacatggatatgtgcaactcatatttggacttcactattgcaaaaatatgatgctccacccatttcgctgcctggttgttagcatacaatattctttttttcagccttcaaaagctaagggtccaaaacatactcctcaattaatatggcaatgcaagggggaggtgttaaaaactaccgtttaaaccagcagaatttaaggcctggggaagctttttc

SEQ ID NO: 23898 - DNA, 449 bp, Glycine max
  Clone ID: PAT_MRT3847_121581C.1
acgcattttcgttttcgcacgacacaaccctaacctaatgctgatacgacacagactctgtgggcgacagaaaaaaatgaacgcgaattagcggaagacgcatacgatgacttcgtggatatacgctgctcgatttagatctgggaagcctcacccggctctatgtgatgggagagacgagcatcaccttcttgcgaatcgcataccgctgatgacaccgacactggcaatgttctcagcggttctgcctagctctaccaacaagatgagatgcagctgagaacaatcgcctcgagagctcggattctgaggctctagaggcagataagatgacttatagctgcaagagagtgagcatgagaaaagccagagtgcagatgcttgcatcatgcaggaaggtggtggaaaaaactatgagcatttctttgttgctagccacgacactgacc

SEQ ID NO: 23899 - DNA, 412 bp, Glycine max
  unsure (1)..(412): unsure at all n locations
  Clone ID: PAT_MRT3847_121582C.1
aagtgttctacagccagnggaaaaacccgcaaacacgaganaactggcgcgggaacacaccccacagacgaccggcccgaaaaggaagaccaagaaaaacccaaaaagactgaagccagaccgagacaaagaagagagcctcaacacaacgagggccaggcacagacggaaacaaacacgtgcaaaacgaccctcgatgacagggaaacacccaaaggcgccacgcaggagcctaaaagctctcaatcaaacaacgcacggcccaagaacacagccggaggaaccacacgacgcagcgagcgaaaggcaagaacccgcgacagagggcaaccccagagcaagcggagcacagcagcgcacccaccgaaccaaagggatgactaaaatggcggccacacgcggaacccctgag

SEQ ID NO: 23900 - DNA, 299 bp, Glycine max
  Clone ID: PAT_MRT3847_121583C.1
tagcgatgtatacggacacgtgtgcggatacatgggtagcaccccggtatatagatccgaaacttggtagccttccatgtttaccctatagtgtagttgtatatatgagatcgtagtaaacatggctgtacgtgttttctgagcgaaattactatgcaaatcacatttccacaccaaatataatcgccttggcataaagtgtaaatttctgcagtgtgtaatgatatgaaataagtcacattaatatgcgttgttctcactgttgggtatccatgaatggaaacactggacgccacttt

SEQ ID NO: 23901 - DNA, 386 bp, Glycine max
  Clone ID: PAT_MRT3847_121584C.1
gttccccactcagacttagatgttgagtcgtgcactttcaaccccaacaactcaaagcctcaaggcaacaagaacaaatgcaatgctttatccaactcatagattattgtctcttaaggagttgtttccccaaggtgtggcctgccactgacagaagagaatgtggagaaggttttggatgaggtaaggcctggcttgatggctgatggagggaatgtggcattacatgagatagatggtcttgttgttgtcctcaagctgcaaggggcatgtggatcatgtcctagctcagctatgacattgaaaatgggaattgaaactcgcctccgggataagattccagaaatcttgggagtggagcagataatggacaccgagactggtct

SEQ ID NO: 23902 - DNA, 156 bp, Glycine max
  Clone ID: PAT_MRT3847_121585C.1
atggtgttgaatccgaggaataaaaagctacaagtacaggctgctagattcgctgcaaacaatggaccggagaaaggaagttgcaaaagcagaaagctgaaacagacacagttagcgttagttgaagcttattacagagttgatttgaggttgtga

SEQ ID NO: 23903 - DNA, 1075 bp, Glycine max
  Clone ID: PAT_MRT3847_121586C.1
tagctatcagcgtctcctttgctgctactaatatcagaactgaacttcatccaaaaaccaggaatgagacaacatttttttatataaaccaaaataatttcagtttcagctgttgctcatttatcttatggtagttttctgggttccccactcagacttagatgttgagtcgtgcactttcaaccccaacaactcaaagcctcaaggcaacaagaacaaatgcaatgctttatccaactcatagattattgtctcttaagaacccagtatcaaataccagaggattttcatcaaaagagaatatttttatcagaggtcaccaaatcaatataaaacaattttttggccttatctcgggtcgtacgccacgaaacaaagcaggagttgtttccccaaggtgtggcctgccactgacagaagagaatgtggagaaggttttggatgaggtaaggcctggcttgatggctgatggagggaatgtggcattacatgagatagatggtcttgttgttgtcctcaagctgcaaggggcatgtggatcatgtcctagctcagctatgacattgaaaatgggaattgaaactcgcctccgggataagattccagaaatcttggaagtggagcagataatggacaccgagactggtcttgagttaaccgaagaaaatgttgaaaatgttctttctgaaattagaccataccttgttggcaccgggggaggaatattagagcttgttcagatcaaggattatactgtcaaagttcggctaagtggacctgcagctggggttacaacagttcgtgttgccttaacacagaagctgagagataagatacctgctattgcagctgtgcagctaatagactgatgtcacatacaatacaagttcttttatattttgatttatctgttacaagatgaactggaaccatccatagaaagaacatgtaaacttctgttaggaaaacaaattcagtgtcagttactcagttttataggatttaatgtttgtctcctccgttcacttcagaatgaagtatttaacattccttatatcactctcagtcttagcaa

SEQ ID NO: 23904 - DNA, 238 bp, Glycine max
  Clone ID: PAT_MRT3847_121587C.1
gcaaagacatcaatatttctggtgcctgattttgttttggaggtaatttcaatttgcgtggtttgttcttgataaacacttaacgagtttatggagtcaaacacgagttcggctattggcgatgaaataaatcaaataatttgtctgtcgatcttctttttttgtgtgtttttttgggaattcggttgttctaaatgtgggtttattatatttacacttaacaaatctttaaaccaca

SEQ ID NO: 23905 - DNA, 132 bp, Glycine max
  unsure (1)..(132): unsure at all n locations
  Clone ID: PAT_MRT3847_121588C.1
tacggattagantgtctagttntgaaananaaggaccanattgtctgggtttgtgcnatcgagtggngcgaatcccaataccagcaagttanccgagtntgatngcacngttngtagaaccttgggantgcc

SEQ ID NO: 23906 - DNA, 328 bp, Glycine max
  Clone ID: PAT_MRT3847_121589C.1
cgcgtccgctttttgttaagattccaaatcatggcttctcttgctttatccactgctgctacttccctgggcatgggataaatgctaatagaccccatcaacctcattgtttccacaaggccatcttcatcttcctctagccctgcctccttcaagactgtggctcttttctccaaaaagaaagctgcaccttcaaaaaaagctgcagcttctgctcctgccaatgatgagcttgccaagtggtatggtcctgacagaaggatcttcttgcctgaaggtcttttggacccatcttatatcccttattacttttacccgaaaattcccc

SEQ ID NO: 23907 - DNA, 285 bp, Glycine max
  Clone ID: PAT_MRT3847_12158C.1
acggcacgtaaaaaaaggaaatcaaacactcaaagaacgtgtctagacacatatggagccagttgcattactgttattcctagcatgcctttactttctaggctccaacatcagcttcaaggcaccacacaagagatctaaacttaaaaattaacttggttacatcacggatcacctctacatgtgttgttttcctgtgttggagtttgtaataatggtgatcaatgtagctggataagtcatgattttaattaacctttttcgtcactaattaatattccgctc

SEQ ID NO: 23908 - DNA, 141 bp, Glycine max
  Clone ID: PAT_MRT3847_121590C.1
cggggcgagcgcacgcgtacgggccaagccagtttagcacaaccaaagcttcactttcaaatggcttcagcttctgttcccatggcgttgttactgagctctgttaccaacaacaacaaaccttcatccttaacctttttt

SEQ ID NO: 23909 - DNA, 529 bp, Glycine max
  Clone ID: PAT_MRT3847_121591C.1
gtgcggcgctcgaggcggctcgcgatctagaacctagctcactgcccccaacgaaacaaaccccaaaccctaaacagtttcagcaaaattcaccaatggctttctccaaagcattgttcctcgccgtcgtaatgtcggtgttcgtcgccgtcatctccgccgctgaagctccggctccgagccctacctctcccgctgccgccgtgtcgccgtcattcgtcgccggtgttctcgccgccggagccgctctcgcgttcggatctacactccggatctgagcgtagctcatggattttatttgtggatttttagtagaagccgagatttgagtagcattagtatataattctctctattgatattgctatgtagcgattattgctagatatgttgatttctggatctatattgcttttatggtttgactagtattcttattgttgttatcattggttctagtacataatcgatttgttttatattcaaatttgttcttcgtttttgttttaatagcttgatttctttgttt

SEQ ID NO: 23910 - DNA, 524 bp, Glycine max
  Clone ID: PAT_MRT3847_121592C.1
aaaaaatgacactaactggtcattcagtctgataaaacttgtccttccaaaacatccaaattaaatactataaccttgatgccacatactatgtctatggctaaagttttaatcgttttaagtcaaacactgctgtttttatgccaaatcatattaacggaataacccgctgcttttacacatttccaacagcatgaggcattctgactttggccttaggcgctcgctaattctattgacgtagccatctaagatactgatatcttaagtcaaagcgtccatccaggaataactccattgactcgttgagctggagttgtggcagctagctgctgctctgaagctgtacggatgaccctgtaggcagaacctatctgcactgtggggttgcactccaaaggctggaaaaaaccttgatagtgaacctttctggttccatatagcatacttcgctcaccagcttcccatgatggcctatactggtttctagaattgatgacttccagcttcatggtcaaagacct

SEQ ID NO: 23911 - DNA, 494 bp, Glycine max
  Clone ID: PAT_MRT3847_121593C.1
ataacacaaaaaattaaagttcatagcatcagctgcaaaaattactgttgaagagaatgaagcttgtggtgattgcactagtgttgatgctggcaagctcttctgtggctataaataggatgaaatttgtgccaaaattggacgagagatcggaactgagtaatgaatctgatgataatgatcaccatcaaatccctcgaaaggagtatggaaaacctggatctggccaacgtgaagtggatgaggggtttcgtcacgtctacaccgctggcaatgactatggcacacctggccagggaggaaattaaatattaaatgttattaattagtatatatattaattaaggatgcattataaagctgtatatatgtatgcatatgtcttgcagtgtttgatgtgatgagtaatgaatgctagctgatgagtgggtgttggtaattaaaaaattcattgtaagtataattagttagactaatactttactacttcacat

SEQ ID NO: 23912 - DNA, 303 bp, Glycine max
  Clone ID: PAT_MRT3847_121594C.1
tcgtttcaggccctgccacacccgctacagtagaaggagggatgactcactcaaccgatggatccggggcagaacggggagcctcacatggcttatggtacagtacttcacactttcagactattcaacgaacctcactgttatggaaacaacaccaaacagggaatttgatgtccgagaggactggtgttctactacaagcgggggtccttcttcagggtcggttccggttgcgcttacagtatacattcgatccaggctcttatatgctactgactccgaatgatcctcgagtgagtgaac

SEQ ID NO: 23913 - DNA, 369 bp, Glycine max
  Clone ID: PAT_MRT3847_121595C.1
cccacgcgtccgaaaaaaataaaaaaaatattataaaaaatttaaaaaaaaaaaaaaaaaaaagggaaaaaggaaaaataaaaggcgacaaatttaaaaaataccaaaataaaatacacattcatacgaccggatcctttttatattccaggtttataactcattctactgaccttttattttcaacttaatgactctaaaaaccctgtcttttacccaactttttacaccttgcacctcttgaaaaaccttgtagttacccatttatctaattttcctttaaccaccttttttcataactatttattatctaaaatgcccaattccaaacccctttgcaaacctttattaaacctgaatggctaattg

SEQ ID NO: 23914 - DNA, 555 bp, Glycine max
  unsure (1)..(555): unsure at all n locations
  Clone ID: PAT_MRT3847_121596C.1
cctgcatctgccaacaccatgaggtccccttggatgtccttttacattgatacccgtgacattggcagacccgacaggatatccttttctagctacggtggctcgtttcccgctccatcttccacactatatattctgattgtgatgatctacgttattgaagcatctctaatggcgaatggagctctcaggatatcgcctgggggcattatgacattttcgacgacattcgctactgcctagagttattgtaagcacggacctgcacaatttccctatctattatatatcaatatctatctatctggatcgaaagtggagtagtaataattctactacttgcgtgcttgactcgggtatcaacttcctatccttcattcattgtgcaaatctatatgcatgcctctgtttggttgcactgatgcttctcaggtgttgaaggagcttcaagaggctaagactgcataccccaacggcttcatccgtatcatcggattcgacaacgttcgccaagtgcagtgcatcagcttcatcgcctancagcccccaggcttc

SEQ ID NO: 23915 - DNA, 345 bp, Glycine max
  Clone ID: PAT_MRT3847_121597C.1
ggaaaaaaaggtttatataatatataacccatcatataataaaataagtttttccttgggaagtctcaattatatggaataatataatttataaaagggaataaaaggtcctacggaaccccaaataaggggggaaaccatgttaaaaaacttaccaaacccaaattccttataaaccttttttctttttcaattttaacaaattttcaaataaaagaactgaaccttaccagcaactgcagggttaataaacctaaatgccatggtctgccttgaacaacttttcttccacacttccaaagggaacaaaatggaacttaattttttaacaataataattaaaat

SEQ ID NO: 23916 - DNA, 271 bp, Glycine max
  unsure (1)..(271): unsure at all n locations
  Clone ID: PAT_MRT3847_121598C.1
caatgagattatatgatatttatatttataaagtaacagatgaccttttgcatagacagcaacaatactcttgcatgcagatgtgtgcctttganaaacaaggctctttgtgttagaatctattggctctgtacgnngctcatgtgtctgccatancctatctaatggaacttcctaagtttatttgncgtcaatttgtgatgcnattgttatnatngtagttctcgcacttgcatggatncaaacagatagtgagtcaggtggcttggtg

SEQ ID NO: 23917 - DNA, 519 bp, Glycine max
  unsure (1)..(519): unsure at all n locations
  Clone ID: PAT_MRT3847_121599C.1
tactgtatgacgtcctccttctttggggggggggggggggactgcgccaaaacccaggaggcaatccacagggatatggaggggacgtgaagaaattagacaagcttataattagcctgcggagaggaatgaacataccaatggcaaagcaggtacatgctaggatgatatacattgcaacgaccagaatagtatatatagggaggtagatcaacaggataggagggccagagggcgaggcttaaatataccgtaaggataggggtagatagaggttggaaccattataccgctacgttgcgtacacgtacggacacgttatatgcgtatggtttagtagcgtgtaatggtcgcaatagttagcataatacgtgtcagcgaatgtggtgtacgtgtgataagaatattagantgcgggtttgccacgtaatgacgtggcgtaatctacgtctacggcttctagcgcggtcatagcgggccggggcacaacaaacgtaaaatatacccaagcaatggaac

SEQ ID NO: 23918 - DNA, 316 bp, Glycine max
  Clone ID: PAT_MRT3847_12159C.1
gaattccgcactcaaagaacgtgtctagacacatatggagccagttgcattactgttattcctagcatgcctttactttcttcaggtccaacatcagcttcaaggcaccacacaagagatctaaacttaaaaattaacttggttacatcacggatcacctctacatgtgttgttttcctgtgttgaagtttgtaataatggtgatgggtgaagaggtggtggatgctatatatatatgtgttgttttcctgtgttggagtttgtaataatggtgatcaatgtagctggataagtcataaattttaaaaaaaaaaaa

SEQ ID NO: 23919 - DNA, 401 bp, Glycine max
  Clone ID: PAT_MRT3847_1215C.1
gtggaaacttataactcacatcaccaccacctcctaagttatacagccactgccttactacgatatcaattcaaaaaccctacaatctcgtgattcaaacaatttttcatgaacatagtcggtgtcattctcatcccctcccatcatatttataatttatatagaataatatccatcataaattacaattttggttctaattttataatgattttcgaaaagacatgcgccttattaatctatctgtattttttaaatttttttgaaagtgaacttgttgtatagataattaataccattttttttattgatgaaagtgatatgagagattgagaattgaaataattaaaataaaataatgggggaatatgaaataacaactcaaagataaaaaaaaaaaa

SEQ ID NO: 23920 - DNA, 225 bp, Glycine max
  Clone ID: PAT_MRT3847_121600C.1
aggcttcatggcacttacatctaagataggggaatctccttcaccacactcctaagcctgttgccccacactttccattcaaccaacaatggcccatgtaaccacctacctacggcaccagctggacttcgaccccaaccacaacctctattgcgaacattaaccccaacccagagtactaccacacccacacttacttgtccctattgggattagaagttgaat

SEQ ID NO: 23921 - DNA, 414 bp, Glycine max
  Clone ID: PAT_MRT3847_121601C.1
catgaagatcccgctggcgtactctactctctcggatccggcaagcgcgccaactcggatcagaggctcttccggcgacaacggccgttgtcgacggcggcggtgttctccggttatacgcgtcggaactgggaaacggatcagtgttggtagtgagtcactgagtcgactcgctcgagtgaatgggaaaaaacgcggttgttgaagcgcctttccttgcatatagtaaaattaatcactaattagttagtcgttagagtttgtattatactacgtatatgtatagctacaaacatacatatacgcgtagagtagaatagactgccacttgtacttactctctcccacttatcatcaaaattttatggatgaacaaaaggaaaaggaaaaaaacagaagaaaattgactttggt

SEQ ID NO: 23922 - DNA, 335 bp, Glycine max
  Clone ID: PAT_MRT3847_121602C.1
accggaggggcgctacatacttagtttatcattaattgggtcatcacagctcgggacatacacaacgtaatcatgctactgaacatactagaccttcctatcactcacatccatatccatggggacgcagtaagcataagcaatcaaggaaccaccaagtgcgaggcccaaactggagaagccgatgatcgcactatatggctagctcatgctcatgcatctctgcattctcatgtgcacatgctgtacaatctaatggctactttgcatctaacttcttagaatatgcgtactgatataacatatcatcggcttgacgatcatatacttcgatg

SEQ ID NO: 23923 - DNA, 281 bp, Glycine max
  Clone ID: PAT_MRT3847_121603C.1
gagcccacaccaaaacctttttgtttaagggttctgaacatactcctaaacaaggggaatatggcatagacaacttcttacaaaagcttccctattttttaaagaaaataacacggcagtatccactattgggcggttcccttggccccgcaaataaatctggcaaaaaggtggttctaacattgactatagaaaactgaacaaactgtatttggcccaacaaaaatttttacaaaattcttttgtaacacaccaccttcccggacgcgtgggctgaaccc

SEQ ID NO: 23924 - DNA, 435 bp, Glycine max
  Clone ID: PAT_MRT3847_121604C.1
aacccataatcaatcatgtgatgttttatgcaacaaaaatacctaaaaagttcccaacaactttttgtattcctcatcttcatccggattttaaaaagcccccaaagtaccaactgaattgaaattgctttaaaggaaaggaaaaattttgatccaaaaaataccctttttgcttaaactgaacctactggtttgtttacccttggcattatgggcatttgctcccattttataaacaattcttaatgccccagccaaccaaatacgttaaaagcagactcatttaggaaattagagcccttatgctgaatttgaccacattatgtaaattttccaagctccatcttccttttgagtggtctctgaccataatatatcgaagaatctttttttcccgcaacagtaaatacccctccaataattgcacaaattttg

SEQ ID NO: 23925 - DNA, 210 bp, Glycine max
  Clone ID: PAT_MRT3847_121605C.1
atacatatgtacggatagatgttctacatccaaaaaggaaaaggaaagacgaacccagaaaaaaaagagatggagtgaacacgaactgagggaccttagacaatcatacgcaaaggagccccaaaaaacgaaaggggcctgggggaagggaaaagccgcgggggaccaaaagcccatagagcaccaggacatgcaggaaccaagaaaacc

SEQ ID NO: 23926 - DNA, 268 bp, Glycine max
  Clone ID: PAT_MRT3847_121606C.1
gcggacgcgtgggttataacgtttctctatttctttttattatactattttgtcaatgaaatcaatcatgtatttctttgtatctctctcaatgcataaatactcaaaagatgtccacgaatcatttttgaatgtgatatacctaggttagttcatccaacggtatgatacgacttagtctataacatgtcattgaacaaagtcctaaatgatgtcatctaatcatctactctctctaatacgaaatccatattttttattccataat

SEQ ID NO: 23927 - DNA, 1850 bp, Glycine max
  Clone ID: PAT_MRT3847_121607C.1
agagagctcttgccagattcagattagattcatttcatttctcatttacacgcacacaacacaactctctttcactgttccctctgtcttctttcctttctttcttccttttccccaggttttattggaaaagaaaaaacaaggtctagtccctttccaggtgccgtgactaataacccaactttctctccccccccccccccccctcctcttcctcatccttccttttcatcaacccttctcactccttcatcaacaaccttcttacaccaatttttcttcacttttgttggattcctcaaaataaacctgcatggtttgcactctatgtatgctagatcattttttcttctttctttctttctgttttccacaacatacatgtggctttgtgcaaattggagatatatatatacatatgagagagtaaatattagacctgcttgcttgacttagcagaagagtttttttttttttttttttttttttcagtggagagcatatatatataggtagctagggatggaagatatttacaagatgaaccctctttcatgttccggctttgatgttgttagggaagttaacgttaattccgctactggtgcttctgaattgaatcttggactggtggctaacaacttcttttcggatatttcggatcggttcatcaagtcccagatcgccactcaccctctctatccaaatctagtatccgcttacatagaatgccgaaaggttttggttttgccgcaccagctgccatattaattattttttgttagtttgttagtttttgttagctggaattccaacacctatcccttcctcctttcacccgctgacataatattaccttttgttgttttttttttaattaattggctttcttctcttctatttatgcatttttttattattattgccgaaaggttggagcaccaccagaactggcttcacttcttgaagaaatagcccgtgaaagctacccaacggatgctcttcgtgagataggagatgatcctgaacttgacgaattcatggagtcatactgcgaagttcttcatagatacaagcaggagttgtcgaagccattcaacgaagcgaccttgtttttgtgcagtatcgaatcacaactcagcaatctttgcaagggaacactgacaatgccattggataacaaccactcagatgaggccgctggaacatcagaggatgaattgagttgggagaaggtggaagcagttgaaggtcacgaatcttctggcccacgtccaggtgatcaagagcttaaagaaatgctccttcgtaagtatggtggttatcttagcagcttgaaaaaggaatttcttaagaaaaggaaaaagggtaagctaccaaaggatgcaaggatggtactcatggactggtggaacacccactatcggtggccttatcctacggaggaggagaaagtgcagctatcagaaatgactggacttgatcaaaagcagatcaataattggttcatcaatcaaagaaaacggcattggaaaccatcagaggacatgcgatttgccattatggatggtgtaagtggcagtggctttggaggacctatctaatatatttctggagatggaccgtgttgattcctgctacttgtaccttcctgctcgtgtgatgtgtgtatacgttcttttccacgagatatgtattaattttttgaacctgcatttgtatgctaagtaaataggtccttcagcttatatatatatgcaagagtgtaaaaaacctgtagctaatatacgcgacagtgataatcgatcaatgctactgaatcattatttcatgacaatttacattatagt

SEQ ID NO: 23928 - DNA, 331 bp, Glycine max
  Clone ID: PAT_MRT3847_121608C.1
aaacgcgttaacgaaggcggtttctctcgtctcgtctctgcttttctccttccgcttacgcttgtcgtgccgacgacggtaaggcaattcaatgcctatgaaccctaaccagacgcagtcaccggtttggattgacatccccttctcatactttgactgatagctttcatgtctcgacttctctctggttcattatcaattgttatacggttcgccgtagattggatggagcacaaaagtaccgaaaactatcatagatttttgacgaggggctcttttatcgattgattacgattgtgtgaatcaccgaagaacatattgacgcctccga

SEQ ID NO: 23929 - DNA, 283 bp, Glycine max
  Clone ID: PAT_MRT3847_121609C.1
cacctcgagctgctcgagcggctcgagctagcagttcagcgtctctaattatttatgcagaagacaagttgcagtcaatctgcgatctcggaattatgcatcatctaacagtaaagatgacctaatgattgaagaagatgctgagagaaatgctaggtcgctattgaaaacgatattatgtgtcactgcaagtgtagcaggataccatatgtttccttatatgggagagaatttgatgcaacagtctgaatacctagagcgtgtcaaggatcccttgttcaaa

SEQ ID NO: 23930 - DNA, 533 bp, Glycine max
  Clone ID: PAT_MRT3847_12160C.1
cggctcgaggggccggccgggcccgggatagttcccgactgtagtcaaaattaaccaatatataatgctaaatccaagaaccacatttttgccacggtacgtaaaaaaaggaaatcaaacactcaaagaacgtgtctagacacatatggagccagttgcattactgttattcctagcatgcctttactttctaggctccaacatcagcttcaaggcaccacacaagagatctaaacttaaaaattaacttggttacatcacggatcacctctacatgtgttgttttcctgtgttgaagtttgtaataatggtgatgggtgaagaggtggtggatgctatatatgtgttgttttcctgtgttgaagtttgtaataatggtgatgggtgaagaggtggtggatgctatatatatatgtgttgttttcctgtgttggagtttgtaataatggtgatcaatgtagctggataagtcatgattttaattaacctttttcgtcactaattaatattccgttatacacttctacagaaga

SEQ ID NO: 23931 - DNA, 544 bp, Glycine max
  unsure (1)..(544): unsure at all n locations
  Clone ID: PAT_MRT3847_121610C.1
gtttataaaatgttaaagaaggccangtggtaccttgaaaggggagaanaattaattgtctcttattgtaaatggcaaantaggctaagtgngtaggaattggatttagttattagaccagaagacaaggataaaatcggtcatatacaattataagtgattgagcaaatgaaacaaacaactattaaacaaagcaaacaaaagggagtgccaatctcaaaaatctggtaaaaaaaacagtaatttaattatttttcacaaagaaaataagtgataggagaacagcttanacattgaacagtggagtcaaatattatggccagaaaacttctaaatgaagttgtttctaaaaaatatcaagagtcagaaagcctgcagtgagttatgattctctaatgcagaagagttgtttgtcagtcagataacaagaaaaagttatgattatgacattaccaaagcttccttccaaagaaataggaaaaggttgctccactaaaatttcaggtttgggaagggagagatggatggaaaaaagggttcaagc

SEQ ID NO: 23932 - DNA, 670 bp, Glycine max
  Clone ID: PAT_MRT3847_121611C.1
acatgaaatcaaaagctatatattaagattgagattgttgaaatcaaaaattggaaacggagcctgagaaagtttatattcagtttaagaaatatagtgaaacagagaaatgaataggtgcatctttcaaacccttgaattgtctttctctaacactaactcttcaatcaaaagcagcataataacaatgaaaagaaaaatcaataaactcaaaaacccattttagctggacccaccatcattcataaaaccttctttgcgaccttcaaagccgggccgcataagttttttctcccttttggcaattttccgcattttcttctcacgaatcctcgaagctatattctcggaccttttctgctgcttctctgccttcaactggtccctagtttgaactctatccttccacttctccgcattcttcagctgtttcttcttctctttatgaatgcttttatgcaacagttttggatcatcatgcaccttaacccctgaagctctatccattgctgctttccatgattgctttttagcaaaagcttcagccttctcaggatctttcttcttcacttcttccaatttcttagccctttctagttcctgatgctttgaaaccttcctcttctttttcccttcgtcccggacgcgtgggtcgaggcgggaattccgg

SEQ ID NO: 23933 - DNA, 468 bp, Glycine max
  Clone ID: PAT_MRT3847_121612C.1
gaaagaaatatagcaggaatgaagaagaaagatgatgtaagtaatatgtattattcagaccttggaaaattcagtagaatgaggtctatactaccccgagcttctctgctattatgcagagatactgctttctatccatagctaacaaaatgatttgcctggataccctccccactccctttctctcctatatcataacaacatattccactattcaataactagctcattccttccctttctctctcactgccagctcatcattcctctctatcctccctctgttccttctagtgtaaaccttctaaactttgggctcatgactcatgagacaattgctgaactcacattcccttctgaccccgtaacccatttgaggctttaacattttgtaaatttttgtttggaaacaaggtctgtggataactttgggacatgaagaacatccttgaaaaaaaacctattttt

SEQ ID NO: 23934 - DNA, 749 bp, Glycine max
  Clone ID: PAT_MRT3847_121613C.1
ttcggggttattgttgtcgtgtatcggtcataaatggttagtggataggacatgcgagacgtcacacaccattcgtgccgcccatggcctaccgctgcgccaatcaggcatgatgtccttgcactttagctgttctgttacaaagaaagaacaccaaataatgcagtccatgttaaccatccgtgccacccatggccttcctctgtgtctctcagggatgattcaccctcttgctctctctcacgatgtgtgtaggatagcggatcacgaccgtaggagacgcaccatgaggaagcaaaggcaaagatcactcaccagagagggtgtagtgcatgatgcggttcgagaaattcactttgtggaggtcaaaggtgagaccgatttgcatgatctctcccacactcatcacctggggttgtcagcaagagctgcttaaaatttagctgcttctccaaaattgattaatctcgctagctcctaccactttgttatgcactttatttaatttcactgtgatggactctttcgttattatatatatcatgttaattaattactagttgtctcctttgttctgtactcaattcttattttctgtaaccacatatgtggaactttttcttgtactcttactcccatgattaatatattcttcttatgatgttgcatatatgatgctagtatatgcaccttccattgccgaaaaaaaaaaaaagtaatttttaatatgtgtcggccgtatagagaaa

SEQ ID NO: 23935 - DNA, 252 bp, Glycine max
  unsure (1)..(252): unsure at all n locations
  Clone ID: PAT_MRT3847_121614C.1
gtagttagggcgatataatgggagtaaaaggtaactgtgggaaaatgggaaaaacgtttttttgctgatgnctgctgttatttgctgtccccacttgttggtgcttataggcgaagaaaaatattgtttgagccaatagcttccagactgtgaaggaaagctgccattgcttgatcttgggatttggactttgagaataaaatcatttttacacttttgaaaatgtgtntttggcctatatgttggagttct

SEQ ID NO: 23936 - DNA, 625 bp, Glycine max
  Clone ID: PAT_MRT3847_121615C.1
aaataatgcagtccatgttaaccatccgtgccacccatggccttcctctgtgtctctcagggatgattcaccctcttgctctctctcacgagtaagaacttagaatatcatgaaatttattaactaattaacacaccatatttttctgattccactcttatttctaacaactaacaagtgctgtgatctgctgtggtttttttttttttctatccataaatatatattaatggttagtatattagtttttcgtgatcccactcttatatctctgtagtgtgtgtaggatagcggatcacgaccgtaggagacgcaccatgaggaagcaaaggcaaagatcactcaccagagagggtgtagtgcatgatgcggttcgagaaattcacttagtggaggtcaaaggtgagaccgatttgcatgatctctcccacactcatcacctggggctgccagcaacagctgcttaaaatttagctgcttctccaaaattgattaatctcgctagctcctaccactttgttatgcactttatttaatttcactgcgatggactctttcgttattatatatatcatgccaattaattactacccgcctcctttgttctgtactcaattccttattt

SEQ ID NO: 23937 - DNA, 303 bp, Glycine max
  Clone ID: PAT_MRT3847_121616C.1
aggaaaacaccttttattatttgaagccccaaagttcagcagaaccccaatgaaccccaggaaattttaattgattatctcaagggttttttttagtagggagacaatggaactcaaaattttaaagggtaacaatccaatttgaacaagataaattatttgattatttcaaggcatagcttcttttcaaggggaaaatgcttagggtctcagggggggtataagcaggttccattatcactttttgcagttgggtccaagtttgaggcatttggatcagtacaacctttaggaacgggaatt

SEQ ID NO: 23938 - DNA, 732 bp, Glycine max
  Clone ID: PAT_MRT3847_121617C.1
tgaagacgacagaaggggggggctgtgattacaaagagagaggcttgagtgggaaacctaattcgattgaaggtgccgccatctcctttggtttggtatctcattctctgaaattgaattcggtttttttcccacagtgacggtgttttcaaaatttacacttgatatgagccctccacattccttattttcttttatttaatttcatcaatttctgtccgatcttgtgtagtttttattttaatttttttgcactgtttgtgttctgtacgaggaaacacttggattttgttttctcgccgaagtctcagtgcgcacagagaaagccccattagagccactgcttatttccgcccacgcgtccgctttgttcgccaaaggaagcgttttctgggaatatagtggctgtgctgtaattgggcagcggccagacaaccgtagagatggtatccacagattatgggtttttctttctctcattctctactgattccatcccacattttctttgttttaatctcaaatcaaattgagtcaaatgttattttggtccttttgagttaagtttctttttttttctctcaaagtgaaatgttagatcaatgtagtttgtgaaggtactaagtagggatatataagaaatggttcaattggtatattactttttttcaggaaaaagtagtgatttttacatttcagccaagtctattcaataattaaatattattttac

SEQ ID NO: 23939 - DNA, 507 bp, Glycine max
  Clone ID: PAT_MRT3847_121618C.1
aaacatcaaaattgcattatgctctttgttaaacaacgaggcacggtaacatttacaacaagtaatgaacttcaaattacatgataaaccagcaaacgttctagtgtcaattctgttggttgttttagcccagtcccatttggtgtagatcccaactagttttgaaggctacaagctcaaccagctggaaaagaatgttggaaggcaagtacaattcaattctatatcaggttgccataaggggtctcccaagtgccaactgtatttaaaaaatagagcaaatgttagttggatatctaatattccatcatcttaatgagaaatggggcctctaatgctgattccttggactgcaaataacggttttcctccactaaatctgtgggcaagttcagcaatattggccgctttgggtcgtaaactgagagatcacgaactcgtgcaacccattttgctgcttcccataccccaaatcgtgtattgaaagatgaggttactaatacagct

SEQ ID NO: 23940 - DNA, 169 bp, Glycine max
  Clone ID: PAT_MRT3847_121619C.1
agaagaaaaaggtaattattattattattattataaggtttgaaccaaagaaaactcaaagcttaaattaaaagaatttccgggcattaccaggaatttggccattgacctaattatttccggtttaccggccaggggatgggaaggttgagccattccttttacctta

SEQ ID NO: 23941 - DNA, 296 bp, Glycine max
  Clone ID: PAT_MRT3847_12161C.1
gggggctgaaccatattctaatggtactgggacccctcctacatggtcaaaaaatagactgaatttagctattaacaccgctattaacgaacttataatgcttttaacctatcacaggtacttacagacgtggtcctagcgtttttactttgtgaaatatatttcttactgattttgattctatttgcgttttgagtttgttccttttattgcactgtttatctggatagcgttggagcccaccgcacgcttttctatatctttgctcttaatacttgacagtccccgtttctcct

SEQ ID NO: 23942 - DNA, 169 bp, Glycine max
  Clone ID: PAT_MRT3847_121620C.1
ccgggatgcctctttgagtagccctatgaaaatacccaatttcatacgcggcttagttaggaggcgcacatcaatcggaactaaattcacgtttgcttccattcagagataggccttttgaagggactctgaaatcatttgtccctcaagcagcctttcacattttaag

SEQ ID NO: 23943 - DNA, 133 bp, Glycine max
  unsure (1)..(133): unsure at all n locations
  Clone ID: PAT_MRT3847_121621C.1
acacntcatccataaagttgatatgaattgtgaatttgtaatatcctcaagaataattgacaatttgtatgataaatacataatcgaatntgttacttttgcgctattaacacaacgttctaaccaattgaac

SEQ ID NO: 23944 - DNA, 369 bp, Glycine max
  Clone ID: PAT_MRT3847_121622C.1
gactcaattatgacatggctttttttttttatttaacatgtatcattcgtttttttttttgtttgggggaaggacacccaagagggagggggctgcttttttaatagaaaagaagaacacgatactgcccgggctcaaacgaattcaatccacattgaatacgatgcggaaaaaaagggtactaaaaaaacccggggggtttccttgaactgaccacgctgagacttaacatgcatggggaaagcctaacgtaaatttgaatcgggggggccccagccgcctgggaggctaaaaagccacgctactttacagcctagctccactgaattgggcgaaaaaaacacggggccacgggacagtccttttcgg

SEQ ID NO: 23945 - DNA, 421 bp, Glycine max
  Clone ID: PAT_MRT3847_121623C.1
ggaaaattaaccaagggggtgcattggttttttccaatcaaaaaccctttggggaaaaaataaaatcttggtccttaccggtaaaatatagactttacaaattgaacaaaaatcaggggaacttcatccctttaaacaacggggaggaccaaaatttttaatgaaaacgggtttcagccagctcctatactggcgggatttttggaagaaaatttgggacattacatcaaggggaatggtttactttttcggcacttttgccgccacccattaatgggttttgcgcttcagcacaccaccgggaactgggtaactcaaaaagcatttgcaaggtacagcttcccggggaaaggctaccctggtttcttgggtggaaattttggattcttggacatttggatacttgggggggggaccccta

SEQ ID NO: 23946 - DNA, 318 bp, Glycine max
  Clone ID: PAT_MRT3847_121624C.1
ggcaaacggtccatgaattgctattattgatccaaagaggatggaacaccataatgtcgcaaatgaatgaatactgctgtgacactggttaaaataactaaagaattgcttaactggtaataaaaccggcgagcacagataaatcacgaaacagtacaaacctatccatttctaactaattgaatagtacaatgccaaactcaagctgttgggtcaatatttaaaggttggtgttctttctcggagtaaaaaagacactgttggggttgataaccgtgtgatgtacaaaaacagacacaaaaagtgcttggactgatt

SEQ ID NO: 23947 - DNA, 1561 bp, Glycine max
  Clone ID: PAT_MRT3847_121625C.1
ctcctgctaaagacagatctcagattctgtacgctaacacagagagttagagtgagaaagagagagatggcaacgacgacgtcgtcttcaagcgaggaagcaccgaacactaagaagaacaagaaggagcgtttaggttggatagaatggttaagaggttggttctatttggtctacgaaatgctctttcagcgcatcatggcgagccacttgcacaaccctatgcctctccctcctgtaaacgacctcacttgcattgtcaccggctccaccagcggcattggcctcgaaattgctaggcaattggctcagtcaggggcccatgttgttatggctgtgaggaacactaaggcagctcaggagttgatccagaagtggcaggttgattctgaaggattgagtattcctctcaatgttgaggtgatgcaagttgatcttctctcattggattctgtcacaaggtttgctgaagcatggaatgcacgctcagcacccttgcatgttctcatcaataatgctgggattttttctattggagagccacaaaagttttccaaagatggttatgaacagcacttgcaagtgaatcatcttgctcctgccttgctttcgatacttcttttgccatcccttattaggggttctcctagtcgcattgttaatgtgaattccataatgcatcatgttggctttgtagacactgaagatatgaatgtcacatctggaaaaaggaaattttctagtatggtagggtactcaagcagcaagttagcagagattatgtttagtagtactattaataaacgactccctgctgaatctggcatcagtgtattgtgtgtatcacctggaattgttcagaccaatgtggcaagagatcttccaaaacttgttcaagctgcgtatcatttgatcccttacttcatctttagtgctcaagaaggtgcaagaagcgctctctttgctgccactgatcctcaagttccagagtattgtgaaatgttgaaagcagacgagtggcctgtttgtgcctttatttctcaagattgtcgtccagcaaatccatcggaagaagcgcacaacgttcaaacatcgtatgaagtgtgggagaagacattagagatgattggccttccctcagatgctgtggaaaggcttttagatggggaagaagttaaatgccgttatggacaagaacagtaatctaatatacaatatctcccttaatctgtaagggcacttccattatttatagctagtaatgagcattttcattctgaatatgtgggagaagaacccttttatatttttttaaacatgatatgtatatccattttgatcatatttatgtactcaaatgccacctgctcctcctaatgggagaatttagccagctttgaccttaaatgtcaccatagaagtaagaattaaattagtaagcactatttgttatagttgtttttgacttttgatacatgtcatatgtgacccacctaaataagtgaattccaacaatagtgttgctttcaattttggaatataaacatgtatgttatcatgc

SEQ ID NO: 23948 - DNA, 420 bp, Glycine max
  Clone ID: PAT_MRT3847_121626C.1
ttctttcgtccgaagaaatgtccctttttgtcggttttcgttctttggtctctcgtggtccgtccaatgtcggtgttgttcagcttcgtttcagaagacgcacagtttcgccgcctccgtgggtcccgcgtaagttaaaccccattcatgaccagctttataagccggatcgggcactgatcgagcaggacttgagcagcgattcttttgtgcattcacgcaaattgtctctctccccctacgaaacattccatttgattcccggcgtttcgaatccgccggactgtacccaaaatcaatattcgtttgaagcttccaaacgaattggtctgattggtcgcaaaattggcatgactctgcaatggctcaaagatggcactcgctgtctttgtactctcatccacgtgcccgtcaatcatg

SEQ ID NO: 23949 - DNA, 298 bp, Glycine max
  unsure (1)..(298): unsure at all n locations
  Clone ID: PAT_MRT3847_121627C.1
ccaagagccgcccnggggggggggggggaaccatctttttttacccccnanggattattcgggcaattaaaaaacacgaggggaaattgaagattctggggaaaggggaagacaatcaaaatcagaacccaaccccggccggggccccgaccccaagctgagcccccggggggggcggctccggcttcctggggttccagaaacaggcccccggcgcgagcttagccggggaccgcttcggctccgacttgcggcgccggggcccaaacgggctcggcccggtaccccggttggaccc

SEQ ID NO: 23950 - DNA, 269 bp, Glycine max
  Clone ID: PAT_MRT3847_121628C.1
ctgatttattttctaattgttgaatcatggcacctaaaatctatctcacgtggcgcaactcgctgtattggacgctacaccctgtttgcgctgtacaacaagcactgtgagtaccagattgcaggtttagtactgacagaggagaaacgccagtgctgacccgacgctttgatcagagggcggagtcgaattggtggcttggactactacaaaatcctgtaatatgcagcactatacgcagatgcagtaatgtacactgcagatgcatc

SEQ ID NO: 23951 - DNA, 382 bp, Glycine max
  Clone ID: PAT_MRT3847_121629C.1
aaaaccgggaactgcaaaaaacaaaatttggtgccaaatccaaactttgggggcttaaaaaaaccttttccacttggtaaaatttttccccttgaaaaaaattcccgaaaaccccccgaaagtccccccccggggttttttggaaaaaactttaaaaagggggtaaaaaatgggggttttaacccatttttttttaaaaaaagcgggggtttttttgggggggccttttaaaaaaaaaaggtttaaaaatcggaaagcctttttaatttttccgggggccagggggggccacccccccttttaggttttttcggccatttgcccctttttttccttgtgggccttcaaaaaagggggggcccgggaattttccaaattccaa

SEQ ID NO: 23952 - DNA, 400 bp, Glycine max
  Clone ID: PAT_MRT3847_12162C.1
gctgcaaaaaaaaaaaagggtaaattgaacatactgcaaaatctataatgctagtatgcagaaataattattaaatagattaaatatatacaacaattaaaacaaattaatgaaatattgtgcatgaaaagcttttaacaacatgtgataacatataaatctccagaaatggacaatgaaaaagtaaattgtattgatgtggaatctgcaaacaaatgtatcaaaactccatgtgattgccaaaacaaatatattatttaaattaaagtaaaagctgttcatggaatacaaaaaaaaaaagctacatgtccttccccgttagtgcaaaacaaaaaaatgagagtgaattatctcttgtcggaattcttataaaaacaaagatttgaaaaaaaattgttga

SEQ ID NO: 23953 - DNA, 281 bp, Glycine max
  unsure (1)..(281): unsure at all n locations
  Clone ID: PAT_MRT3847_121630C.1
cactatttcgagattcatgtcaagggatgccggcgttaagggnccanatacnccnttnggnncntcttnggagcccttaacncntncgaagnannactcagggtggnttcgccnntactctaatngatatcctcagcangtcacttatntctgactatggaggtggttggacaaggtggtcatgcgcacattttatggtggtacgtgatgcatatgtncnnaatggncggaantancnatgcctggnaatganttatttntcaggaaatnatgntatgttg

SEQ ID NO: 23954 - DNA, 761 bp, Glycine max
  unsure (1)..(761): unsure at all n locations
  Clone ID: PAT_MRT3847_121631C.1
cccacgcgtccgaaggccggcctttactcttttagaattttattcacacgactaaaatggacaaatgacgttaggccttagtacacttcggagtttacaattaactagttgtattaaaagcgattaaccaaatgattgattcgagtggtgatatatttggattcccaaaataagtggtttggaattcaaagtgtaactcttgagtgtaaaagatatagtttaaaaaaattcacttttttaagtgtcttcatattctctaaaagaaattactttccataaacaactaaaaataatcattacaatcctatacatactcaacagaataactaactctaaacatctatatgactatagccctaagctggacacgagataatattttgtataaataatattattcataaaacctattttttattataattatttattttcattgagctacatcaaattaagatgtttatggctatgtagctatattaaatatttagaagagagttttactactaataataattttaatcaaatcaaacatgactgtctttaataaaaatatttgtaatttaaaaaaaaaaactaagacatttatttctgatttaataaacttatgcatgattaacattacctagaattggaggtcatattcaaggcctcaagggtaacgtaagatgtaatagaatcagagagaaaaaatacattcatttcatttaggatatttatacacattttttatttatttctttctttctttnctttaaact

SEQ ID NO: 23955 - DNA, 1161 bp, Glycine max
  Clone ID: PAT_MRT3847_121632C.1
aaagccttgtctttcttagcttcaaccaaatgcgatccccttcttaatttctgtaggaaggatatttacttggcctagaggttggtttagatacacagaatctagaattccttggagtgtggtagtgaattgtggtatttaaagatgggggatcactttgagttgctggttgatcgattgcttactgagtccacattagaagctgcacttgaaagcagaaataggtcaatactggctgcatcctctgcggggaatgatgcaaaaattgatctcaatttgatgaagatgggtgtggatgatatcaaatttccagggaaggtggtagaatgcaggatatgtcatgatgatgatgaagattccaatatggagacaccctgctcttgtcgtggtagtttgctcctcgcccaccatttctgtatacaccgatggtgtaatgagaagggagacaccacctgtgagatatgccaccagcaattcaagcctggttatactgctcctccaccactatttcagtttggacgtattccaatgagttttaggggaaattgggagatttcaagaagagacttgaatagtactcatttggttagcatggtccccactgatcagaaccttaccacttctaactatgatcagtattcagcctctgctactggaagtttgatttgctgtcgttcaattgctgtcattttcatggttcttctgattttaagacatacacttccccttgtaatcagtggaaataaggagtattctttcccactctttttgctgaggttatttcggattgcgggagttgttcttcctatatacttcatggttagagcagtggcattaatccagcggcatcggagacaacatcaggagcatcttaatgcctcggccagttcgtctgacgatgaaagcgagcacagcagatttgcagcctcagcctcagcctcatgtcatacgtgtactgtaaaaatacagtagccagtagccacctgaagtaaatgaattatgaaaagctcttgccttgagatgctgcactttgtcttctgattttttatgtatattagatggggacaacttccctgagaacctcgagtttgctaagggatgggaacactgaaattcagatgtgcaacagttgttgtagctctcataagaagaagcattgca

SEQ ID NO: 23956 - DNA, 217 bp, Glycine max
  Clone ID: PAT_MRT3847_121633C.1
gtcttaaggttgtttccataattggaagggaagggttgggtaagaccactcttgcccgtaggactttacaccatcaatgcactgcggttcctgctgctggttttggtcatcatacaacaagaatttttacctttaatttatgatctattgattgagatatggaactgaaagtcaacgtgagaagttgggtgtcttgaaccatgaagtagcctcaacc

SEQ ID NO: 23957 - DNA, 491 bp, Glycine max
  Clone ID: PAT_MRT3847_121634C.1
gaagggagacaccacctgtgagatatgccaccagcaattcaagcctggttatactgctcctccaccactatttcagtttggacgtattccaatgagttttaggggaaattgggagatttcaagaagagacttgaatagtactcatttggttagcatggtccccagtgatcagaaccttaccacttctaactatgatcagtattcagcctctgctactggaagtttgatttgctgtcgttcaattgctgtcattttcatggttcttctgattttaagacatacacttccccttgtaatcagtggaaataaggagtattctttcccactctttttggtacgttttgcataattcaacttataattttagcaagcacatagatcgtactcttacttaccaaggtttaatcaatttaatggagctttgatagctgttgttatttcggattgcgggagttgttcttcctatatacttcatggttagagcagtggca

SEQ ID NO: 23958 - DNA, 1721 bp, Glycine max
  Clone ID: PAT_MRT3847_121635C.1
cagaacggggaatagggttgttggattaggaaaaagggtttttacgtacttgatccgtgggaccacggctgcgagaagacgacgtttagacggtggtgggggcaggaagcgagccagggttttggtttttgtaaggcgaaaacagtgagagcggtgtggtgcttagtgctcacaccaatccaatggggaagtggagaagacggagcaagagaggagaatccagcaacgagatcgatgagcttcttcgccaacagcgcgagattacggaaaggcttcgagatcctcgaggtcttcgcagaggttccttgccgggtcctgctctccccactaacggtgttcgccaacgaccctttattcgccctgttactggagacaggaacgattctgaagatcaacctccttccaagcgtcgactttcatctgccgtcgttaaggtggatgatggggacttgcctgaagatgctgatgcaggacaagaagatggaaagacaaaggatttgactaatgaagctgtcaatgggacagctgcagtggtcggcagaatgatagcaaccctttcaattctccaaagtggatggtctaagagagatatctgcgggagcaatcaaaaaacttcaaaggcttctgacgttcctaatacagatcatgttccaagggtattgcctaagaatgaggatccaagtttggttaataggaacaaaagaatgttgggccagcttttgggaactctcgagaaatttagaaaggaagacatgcaactctcaggaacagaggcatatatgcgaagatctagttccttgcaaagagctgagcaaagggctcgtgaagaaagtgaaaggcttaggaaagaagagcgtgaacagattgctgaaaaacgaaggagagacttgactctcagggctcgtgtggctgctaagacagaagaaaagaaattggagctgctgtttcttcagtggagtgagcatcgtaaaagactaagcaattttataaggactaaagcagagcctccaatctactatttgcctaacaagcccttggatgaagatcctacattacttgagaagcgcaaagaagaggctttcctagaatggaagaatgcaagaagagaggaagtgtccgagtatcagaaacagattggggagcagtatcttgccaatgttgagaaggaattggagagatggcagaatgcaaggaacgcaaggaaagttaacaatgaccagaatttacaggagacaatggacaaagagttggatactcataggctggagcatggtcccaagaaaagaaagatccctgacgaaaacaataatgacgacgatgatgatgtggaagatataaatgtgggagaggatgacatgatggatgatgaattagacgatgattctagtaggaggattgatgaaacaaccaagacggaagcaggtagtgccagttcagatcctgcagctgatgctgataatgcgggagggaagtgatcacccgcaaggacacaattttcaatagttttgagttatttatgtttttgtagtttattccttggtattctaacttttacgtatttggatttatagccttttgtattttctgtatgcaaatgaactttcttcacttattctctttgtattgctgccttgggagaaccagattaatgcacagtatgtttgttgggtttgtgcccccaacgagcaaacttagcatgcatttatttcatttcaatttgc

SEQ ID NO: 23959 - DNA, 343 bp, Glycine max
  Clone ID: PAT_MRT3847_121636C.1
tttttatgctctttctctctccttccgccaaatccaagagtctcgctgatctgctttcccctcatttcgtgcacaataccttgttgggtatctgtgttgctgcaagagatgacaaggattgcgtgattggttggtctgatattgttagcgctaactcttcctgattctgcctcctagacccgataggcactgttgttgtccttcggttcaaagttggtgttttgtccgctggatgtcggcacctttccattctgaaacttgtccggcgcgtggtggatactcctcgtttccgaggaggatgatgcatcgccattcatcccggccttatcgtccggggtccgat

SEQ ID NO: 23960 - DNA, 653 bp, Glycine max
  Clone ID: PAT_MRT3847_121637C.1
ggttgtcggattaggaaaaagggtttttaggtatgtgagccttgggagcgagcgagggttttggtttttgtaaggcaaaagcagtgataccaatggggagcacggcggtggagaagacggaggaagaactccgcaacgagatcgatgagcttcttcgccaacagcgcgagattacggagaggcttcgagatcctcgaggtcttcgcagaggttccttggcgggtcctgctctcccctctaacggtgctcgccaacgaccctttattcgtcctgttactggagacaggaatgattctgaagatcaacctcctgctaaacgtcgactttcatctgctgtcgttaaggtggatgatggggagttgcctgaagatgctggtgcaggacaggatgggaagacaaaggattcagcgaacgaagctgtcaatgggactgctgcagtggtccagaatgatagcaaccctttcaattctcaccaaactgtatggtctaagagagataacaatcaaagaacttcaaaggcttctgacattcctactacggaacatgttccaagggtattgccaaagaacgaggatccaagtttggttaataggaacaaaagaatgttgggccagcttttgggactctcgagaaatcagaaggggagacagcac

SEQ ID NO: 23961 - DNA, 534 bp, Glycine max
  Clone ID: PAT_MRT3847_121638C.1
ggaggttgggcgccctctccctcctccgaattgccagggtctccatggctcggccacaaacgccccggactttccggactccccatgccccggctccctggtcggtgaccgggtctagggccccgtgcgcacactaccgccccagccccggctgccggttcatccaccgtgccggcggctgcatagggatcttgggcacacaaacgtccaagacacagctgaaggaaaaaccagggaggaggcaacaagaaaggtaactgtaaggagtgcttattttcagcacaagcaagtggaaaagaatgtttatggcgaaaaacaagattgcctgtcatctggcattgccattgatgagagaaaaaatgccttatctgaataggcggccttttttataaatttgtatgtcactgaataagtgtatgcccccatgttttgtattctcatttattaatatcaattgaagaatagaaacgtttattggtatgaaattagcatatcgccgtattatgttataaaattatagtatttgtttttgcc

SEQ ID NO: 23962 - DNA, 279 bp, Glycine max
  Clone ID: PAT_MRT3847_121639C.1
ggctcgagagcgcagtgcgggaactttcatttataaactaccagctgtctaactcgcaaggagacaagagtgggcagaaggggcacctctcactggctaccgaggcatccgaaggggggccaggcgggcgtatggtggagcctggaaagacacgtgtgggcatcattaaacctcgccacagatctcaaaagttcaagattggagttggaagacactggaaggcaaaatggcccaagaaaaaaaaatatgaacaactgaaggagtgaacaatgggcaccc

SEQ ID NO: 23963 - DNA, 375 bp, Glycine max
  Clone ID: PAT_MRT3847_12163C.1
caggagggggtacctcaatatactaacatcagaaacatagctgcgggctcatgcatttgaagcctctttaggccgatacataaagcttatcatacattttcctagaatcctactataaaacttcaaactcggataccaggacaaggaaaaacgccaaaaagttagactaattgctaccacaacattgcttttccaccatttgttttatcgccgcttgccttatatccacatcccaggggaaattcaaaactccggtggctagactgcaagaaaaaaacgcgggcctgaaacatggaagtgaagactttgaaaatttagccggtgaatgttcgacccaagtggaaattggcggggatcaggctccaggaggggggg

SEQ ID NO: 23964 - DNA, 136 bp, Glycine max
  unsure (1)..(136): unsure at all n locations
  Clone ID: PAT_MRT3847_121640C.1
taacaataaagtaaggaacttaacacgnnnnngctgttaccttaaagaataaaatgcaaatagaataatcactggggggtatcaaaataaattccttggaatccttgcacctttcgttttaagtgcccgggagaaa

SEQ ID NO: 23965 - DNA, 577 bp, Glycine max
  Clone ID: PAT_MRT3847_121641C.1
cctctctctccttttgctgccattcatggtctaacctttcctgttttcctctgtcctctgacaccactttaccatctttatccaattggacaggttccttgcttttagccactttcgtattctctctctccctaaccccctttgcatgcctaaatttagcttcagctctatccatagcctctttcatagctgcagcagctgagttcatctctaattctttgtcggcaagaccatttacaccttcatcgtcattatcacgactctttcccatggcaaaatcttcaagttcatcaaactgagatgcagaagaaaacttggctgcagcaggagcagatttaggaccctgagaaaattgagtggaacttggaaaataagaaaaatcattatccttctttctgacattggcagaagctgatgaacctgctcctgacttgaggatatgtactggtcgaggaggaggtggtcttgaaagtggtggagcagcagttggctgagtgaaaagaggaatctctgataccatcaaccatatatcatcatttgattccaacttttcttcatattttggagacatatcttc

SEQ ID NO: 23966 - DNA, 240 bp, Glycine max
  Clone ID: PAT_MRT3847_121642C.1
attgaatgggctgaaaataccaccaactggggaaatgacccccttatcccgaggggtgaatgctcaccacatgaacaaagtcctccctccacagatgctaacccaaatcggagccatgggtgggtaacaaagcttgatgaacaaaatggaatctcctaaacaaatcatgggaatgtttggcgggggtgataatcacatcgcctgtggcatatgacctgaggattgtttttaatcgccact

SEQ ID NO: 23967 - DNA, 932 bp, Glycine max
  Clone ID: PAT_MRT3847_121643C.1
tcgcggacgcgtgggcggacgcgtgggtgagcacattgcaatggttaagggtgacattggggatggacatgatgttcttgtaagggtacactcagagtgtctcactggagacatatttggctctgccagatgtgactgtggaaatcagcttgctcttgcaatgcaacagattgaggctgctggtcgaggtgtattggtatatcttcgtggacatgaaggaaggggcattggcttgggccacaagctacgtgcctataacctacaggatgatggacgggacaccgtagaagccaatgaggagttgggattgcctgtcgactcaagggaatatggaatcggtgcacagattttgagggacttgggtgttcgatctatgaagctaatgacgaacaatccagcaaaatatgttgggctcaaaggttatggtttgacaatttccggtaggatcccattggtatcacttatcacaaaagagaacaagcgatacttggagaccaaacgtgtgaaaatgggtcacgtatatggctcggaatttaacagcaaattgaactatcaagacagtggcaatggtaaagtcaatagtgatgatgattctaatgctgctcctggcttataaagctgcttctcttctgccagatacacaattttatgtcacaaacagcaaagaggaagtgtagatttcggtgctgcagatggatttatacaaagagaatcaggatgctactcgtgatttaatttttctaattcatttgcctgatttttcttctggcaggctctattaattaggcttcctcaaacatttgtcactctgaaattttatcgagtgccatgtaatgtatatcatagatgatagatgaggacattgcctggacaaatttgactttcttatttttctttttgtattcatgatatataaaggtgatattccacat

SEQ ID NO: 23968 - DNA, 275 bp, Glycine max
  unsure (1)..(275): unsure at all n locations
  Clone ID: PAT_MRT3847_121644C.1
gncatgngagcatcaacgtaattcgatgatggnggcgatgggttntctngcaaaactcatnattgttcactgatgaaaccanaacataaacnnntactccttgcctccctnctccacccgacactttcgnnncgctaccaatcttgtcccctgcatggcccaaacnccaacttntntngatgcagagcaccncgnagccgccgaccagcacgtgggtttncggncggngctgancggagantnttgggcggaggggcgtnggcccactgggccaa

SEQ ID NO: 23969 - DNA, 1710 bp, Glycine max
  Clone ID: PAT_MRT3847_121645C.1
aaaaattgtatctattgctgacttaataagatatagaagaaaaagagataagttagtggatcgccggacgcgtgggctaatagagcgtgctggtgctgcactaataccaacaatgtgggggccatttgtagctaacctctataggtcacttttagatgggattgagcatattgctatggttaagggtgacattggggatggacatgatgttcttgtaagggtacactcagagtgtctcacgggagacatatttggctctgccagatgtgactgtggaaatcagcttgctcttgcaatgcaacagattgaggctgctggtagaggtgttttggtatatcttcgtggacatgaaggaaggggcattggcttgggccacaagctacgagacttataacctacaggatgatggacgggacaccgttgaagccaatgaggagttgggattgccagttgactcgagggagtatggaattggtgcacagattttgagggacttgggtgttcgatctatgaagctaatgacaaacaatccggcaaaatatattgggctcaaaggttatggtttgacagtttcgggtaggatcccattgttaactcttatcacttaggagaacaagagatatttagagaccaaacgtgtgaaaatgggtcacatatatggcacggaatttaacggccgattgagcactcatgacagtggtaatggtaatgccaccaggattgaggactctaatgctgttactggcttataaacatcctttttttaactagataacatggaagaactagatttccatggtgcagatgaatacataaagttataaagttatagaaaccatttttcttattcatttgtctgataaacttcagctctactaaactataggctctaccaatcgccaatcatctcgccatgggaaacatcggcccattgcacgctcatgacagtggtaatgataatgccacctgggttgatgactctagttcagcttctcgtttctctgcatcccttttataactagatacctgggtcggacacatatgaagaactagatttccatactgctgatgaatacacaaagttatagattatagaaaccattattctatttgtgatttgatttttcttattcatttgcctgataatcttcaggcaggccacgcgtccgcccacgcgtccgcccacgcgtccgggcgcacagatgttgagagacttgggtgtacgatctatgaagctgatgacaaacaatccagcaaaatatattgggctcaaaggttatggtttgacagtttcgggtaggatcccattgttaactcttatcacttcggagaacaagagatatttagagaccaaacgtgtgaaaatgggtcacatatacgccatggaatttaacggccaattgagcactcatgacagtggcaggcaggctctaccaaaaatgttcatcttgattcttgaaacatagtgccatgacaagggcattgctatttcagggttattttttctttggtgccttttagaggttcatcatttctggactctggaagtcattggccctagtttcttcattctttttggtacatttactcatgtatcacagttcctctataatgtccatgatagaaaagttatgatttgtagctctactgtgtattataaataaattccttttgtcccttgtcatatataatggttatattccaatttcc

SEQ ID NO: 23970 - DNA, 611 bp, Glycine max
  Clone ID: PAT_MRT3847_121646C.1
ggttttccggagctggggaccgtaacccaggccttgcgtctcgctaggcaagcgctctaccgctgagctaaatccccaacccctttcccaaatgaaaaaaagtgacagtttcccctctgctcggggtttaaagcaccattcaagcccagcccacattgtatccagcagtgcaaccttacccaagtacaggagagaggttttctaccaaacatcacaatgacctcatagcacgcgcaagaccatgcgccctaggcgcagggagagattcgaaaggctaaataatcaatccctgtagacttccggccaattccagaaattctagacatgttccgaaggcatggctcacacattaaattcctgccttgaaataactcatatatcacgccttagatcacacattaattacctgtgaagcataaggcatgactcccacattaaattcttccaaatagaagcagactgcccccccccccgcccccagctaaggacccaaggccttgcgctgggtggtcaatcgctctaaagagcaatatcccccgcctgcattagaatttttttttcccccctggggctgggagatcgacccaggccttgcgctctaccgctgagct

SEQ ID NO: 23971 - DNA, 479 bp, Glycine max
  unsure (1)..(479): unsure at all n locations
  Clone ID: PAT_MRT3847_121647C.1
agtgtcttcattcataccacttctagactagactcggtactccttgctcagaagtaaaacagactcaacaaagcaataacagcacaaacaaacgctctttgcacagagaagatcccaaattcgcaacaatctcactctctttactggccatggaggatcctccgttgcagaagatcgcgatttcgggccccacactcgcctccctcatccagcgcttctccacctccccctcttccatccacggcctcctcttcggccacgtcacccctctccctctcaccctctccgacgacgacacttcctccgctgccacccccacccccaccctcctcgccaccgtcaccggcttcctcacctccccctccttccacgattcctccggcaccgtcctcccctcctccctccccaattcccccctcctaggctggntctgcggccgccgccgctcccgcctccgtccctccatgcgccatttctcc

SEQ ID NO: 23972 - DNA, 455 bp, Glycine max
  Clone ID: PAT_MRT3847_121648C.1
tttttgataggggaatttttttgatatttcattcagtgggggaaaaatacaaacaaaataatgggagaaaagaaggaagcaataaatctttcactaaaatcatctgtcttcttcggttcttcccacccaccactgtcctcattcctccttggtttttaaggaggaaacatctaataagtaataagtataacaatgtggaagtttaactttgcagaatctggtatcagcaaaaagaaagtgaaaaagaaaaagaataataacttagtaaatggaaaatattttcctgctctctacaaaaaaatgatctactgggaaattttattatctaactttcacatgttaatggggcatggccttccatgcggcaactaagtgcccacaaagctgactatgttcgttccttcagaggatgtgacccatctaatacagggaaagtatgaaccttattatcaatt

SEQ ID NO: 23973 - DNA, 280 bp, Glycine max
  unsure (1)..(280): unsure at all n locations
  Clone ID: PAT_MRT3847_121649C.1
tctccatacatcaacttgggaggttaaagagacggcaacgttgtgctgtccgccttgaccgagccagagcttcgtcttggccctcgattttgccctgtaaaactaatcccagtcacaacagaaataatcaatggcaccgaaacagaccaaggctgagaagaagatcgcttacgatgcgaantgcattgcttgccaagctaggcataaggcccttctcatatgggcttgtggttctctctgtttatgataatggttcagtgttcagccctgaggttcttga

SEQ ID NO: 23974 - DNA, 428 bp, Glycine max
  unsure (1)..(428): unsure at all n locations
  Clone ID: PAT_MRT3847_12164C.1
attgccaaaacaaataaattatctgtacatgtatgagtacgaacacccctgatacatttggtatttagcatgctcaacaaatggtggaacgacctcttaattgaaatgtatgttagcgtttacgtcctctcacatacacatttaccttatatccactgagaatcttagtgcagtattcgcctcagaaggaagagcacaactatttgaagacagaggtcctagcatctcaccagccgactaaattgtcacaacagtaacatccaatttgctcaagaaaaccacatgaaatcatggttagcttaaattcgcaccctgngaatcattcattaagttcttgtatgtgttgagagcgactntttcctggtggaataaaaatcaaatcctcccatcctgaattcctttcactcatctccatttttctcagtaca

SEQ ID NO: 23975 - DNA, 324 bp, Glycine max
  Clone ID: PAT_MRT3847_121650C.1
gctgaattaaatttccttaatgtaatattactcttcatcaagggagatctcaggttaaataatatcattacaacttgagtttttaatcatgctgaatggtgtcatgtgattcatgtagcgattgtagccaacatcatatagttggataagactttgttgttataatgtaatattactctaattatataatagtcataaatgccaataacctctatgttccatttttcttacacaggagagtgttggttttatattttaaaaaatttgtgggggctttttacggggccaaaccttatttctttttttttatacattttgtttttt

SEQ ID NO: 23976 - DNA, 1370 bp, Glycine max
  Clone ID: PAT_MRT3847_121651C.1
cgacagaagggggcttcttcgtttgctacctaaaccctagtctccatacatcaacttgggaggttaaagagacggcaacgttgtgctgtccgccttgaccgagccagagcttcgtcttggccctcgattttgccctgtaaaactaatcccagtcacaacagaaataatcaatggcaccgaaacagaccaaggctgagaagaagatcgcttacgatgcgaagctgtgcgacctaatggaggagtacggccaaatcctcgttgtaaactccgacaacgtgggatcgaaccagctccagaacattcgcaagggtctccgcggcgactctgttgtcctcatggggaagaacaccatgatgaagcgctctgtcaggatgcacgctgagaaaaccggaaacaatgcctatctcaaccttatccccctccttgtcggcaatgtgggattgattttcaccaagggtgacctgaaggaggtcagtgaggaggttgctaagtacaaggttggagctcctgctcgtgttggtttggttgctccaattgatgtcgttgttcctcctggcaacacagggctcgatccctctcagacctctttcttccaggtgcttaacattcctaccaagattaacaagggtactgtggaaatcattacacctgtggaactcattaggaagggagacaaggttggatcttctgaagctgcattgcttgccaagctaggcataaggcccttctcatatgggcttgtggttctctctgtttatgataatggttcagtgttcagccctgaggttcttgatcttactgaggatgacctcattgggaagtttgctgctggtgtctcaatggttacttcactttcattggctatttcatatccaacacttgctgcagcaccacacatgtttgtcaatgcctacaagaatgttcttgctgttgcggttgagacagattattctttcccggaggcagacaaggtcaaggagtatctgaaggacccaagtaaatttgccgttgccgccgttgctgctcctgctgctgcatctggtgctccagcggctgcagccaaggaggaggaaaagaaggaagaaccagctgaagagtctgacgatgacatgggtttcagtctgtttgactaaattaagtaatacttttgttgagtttgctttgttagaattaatgaagttgtttgtctttcattttaggtgctattttagtttgctgtcttttcaattcatgttacattgcaactagtttttaaatcccatagttaattaaagctttaacatttttgtctcttatggttttaaatcaagatacctattgtcttctctgtgaagatgggaaaagtgatgatatgataaaataatggcatt

SEQ ID NO: 23977 - DNA, 1493 bp, Glycine max
  Clone ID: PAT_MRT3847_121652C.1
acggctgcgagaagacgacagaaggggatttcgcttcttttcctaacctaaaccctactcattctccatacctcaacgaagaggttaaagagacggcaacactttgctgtccgccttgaccgagcagagcttcgtcttggccctcgattttgccctaaagtactctcagtcacaacagacaccgtcgtcgtcgtcgtcatcatcaatggcaccgaagcagaccaaggctgagaagaagatcgcttacgatgcgaagctgtgcgacctaatggaggagtacggccagatcctcgttgtgaactccgataacgtgggatcgaaccagctccagaacattcgcaagggtctccgtggcgactccgtcgtcctcatggggaagaacaccatgatgaagcgctcagtcaggatgcacgctgagaaaaccggaaacaacgcctatctcaaccttatcccgctccttgttggcaatgtgggattgattttcaccaaaggtgacctgaaggaggtcagtgaggaggttgccaagtacaaggttggagctcctgctcgtgttggtttggttgccccaattgatgttgttgttcctcctggcaacacagggctcgatccctcccagacctctttcttccaggtgctcaacattcctaccaagattaacaagggtactgttgaaatcattacccctgtggagctcattaagaagggagacaaggttggatcttctgaagctgcattgcttgccaagctagggataaggcccttctcgtatgggcttgtggttctttctgtttatgataatggttcagtgttcagtcctgaggttcttgatcttactgaggatgaccttattgagaagtttgctgctggtgtctcaatggttacttcactttcattagctatctcatacccaacacttgctgctgcaccacacatgtttgtcaatgcctacaagaatgttcttgctgttccggttgagacagattattctttccctgaggcagacaaggtcaaggagtatctgaaggatccaagtaaatttgctgtcgctgctgttgctgctcctgctgctgagtctggtgctcctgctgcagccaaggaagaggaaaagaaggaagaaccagctgaagaatctgatgatgacatgggtttcagtctgtttgactaatttatgtaatgcttttgttgagtttatttggttagaattgaagttgtgtttgcctttcatttcaggtgttattttagtgtattcatgttacattgcaactacttttaatttccatagttaattaaagcttcaacgtttctgtctcttgtggttttaaattgtgatacctgataaatttacaattccccatctttgtgaagatggcaggagtgatgataagatgcctaatagcattaaacttcaacctcaaatgtcttgaagcaagcaatgttgctctagctttcgcgattacttcccgctatgaaatgagatctctaacaatgcctcg

SEQ ID NO: 23978 - DNA, 454 bp, Glycine max
  Clone ID: PAT_MRT3847_121653C.1
acgagagacggggtaggaagaggtatattaatgtaaactcatgtttttgtctctatccaaagttgtgctcaggctccagagcacttggcttgttgcatgatgccctgctatgggtgaccataccttgagcattcaattgttttaggtaattcccagggtatggtaaatatttttattttatatttttgagagctggaaggtaaaagtatagattctggtttattcccatcttcgtcaggggctagttataatagcattattgcatcttgaaacaccatttttgtgaggggtgtatggtactttgatatgtggttccgttacatatatagggaactaaggacgaacgtgcagttgcaaatcttactgtaaataattgaaatttgatggcttattttcatggtctgagatttgttgaacattttttcaagtgcatatatatgttgtaagtcattgc

SEQ ID NO: 23979 - DNA, 295 bp, Glycine max
  Clone ID: PAT_MRT3847_121654C.1
catgggggacacgagatcactactcgcatctgggatggggtgatccgcgttagggctgatacgagaggtgccagacagttgcctgtgaggaaggatcgcaagtggatgtctaaccagttggcgctgatgcgagggctctgagctactgcaggacacgatttcgggcaccctacgtggccggcccttgtagccataacggttcagggttttgggacaggaatcgtctgagagtgaacgctaattgcattggacgctagtgattgaggtacctctgtccacttgaaaaggctactgt

SEQ ID NO: 23980 - DNA, 613 bp, Glycine max
  Clone ID: PAT_MRT3847_121655C.1
acgacccacgcgtccgcaagtcaactgtctgaaaattcccactggattctctatctcatagttttcttatggtaagaaaaaaaaaaagaccatttcacaatctgaagcataattgtaacacataatcagattctgcagaatgaaggttgaaattgaaggcagccacagtgattatgctgaatctgtttccagccaaccagaaaatagaggaagattggaatccaagaagaaactgaagaaagtgaggtcaataaggcttgtaagattgccaagcaagagatcatccaccagaggagggagaccccaatatgaccctctttccattgatacaaaaagtttagaggggccaacaccaattgaaatggcagatgcatcacctaattacatgaaggctaccagcagttctcatgcaaaggatagttttcagaatacagaaagaatactattcacaaagaagactttgacaagaatgtctactgctttgaaactgaagagaagtctgactagaaagatatctggaaggactgaaccaaagaggaaaactgagtcctcaaagatcagtcagtttgcagctgtcaagggccaaaatcacccagaagttttatgaatctag

SEQ ID NO: 23981 - DNA, 347 bp, Glycine max
  unsure (1)..(347): unsure at all n locations
  Clone ID: PAT_MRT3847_121656C.1
tggcttggaacctttgggctgattttgtgcttgnagaagatgatagaagggggttataagtcatacatataagaacggtctgtatatccgctctagcgaccctgccacccccccccattcccgtagctacggccggcgcctcacctctaaccggcgcgaacagtagccagactcgcttcggaaaccgtgaaaaccccctaaatcgtaacgtccatcgttaggtttatcactacaagaaagggacacgtactagcttattcaactcagggcataccngacgccgtcctctacgagcccctcctacacaaccacaagtaagtaacgcaccgcccacaacaaccaccagt

SEQ ID NO: 23982 - DNA, 474 bp, Glycine max
  unsure (1)..(474): unsure at all n locations
  Clone ID: PAT_MRT3847_121657C.1
gcacgagagtgtgtgcagtcccggattcgccaacattgggctgctgttaagattcaagccgcttttcgtggctgtttggcaaggagagcactgcgagcattaaagggattggtgaagttgcaagcattggtgagaggccacattgagagaaaacggacggcagagtggctgaaaagattgcaagcactcttacatgcacagacccaagtttctgcagggttgaccctgcatgcctcaccttcgagttcaaagttatcaagccacctccaaggtccagaaacacccgaaaaatttgaaagccccattagatctaagagcatgaaacatgagcactcacctatactcaagagaaatggctccaaatcctgtgccctgatcaatggctatcaagagatatgtgggagtagatcagagagtcaagggaatgaacaattatggaactcangaagatcaatgaatagagcacacggctcc

SEQ ID NO: 23983 - DNA, 325 bp, Glycine max
  Clone ID: PAT_MRT3847_121658C.1
cggttcatatctgtctgtactctgctagctatcaattctgtggagtgtagacatcgcatagacatttctatttacctaatagtcagtgaactagctacaccctgacaagctctgtgaccaaatctctgatgctgttctctacacttgactataacatgacccagacagcaactgtgcctgcgaaacatgcaccaaaaccaacttcgtcatggtcttctgacaaattaccaccaaagtcaatgttcgactacgagaagatagtgcgtgacacctgcaataacatcggcattgtctcaaactatatttgactgtattccaacaactg

SEQ ID NO: 23984 - DNA, 149 bp, Glycine max
  unsure (1)..(149): unsure at all n locations
  Clone ID: PAT_MRT3847_121659C.1
agggcttttttcaatttctatgcagtgccaccctntctctgctgctntctgctctcctgcgcgaagtgtttnctntcctctagatcaatcgtaccatcaactgaattgcttcttcttcctgcttctcctgcttccgttttcgttcgcgt

SEQ ID NO: 23985 - DNA, 424 bp, Glycine max
  Clone ID: PAT_MRT3847_12165C.1
ctataagcaatagtaaggatttatattggaggttcagctcatgaacgtaaatgagggaacattaattaaacaatgaacttttctttatgacttgactctatgtctgaagctttaatacattggtgccacacattaaatgatgcctacctgtgccaacatttgagtgagcatcatactatgcctgacaacaaacagaattatctatacctattttaacgctcccctactggtttgtttggaaaaccttggtttcaaaaaatgctccataactcgtgccctccttccagatcaactgtataatactacactagcatttcagtgaaaataatcttgctaataatgctgacagaccctctaagctcgctgttagtttacgaggtcacgcccacagtcttttgtttacaggaaaggaagactacactat

SEQ ID NO: 23986 - DNA, 483 bp, Glycine max
  Clone ID: PAT_MRT3847_121660C.1
gaaaaaagccttgatgaagagtccagaattgaaaaaagtaatgagtctattagcatgctgtggggaagagatggaaaattcacattttctgatcttgttaaggccaccaatggcttcaatgacatgtactgcattggaaaaggagcattcggaagtgtttatagagcacaagtactcacagaccaagttgttgctgttaaaaggctcaacatatcatactctgatgacattccagcagtgaatcgccagagctttcagaatgagatagaatcacttactgaagtgaggcaccacaatataataaagttttatgggtcctgttcttgcaggggacaaatgttcttggtttatgaacatgtacacagaggaagtttggggaaagtattgtatggagaggaaggagaatcggagctaagttgggccacactgctagaaactgtgcagggtatagcgcatgctaatttatacctgctctgtgactgc

SEQ ID NO: 23987 - DNA, 716 bp, Glycine max
  unsure (1)..(716): unsure at all n locations
  Clone ID: PAT_MRT3847_121661C.1
tatcaatntgtggagataatntgaatctgagtatgtggattggtganaatgagagtcaattcaagcatgtgggagaggatgttgaatctgaacatgcttcactcagttctattgttgacaatgatgatgtaaatgctgaagacatcattaccggagtttctggtgtatctccaaactgttaccagggaacacatgatggaccctttgttgctgactcttctcttggttttgtgcctaatgctattaattctcaattgtggccatatgaagaaatgatgaataacattaaggctgaaaatgtggagttaaatgctgatattgcatatatgagtaatggcatgccttcaagcactactgggtggatgccttttcaggatagtcaacttatgttagctgataatggttatccatcatttcattctggtaattttgatgacatgtcatcactgtctctttcagcttgtgcttcatacatgtcatatggagaccattaccagaacaattttcaccgtgatgatgccgagttcaatgtaggccaagaggtgaaacaaacacctggtattttttcttctgaagggtgtcaagcttaccagtgttttcagaatgaggataattatgcagttatatctgggatatccaatcaatatcaagatagcattggcagaactgctagtttttaaggatactttgtcaatttgcatctaaatgctgtacat

SEQ ID NO: 23988 - DNA, 341 bp, Glycine max
  unsure (1)..(341): unsure at all n locations
  Clone ID: PAT_MRT3847_121662C.1
actccagcttttcttatagatctttataaaaaaagatccactaangtcttaagaaatctctcttacattgaaaaagacccntcctctccnntcatcnttcttaattctatatctattaccttcaataaacccttacttcttaaaatcattcttttattatataaattttcaacacatactcttcctctttcatcttactatttattatctactcattatatctcacttactttattttcatcttccccttaattatcttcttcctccctcaaccttacttcaactcaccaataaactttcatacctttctactcaaatcctccattttttttttattcctt

SEQ ID NO: 23989 - DNA, 256 bp, Glycine max
  unsure (1)..(256): unsure at all n locations
  Clone ID: PAT_MRT3847_121663C.1
ccgcctcgaggnnncggccgggcccggctccgtaccaactagagaactagcaaaaatgcgcgcctagctggaggaagaagcgtatgcgccgcctcaagcgcaagcgcagaaagatgaggcagcgcagcaagtaaaccgtccctccgcttctgcggcctgagtctatgggctgcttttgtttctgacgagagtcactagcagcaagcagcactctttggcctggcggagcagcttgctctgagattatggggcgaga

SEQ ID NO: 23990 - DNA, 497 bp, Glycine max
  Clone ID: PAT_MRT3847_121664C.1
ggctcgagcggctcgagaccaccacctctctgctacccctttcaagcaatcatccaaataaattgaccccttttgtcaaaaaggaggggtgttggttatatacttatatttaactgacaagattgtacaataataataagttcatctgaccaaagttcacccaaacacttcagttagcaaaacaaccatgcattgaagcctctcaacaagttccaataatgagagaacaaggggcctttcatcttgaggaacatggccagacagagaggtcccagtgggtgcttgattctcccaaccctccccctctctggaagaagctatttagttctgtcaaagaaaccattttgcctcatggcaacaagttctgcttctcatccaagaggaaaactatccatgggcatgcactcctcatgtctgaagaatttgttcccaatcattagttggttgacagattacaaagcctccatgttcaaagatgacctcttggctggtttaac

SEQ ID NO: 23991 - DNA, 456 bp, Glycine max
  Clone ID: PAT_MRT3847_121665C.1
ggggcccgcaaaaagtcaatttttttccaaagggaaaaactgacccctgaacattaaaccagtatggcgggggaaacacctttttttttgaatactaaaaaaccctcggggggctggaaatgataaatccaggggcaataattggggggaaactaaaacatcctttatccacttgggattggacattttcaagctttccctctttaaacataggggggaacaaacccccctcgggggaaaaagatgccaagaaatattttggcaaattcaaaagtagattttttgttcctcgaactcatgcttgggatcaaaaagggagttggcagccaattccttttttttgttgcaggggaagtacacctccaatacgatggcccgatcaaaaccctttgtttaaagacgttcaattgtttggccctcctaaggggggacagttactgtttggggctttccaaa

SEQ ID NO: 23992 - DNA, 1069 bp, Glycine max
  Clone ID: PAT_MRT3847_121666C.1
caaccattgaactttgatatatatgatgacctaagaagcgagctactggatggcaaattattctcccctgtacttgcacatattcaaccagaatcccattatcaagcaaacatcgaatcagatggtcgatatgggcttcaatatggtacaaatgagacaaacatgtcagactttttgaattcagttgttaactgggatcaagtaccctttgaggatcccaattgtcaacagcagagctaccccttgtttaatgttaaggataacatattaaacagcgacttagattctgaacttgccaatatgacagtgagtaacagctcttacactattttatcttttaatctttctaggtaggttctgcctcgatagtaaaacatagtagttcccaactcccggtgtcagctctaacaatctaacatggttttcttgtgtctcctgtataatgatagtcttattgtatgctgcagtgtatgcaagctggttatgcagagggggcaattgacggaaggattcctttgttgataacttcagaattttgcagcaccactggcatccccgttgactgtgttggtgacgagcagaaaagcaatgttgggttatttcaaaacaattcccagagagcttttactgatgttaatatgggtcaagtatacaatgtagttgatgattatgagcaacaaagaatctgtagtgcagttgctagtggcaatactggaatcataaggaggcatcgtgaggtacgaaatgaacagctaagcataaactcaacacaaggtactgcacagaggagaattcgtttgtcaatggctacacatggctcaaataagacggtgaaaagtgaaagttgtgcacaagaagagctttatgcaaaatccgtcattgctatgggggagaaagcttcagaaagccatacttctgatgaaagtgctactcttactaatgacgggaatgaactgccgaagacatccaaatcatccggcaaaagaaagatttctcgacatgctacaaaagcaggctcaaccttggggttgaaagactctttattgctcagaagggtgccttacatttc

SEQ ID NO: 23993 - DNA, 2563 bp, Glycine max
  Clone ID: PAT_MRT3847_121667C.1
gcacgcccctgataaaaaaaaaagcaaacttttctctttctctcttcttcatgctcgagtgcttggtctcgctcctttacaaaaaaagctatggaccacaacatctaatctaatctaaacaaacaaacaaacactcctcttaattattcttttgattctcaaattcttcttcggtttttttccctttctttttggtttcattgagtatgggttcggtggactgttatccttctcgtacggacgatgctgccgtggtgtctttggattcgctgcctttagggttccgattccgacccaccgacgaggaactcgtcaattactacctgcgacagaagatcaatggtaatggtcgctaggtttgggttatccgagaaattgatttctgcaaatgagagacttgggatatgctcggtttgtcggtggtacagaccaaggatccggaatggttctttttctgtccacaggaccggaagtatccaaatgggcatcgattgaacagagcgacaaataatgggtattggaaggcaacggggaaggatcgtagaatcaagtctgggaaggatttaattggaatgaagaagactttggtgttctacactggtcgtgcacccaaagggaataggaccaattgggttatgcacgagtatcgtcccactttgaaggagcttgatggtactaatcctggacagaatccatatgtcctttgtcgtttgtttaagaaacatgatgagagccttgaagtttcacactgtgatgaagcagagcagactgcttccactcctgtggcttactccacagaggaaatacaatctgatctggctgttgttgcaggatccccctcacaagttaccgaagatgataagcaccaggcaatgatccctgcacactctgaggaagcaatatccaatgttgtaaccccggttgtttgccgtagtgacagatatgatgcttgtcatgcaccaaatcaaattgtattaccaactgcggaggagtttcaaccattgaactattatgacccaagaaacgagctattggatgataaattattctcccctgtacttgcacatattcaaccagaatttcattatcaagcaaacatcgaatcagatgattggtatgggcttcaatatggtacaaatgagacaaacatgtcagactttttgaattcagttgtgaattgggatcaagtatcctttgaggatctcaattgtcaacagcagagctaccccttgtttaatgttaaggatagcatattaagcagcgatctagattctgaacttgccaatatgacatgtatgcaagctggttatgcggagggggcaattgacggaaggaaacctttggtgataacttcagaattttgcagcaccactggcatccccgttgactgtgttggtgacgagcagaaaagcaatgttgggttatttcaaaacaattcccagagagcttttactgatgttaatataggtcaagtatacaatgtagtcgatgattatgagcaacgaggaatctgcagtgcagttgctagtggcaatactggaatcataaggaggcatcgtgaggtacaaaatgaacagctaagctcaaactcaacacaaggtactgcacagagaagaattcgtttgtcaatggctacacatggctcaaataagatggtgaaaagtggaagttgtgcacaagaagagcttaatttaaaatccgtcattgctatggtaagaattttgtttttttagcttctgtccaagagaagagattgtctttgcatgcgaaatgaggtttgtttttcttttgtaggaggagaaagcttcagaaagccatatttctgatgaaagttctactcttactaatgacgggaatgaactgccgaagacatccaaatcatccggcaaaagaaagatttctcgacaagctacaaaagcaggctcaaccttggggttgaaagactttttattgctcagaagggtgccttacatttcgaaggcttcctcaaatcgtgccaagtgctcttctgtttttgtagtttctgcctttgtaatggtcaccttagtggtctttactgacatctggggatatcttaaattttaaactgctaggagatcattcctttgttgttttttttgcctccatttcttttttgggccatgagtggaggtatgtagggtcttcttagatttgttgatagttcaatttataggtgagtgcacttgtagttggtatatgtatgctcacctggttggcttgtctgtttctgttgctgtacatcatgtatacatttttttttccaactttttatcacctccttttaagtttgtggcttctctatttcaaaaaacaaagggtgatagaaagacaaaaataatggctggaaattttgaattacatgcgagtgttttgaattatgtagccttcaatggtaaatttagcgatgctaatgaaatcacttaaaataatggccgggaatactataccatcttgggaatattaactgctaagtgggcgtgcacatttatcgcagctcgctaaaatcacgagcagcgctgccatttggctaatctgtatgtgt

SEQ ID NO: 23994 - DNA, 565 bp, Glycine max
  Clone ID: PAT_MRT3847_121668C.1
ggagggcggaaggtcgttcatcttcttcctcctctaaccttacatttagcctttctttcttttctatgttctctctatctctcattctcatctcactttcttttctttttcttttcttttcccgaatctgaatttttccctacaaaatccactcactgtcctcaaagacagatccgaaagtggatgccaaatctatcacccctcgtcgcccgagattatcgtacccattagattcttcttccctcttccttctacactttcccaaattttcacactattcgcggctatagagcacaatttagtttatctactcactgttactgcgatttttgtcctacccttttcactattttagctatttctccgatgaagaggaaaagtggtttctttgagtgaccccagaatcgcgattgtgcttcgattcgccgagcaatgggtgctttgtagattctagtttttgatcttattttcgctgatcaaaagttttcttttttgttggtttttgaagtattggggggttagtatagcctgattttttaagttgtaaatacaccttcggatctct

SEQ ID NO: 23995 - DNA, 378 bp, Glycine max
  Clone ID: PAT_MRT3847_121669C.1
gcatcttcacatgatctggcccgacatggctttgaaggttgacttactgactttgcaacggcttcttgctctggtctcttgtttgcccttagagtgctgactacacttgaaactgatgacgcgtacgaacgaaacgtggaggcttctgcacaggtttattcaatggtacccgccctgagcaagatgccattccgctcactgcttgatgttggtctttctcagactacaactagaacacgtttctttactgcccttaagggtgctccaggtgggagtttggatatttcttacaccgaccattggttcgctaggtctgatttggacccgaaagggcttgctgctaagggaaagctcatatgtttcttttttcgacatgta

SEQ ID NO: 23996 - DNA, 172 bp, Glycine max
  Clone ID: PAT_MRT3847_12166C.1
aaagggcatggtcgactggtggccacagttggcattcctgagaatacaaggctatcatgggcccgtgcttggaatagttgtcctagggggcgtgccagactctgaaatggacaccatctggtctgaagactgcgaacaactgaatcctgcctgcgcaaaagcacagactgtg

SEQ ID NO: 23997 - DNA, 470 bp, Glycine max
  Clone ID: PAT_MRT3847_121670C.1
tacggctgcgagaagacgacagaagggtactctgatgggtatttggtagcttcatagatatatttgttagatccaatttagattacaaatgaactataccatgatcacctggaaaaaaaatatatatgtccatcttatcaaaaggaacgttagtaataaattctctaacacattaatataatgtagggagatataatgtcttttaaactaagtttctaaagatgatgactagatggaaaaacatctaaaggagaaaatgaaaaactacaatgtaaactagttaagcaagtgtttctagcacattttgtccggtagaaccaaaattgcaaggcatcaaaactttgcatatcaaattcaaaccttgtaagactaaaccctttttcccactcaaaacccttggaactaagataaaaaaagattatgcaagtcaattggtttccttgattctcttttggtaaagacaacaaata

SEQ ID NO: 23998 - DNA, 459 bp, Glycine max
  Clone ID: PAT_MRT3847_121671C.1
cgagcttaatcccgggtttaattccgcgtgcaggcaaattaaaagcttttctaaagggccaccaaaagccaattcatgggccgggttttaagaggggaaaccttgggaaaacccctggtaaaaccctttttaacccccttgcataacaccccttttccccaagggggagtggccgaaaaagggccccaaccaaacgcctttccaaatgtttgcgcaaaaggaagggcaaaggggaccccccttgaaccggccctttaagcggggggtttgggggggttacctttaactttccccctacccttgccccccccttggcgcccgttcttttcttttttttgccttcctttcgcgccatttccggggggttccccaaggggggtttaaatggggggctcccttggggggcccgttggagggcttccccggactttccctcaaaaaagtttgattagggggggg

SEQ ID NO: 23999 - DNA, 2400 bp, Glycine max
  Clone ID: PAT_MRT3847_121672C.1
caatgaattgaatttagcacataacaaattctaggtcctttgcctgacttaactggaatggataccctcaactatgtggatcttagtaacaactcttttgatgcatcggatgctccaacttggttcacaattcttccatcactcaccactcttattatggagtttggatcccttcaaggtactcttccatcaaaactctttgacattcctcaaatacagcaagtgaaactacgaaacaatgcattgaacaatacattggacatgggtgacaacatttgtccccaattgcagcttgtagatttgcaagaaaatgagatttcctcggtgacattccgttcacaatacaaaaatatattgattcttataggaaatccagtgtgcagtggtagtgctctttcaaatacaaattactgccaacttcagcaacaagctaagcaaccctattccactagcttggctaattgtggaggcaaatcttgtcctcctgatcagaagctcagcccccaaagttgtgaatgtgcctatccatatgtaggaacattgtactttagaggaccctcattcagagaactgtccagtgtaaatactttccattcacttgaaatgagcctatgggtgaaattgggtctaactcctggctcagtttctttacaaaaccccttcttcaatagtgatgattatcttcaagtgcaactagcactctttccaccaatagggcaatattttaacaggtcagaagttcaaagacttgggtttgaattgagtaatcaaacttacaagcccccaaaagagtttggaccctactactttattgcatttccttatccttttccaggttcccacaaaggagcttctcttaacaaaggtgttgttattgggatatcgattggctgcataattctggttctaagcctcatagggttagctatatacgcaattctgcaaaagaagcgtgcagagagagccattggattaagtagaccattcgcatcatgggcaccaagtggcaaggatagtggaggtgcaccacaattaaagggagcaagatggttctcttatgatgagcttaaaaagtgctccaacaatttctctgaaagcaatgagataggctttggtggctatggcaaggtgtacaaaggggttttccctgatgggaaaatagttgcaatcaaacgagctcagcaaggatcgatgcaaggaggcgtagagttcaagactgaaattgagttgctttcaagagttcaccacaagaatcttgttggtctcgttggattctgttttgaacaaggggaacaaatgttgatttacgaatttatgcccaatggaacacttagggagagtttgtcagggagatctgagattcatcttgactggaagaggagactccgcattgctcttggttccgccagaggacttgcatacttacatgagcttgccaaccctcccataatccacagagacgtgaagtcgactaatatattgttggatgaaaatttgacagcaaaggttgcagattttggcttgtccaagcttgtatcagacagtgagaaaggacatgtttcaactcaggttaaagggacattgggttatctggatccagagtattatatgacccaacaactcactgagaagagtgatgtgtacagttttggagtagtcatgcttgaactaataacttcaaggcaaccaattgagaagggcaagtacattgtccgcgaggtgcgcatgctgatgaataagaaggatgatgaagaacacaatggtttgagggaactcatggatccagtggtaagaaacacaccaaacctcgtaggatttgggaggttcttagagttggcaatgcaatgtgttggggaatcagctgcagaccgtccaacaatgagtgaagttgtgaaagcacttgaaaccattttgcagaatgatggtatgaacacaaactctacctctgcatcctcttctgccactgactttggagttggtaagggtggaatgaggcatccctacattgatggtactttcactaagaaggacaatgtcaatgatagtagtagtagtgcgtttgactacagtggggggtacacactttcaacaaaagttgaacccaaatagatgctatattatacatatttttgtcacaccattttttttctttttctttttcattcacaaaccaagatagtaacttttttgttttaagtaagctaatgttatgtattctttttacggtcaatagttctatggcatgtaatgtttaggaagaaatgttggtaaggttatctcacatttccagcatttgttagtctaatgatgctgattttaattttagttaatatttcatttaaaataacattcatatgaatcatatctacaaataaaaagtgggttcatggaacctataat

SEQ ID NO: 24000 - DNA, 248 bp, Glycine max
  unsure (1)..(248): unsure at all n locations
  Clone ID: PAT_MRT3847_121673C.1
nactcgtgcggtttttcgacaggacctgcacagaaggagaatatggaggaggaaaaagaggaccctaggcaaggggatcacccccgggtagtcagcactcatgacacagggtgcctctacaaatcgacaaaagcgttgcgctagatcttgcaaataagggtgtatagagcacgatcttggaactttctgaagaaaatggaagacaagcttgaatccaggccaccaaaaccaacctcaattttcattca

SEQ ID NO: 24001 - DNA, 157 bp, Glycine max
  Clone ID: PAT_MRT3847_121674C.1
gtgattaagctttcgataagagacatagagagaactcaaaggaaaaacatcaaagccttttactattttttcttttgcatcatttgaatcttgattggaagagcttcgaattggggtgttttagccatcaattcaatgttgatgccgtgccttctac

SEQ ID NO: 24002 - DNA, 683 bp, Glycine max
  Clone ID: PAT_MRT3847_121675C.1
atgtgtacagttttggggtagtcatgcttgaactaataccttcaagacaaccaatagagaagggtaagtacattgtccgtgaggtgcgcaccctgatgaataagaaggacgaagaacactatggtttgagggaactcatggatccagtggtaaggaacacaccaaacctcataggatttgggaggttcttggagctggcaattcaatgcgttgaggaatcagccacagaccgtcctacaatgagtgaagttgtgaaagcacttgaaaccattttgcagaatgatgggatgaacacaaactctacctctgcatcctcttctgccactgactttggagttggtaagggtggaatgaggcatccctacattgattgtactttcattaagaaggacaatgctaatgatagtagtagtagtgcctttgactacagcggggggtacacactttcaacaaaagtcgaaccaaaatagatgctatgtttttatttttggaaggcacctaatagatgctatattatacatatttttgccagacaattttttttctttttttttttttcattcacaaacgaagatagtaacttgttgtgttccttttttgttttacttaaactaatgctatgtattcttattatggtcaatagttttatggcatgtaatgtttaggaagaaatgttgcaagct

SEQ ID NO: 24003 - DNA, 288 bp, Glycine max
  Clone ID: PAT_MRT3847_121676C.1
ggctcgagattccctactattccctatcatctttctttgtgttctcatctttttccttttcccaaggcacatggcaacacatgaaatggatcccgatgttgttcgctggggtcttcatctcctagatgtctgcacactttctcaccatggttcccctagtattgtaactcaatatgatcctgatttaagtcgagttgaatatgttaccgaaggcttttgtcagcatgagtacgtggataatgatgaggctggtgcacgagcatatcaagaagaattatcgcaacttga

SEQ ID NO: 24004 - DNA, 186 bp, Glycine max
  Clone ID: PAT_MRT3847_121677C.1
attcacctattggttaaacctttctggctgtgtgaatatgctttttagcactgtcactgagtccttctgttgcgggggaagggcaaaataatggtcttgatatgaacctctacaaggaatcatgccctcaggtagaagacaatatcacataacaagtcaagctactctacaagcgccacaagaaac

SEQ ID NO: 24005 - DNA, 624 bp, Glycine max
  unsure (1)..(624): unsure at all n locations
  Clone ID: PAT_MRT3847_121678C.1
tacagctgcgagatggctgccgatggggatcggtccggtgaagtgttcggcttgcggcgatgtgagcagttcgccagcccgcgaagttgtgatgcggtccccctgaacctctctcctttagcgggaggggggagcggataacttaaccccccaccaccgcagatgctactaaaggagccaactaaactggcagcaactaactacgttgcattgttgttggtgaggttcccacacgctggaagtgccaatgccagaccaaaagatagtcagctgcgccagtatttgcatcgaaaaagattgccaaaggtgactttaccagttggtgtgcaataatccattgtggtatccaaaatgtgcccctcattgggcccccaaaagaaacctgaaaacgttcaccgaccaaaggtaaaagagccagggccaccttctccagggaagattcaccaataaatgttgaaagaagaggcgaagcacaattggaaaaattcccccacctcaagttttttaaaacgtggccttccaaggacaagggcctggcatttaatccacgtccctggtcccccctttccctctgctnggtaataaacctatcaccattaattattccctcaaaattttttcaat

SEQ ID NO: 24006 - DNA, 371 bp, Glycine max
  Clone ID: PAT_MRT3847_121679C.1
ataaactcgttcttacttattccagacccaaactttctgcacaggttcattttaccttaaactttacaatatacatgtaatcctctagctcgatccattcattaaatggatctccgatcagaccatgatctgcgccttaaaccttgttaagatgagttagctgagtctgaatttatgcatgattaacgggaatctaatgttgattgattttgttggtaaccttgttttttttattctcgtggtcctggttagaaggaccggctgacacttacagagatgctaaaactgaatagtgttggcagtgtagaagcttgtcaactacatgtaatgaggtattaatttggatttgtaatctggatgcttctgttaaa

SEQ ID NO: 24007 - DNA, 1531 bp, Glycine max
  Clone ID: PAT_MRT3847_12167C.1
taagttttctcacaaaggaggaagaatggcatctttcatttcactctctttgttgaatttctggcgaaattacccctttccccccctttttctgaaccctgcacgtccgtacggctgcgagaagacgacagaagggggggacagtttttgtttgacacgcagaacagcagttagatgttgcagcacagcactcggaaatttcttctgatctctgcgtcttcccctattttttctgaatctaacataatggcatccaacaggggtcaaggtggaattcagcagttgttggctgctgaacaagaggcacaacggattgtgaatgctgcaaaaaatgaaaaattggctacgttgacacaccccaaggaggatggtccataattgacattgctgaatacagagttagactagcagatgagttacagcatccaacagcgggtcgtagtggagtttcccagaggttggttgctgaacaagatggacaaaagatggtgaatgctgcgaaaaatgaaaaattggctaggttgaagcaagccaaggaagaggcatgaaaaggaagaattgctcaataccggagctcaactagaggctgagtttcaaaagaaagtgtcagacagtactggagattctggagctaatgtcaagcggcttgagcatgatgactggtgtaaaaatccagcaccgtgaaaacggaggctgcaagaatatcgaagatgatagttgttggccatgtcttctcaagcatgtaacaaagtggtgtaaaaattaggaccctttgatatatattggtgctgaggacttctaaattatgatgattattattccgagtttattttttactctagatattctggtgcgggtgagatccttgttttggttacaatgcttaataccttgctgcactgtactcagtcagaaatgacttcaaatgaattaaagataagagtatttgatttttattctaccaggaaaaagtcgctctcaacacatacaagaacttaatgaatgattcccagggtgcgaatttaagctaaccatgatttcatgtggttttcttgagcaaattggatgttactgttgtcacaatttagtcagctagtgagatactaggacctctgccttcaaatagttgtgttcttccttcttctcaaccgaaattccttctgatgcgaatactgcactaagattctcagtggatataaggtaaatgtgtatgtgagaggacatcaacgctaacgtgcatttcaattaagagatcgttccaccatttgttgagcatgctagatacccaatgtgtgaggggggttcttcctcatacatgtacagataatttatttgttttggcaatagctgtaatccttttccttgaattctacttttattagttcagggaagagaacgatcttcatttacatttgatatccatactgtttttgaagaaaaaaaaaaaaaaaaaaaaaaaaaaaaaaaaaaaaaaaaaaaaaaaaaaaaaaaaaaaaaaaaaaaaaaaaaaaaaaaaaaaaaaaaaaaaaaa

SEQ ID NO: 24008 - DNA, 483 bp, Glycine max
  Clone ID: PAT_MRT3847_121680C.1
gggggggaaaaacaaattcttttttgaattttaaaacccgcttttggcaacacctttttaacgttccggggggggggccccccccaggggcctgaattggaatggcttgaaaccaaagctttccttttcctttggggctaattcttaatttccctccctttaaaacttttttgggggcttttaacccccccttttttttttttttttggtacccattaacccaaaattttttttcactttttagttttgggccaaccccttgggtggatttcaaggggcttaaccggggcgggaaattaaacccttttccaattttttaacccttaccccctgggggggggggttcccaaggggcttgcacctttttttggtttaggggggaaaacaaactttttgagatgggggtttttggggttttggcaaaggctttgttttttttttttgtttttggggccactttggttttaggggggggtttaaaag

SEQ ID NO: 24009 - DNA, 535 bp, Glycine max
  unsure (1)..(535): unsure at all n locations
  Clone ID: PAT_MRT3847_121681C.1
ctccgtgttcttgtgcaagcaagattgttcttaaccaaactctctgtttcagctctctctgntttttcggcacaaacagatttcggctgtttttaagtatggccataaagacaatggaactattgaaagggtgcggatcacaggaagagataatggaagtgctttctgcagtggcttcggatttgggggatgtgatcgatgatgtgaacaccttgcagggaagaagaaattcgaacctttgagtgcatttcaaagcatggtcagggtccacgccttcttggccgattcacctctggcagagttgaggagtttattcatgccagaactctatcagctgctgacctccgtgaccctgaagtatctgctttgatagcatctaagatgagagagttccataatcttcatatgcctggtgcaaagaaagctcagatttggcacagagtgaggaagtggcttggtcagccaaaagtctgtgctccccaaggatgcaaaaaatttggcnggacaatctggatgaggaaataaatatcttgga

SEQ ID NO: 24010 - DNA, 213 bp, Glycine max
  Clone ID: PAT_MRT3847_121682C.1
gtcttcagacacttatctgatcgaggattatgtaagctacatacttactgtgtctgggaaatgctactgtggaaggtgagtgacagttttgctaatacatcgactagacattcctggtgcgtgatatatatctgggtgaagcttagaacccaatatcagattcgcttgcttatatagataacaccatatagttatgacgtatactttatcaca

SEQ ID NO: 24011 - DNA, 910 bp, Glycine max
  Clone ID: PAT_MRT3847_121683C.1
ggctcgagattgttttttgtcacaatgacttacaatatggtaacataatgatggatgaagagacaagattaatcactataattgactacgaatatgccggttataatcctattgcatatgacctggccaatcatttctgtgaaatggtggcagattaccacagtgacacacctcatgttcttgactacaagaaatatccaggactagaggaacgtcaaagatttattcgcaactatctgagttctgaaggcaataaaccaagcaatgctaaagtgaaccagttagtgaaagctgcagaaaaatacactcttgcaaaccatctattttggggtttgtggggacttatttcgagttatgtgaacaaaattgactttgactataaggagtatggaaggcagaggtttcagcaatactggataaggaagcctactttattggactcaccaagcatcgtttccctagatgaaactgtgaatggattgctgtcatccttcacgtgattttgcttcagatttcttatagcctgtttggagatgtaggatgtgataccaaacatgcatttactgaagtttagtcttagtctctctctctctttatatatatatatatataacaccttaaggtataatatgcagcatcatatatgtaaataatatgcaatcactaccaatgtgtgatgagttttggaaattttaattaaggtttgtttatcaatccctctcgtttgggattgagtctcggggataaaactgagaataagtagtttatgttgtttgcaatatcgatggtgtatgcatttagaaagtagatagatttgtcatctcatcttcacttacacattaaataatggtttaggttgcaatttgattttttttttatcaatcaataacaacttagggtttttttttag

SEQ ID NO: 24012 - DNA, 1900 bp, Glycine max
  unsure (1)..(1900): unsure at all n locations
  Clone ID: PAT_MRT3847_121684C.1
gcgattagtgtttgcttcatataaccaaactcttcactctgcttctgcttctttggtcagttcccaattctctactttttctcgtttctcttcttaccctttaatcattcttcacggatttttgatcccggacacttttcctcaactgggttccgaaaaagtttctgtctttttcacgcaatattctattttcaaactcttttagcggcatcnntcccctgttttctaactctgtacttctctgtcacgggcttcctctgttttttgggtacgaacagagtttctctgtttttgacgatggccataaaggcgattgaactgttgaaagggtgcggatcacaagaagaaataatggaagtgcttgctgcggtggcttcggatttgggggatgtgatcgatgatgtgaacaccttgcaggtgattccactgaatggtgcaatgaccaatgaggtttttcagataaactggccaaccaaaaatggtggtgagatcagaaaggttctggttcgtttatatggggaaggtgttgaagttttctttgacagggaagaagaaattcgaaactttgactgtatttcaaagcatggtcagggtccacgccttcttggccgattcacctctggcagagttgaggagtttattcatgcccgaactctctcagctgctgacctccgtgaccctgaagtatctgctttgatagcatctaagatgagagagttccataatcttcatatgcctggtgcaaagaaggttcagatttggcacagaatgaggaagtggctcggtcaagccaaaagtctgtgctccccaaaggatgaaaaaaattttggcttggacaatctggatgaggaaataaatatcctggagaagaagttatctgaaggatatcaagagattggtttttgtcacaatgacttacaatatggtaacataatgatggatgaagagacaagattaatcactataattgactatgaatatgccagttataatcccattgcatatgacctcgcaaatcatttttgtgaaatggtggcagattaccacagtgacacacctcatgttcttgactacacgaagtatccaggactagaggaacgtcaaagatttatccgcaactatctgagttctgaaggcaataaaccaagcaatgctaaagtgaaccagttagcgaaagctgcagaaaaatacactcttgcaaaccatctattttgggggttgtggggacttatttcgagttatgtgaacaaaattgattttgactataaggagtatgcaaggcagaggtttcagcaatactggataaggaagcctactttattggactcaccaagcatcgtttccctagatgaaactgtgaatggattgatgccatccttcacgtgattttgcttcagatttcttatagcctttttggagatgtagggtgcgataccaaacatgcatttactgaagtttagtcttagtatatatattaatatattaataacacctgaaggtatgatatgcagcatcatatatgtaaacaatatgtaatcactaacaatgtgtgatgagttttggaaatttaaggattgtttaccagtccctctcttttgggattgagttgggggataagagtgagaataagtagtttatattgtttgcaatattgatgggatatgcatatagcaaatagatagatttgttctcgcattttacttacacattaaataatgattgaggttgagatttgatattaatcactcagaagtttttgtttttaactattgtaattagagtatttgactttagaataaaactccaaaatatttctattagtaacaattctttaggtttactataagtctaactactgtattatataatatttctcttaaatatagcattcagttcctat

SEQ ID NO: 24013 - DNA, 1716 bp, Glycine max
  Clone ID: PAT_MRT3847_121685C.1
ccacgcgtccgaattcgagcggccgcttttttttttttttttttttttttttttttgtaaaaacaagactacctatattagaatataattctcacaagacgagtaaaaaatcataaaacaccattaaaagatatgttaaaagcattatccatctacagaaacccacccccttaacaataatcctaaattgagaaaagaaaggtcaagagagttgcaaataaatagaaaaggaaaaaaaaggggaaaaaacattaaaactgatacattgcaagctggaatgatacacatgcccacaatagcatcgcctgctgctcagcttccacttggaaagattcagttataattcaagtaaacaacacatccaccgaagcctaacttcgaaaatataagtatcaatatgattcatggctctgatttggacaaggagatgagcttgcacattactgcagggcattagttgctgtgctggtaacagcaactcaaccaaaatagtatcataggaagtaatcaggtgttctcctggttacatctggctctcccctccttggagctggctcaaactgaatgaatgtgtgtcctttgcagtcgtcaacctcaagaattgatgccatgttcccacaacgataacaatagttaggagcactaaatatagtaaccaccttttgatcatgtccccagttatatccttccataaccagctggtgagctctagcaatcagcttcaagttattggtatctcgagattgctcagataggtcctggcccaaggtatatccagcacctctaggagagatgccccaaccacaacgatcatctggatcagaccatagaagatcacacatgggtccctcgtgaggaacttcttgtacgcgatcaaaattacgtatgttatccagggtttcaatagatggcgacaacccaccatgaagacaaaatatttcagattcaaccaatgctgtcaacggaaagtagtcaaacaaatcagtaaagatcttccaaacattagcactaccatacttccgcaggcactcatcataaaacccataaacttgagtaatctggcgactttcatgatttcccctcagaatagtgatacgctgacgataacgcactttaagggcaaccaaaagcgtaacagtttcaacagaataatagccacgatcaacataatctcccataaacaagtaatttgtatctggacacttccctccaatgcgaaaaagctctgcaagatcatggaattgcccatgaatatcaccacaaattgtaacaggacttttcacaggctggacattgctctcttccatcaaaatttcttttgccttatcacacaagacccttacctcttgctcggacaagggtttgcactgcatgagctgagaaatctgctcatcgaggtttccatgcgaattcgaaggcaccgaatccatgttctagtactccacctcctgaccttgctcgttgaggtcgttctatcaatatcctctctccgaatcgatggaaaccctagatctcactcggaaaacccctttcgccttttcggtttgtgtttgttgtttctggtttttagaaagagagagaaagaggagaggggtggtggtggtgaagaaaccaaagcgttttggaggcttcgttttgttcgataaccactcctttttcgggggcaaaattgaaattaccaataattaaaacgctcatgctcaacaacaatattgg

SEQ ID NO: 24014 - DNA, 992 bp, Glycine max
  Clone ID: PAT_MRT3847_121686C.1
ccaggcgcgagcaaatcccgcatctttctccgtgttcttgtgcaagcaagaaagcacttaaccaaactctctgtttcagctttctctgttttttcggcacaaacagatttcggctgtttttaagtatggccataaagacaatggaactattgaaagggtgcggatcacaggaagagataatggaagtgctttctgcagtggcttcggatttgggggatgtgatcgatgatgtgaacaccttgcaggtgattccactgaatggtgcattgaccaatgaagtttttcagataaactggccaaccaaaaatgatggtgaggtcagaaaggttctgattcgtttatatggggaaggtgttgaagttttctttgacagggaagaagaaattcgaacctttgagtgcatttcaaagcatggtcagggtccactataatccactactaacaggaaggtcagagtttaaaaaagaacagacctggcgactttcatgatttcccctcagaatagtaatacgctgacgataacgcactttaagggcaaccaaaagcgtaacagtttcgacagaataatagccacgatcaacataatctcccataaacaagtaatttgtatctggacacttccctccaatgcgaaaaagctctgcaagatcatggaattgcccatgaatatcaccacaaattgtaacaggacttttcacaggctgtacattgctctcttccatcaaaatctcttttgccttatcacacaagaccctcttgctcggacaagggtttgcactgcatgagctgagaaatctgctcatcgaggtttccatgcgaattcgaaggcaccgaatccatgatctagtactccacctcctgtccttgctcgctgaggtcgttcgatcaatatcctctctccgaatcgatggaaaccactcatgctcaacaacgatattgggactaggtggatgtgttgagctttggattttaaaaattgtagccttttgcat

SEQ ID NO: 24015 - DNA, 276 bp, Glycine max
  Clone ID: PAT_MRT3847_121687C.1
gcgtgggtctagttccacttatttgtttctttgtagatcggcctaactcacgcaggccgtgcttggtatatatgcacaaacatggttagcggagggactagtacgaggatgcatggatggatagacatgcacagggtaaccgcccaacaaatcacccgaagacggctcgctgtgctcggctgctctctaatgatggccggcgttcgagccaccttcatgttcctgctatatcaacattaaatgaaaacacccactggttacgaccaaaccactctt

SEQ ID NO: 24016 - DNA, 193 bp, Glycine max
  Clone ID: PAT_MRT3847_121688C.1
atgagcccaggcgttgagtcccctgcaggagatatttctgactagaagctcttagggcttattaccttatacggcctcatgataatacatcgaggctctacctggaggaaatgttactaattattgattgataatatgcccttgtaaatcccggaagctcctattatctttggtaacgtgaagtaatagcacc

SEQ ID NO: 24017 - DNA, 460 bp, Glycine max
  Clone ID: PAT_MRT3847_121689C.1
ttatgcacgcctccctaacctcagctcggaattcgggtcgagtcgagaggacgacagacgggggagggagagaaagagatcacataccaagactggctcatactcaaggtgctttgcaccatcatgctcttaccacccctgccagatccccatacacaactcataatggttagcaccaagcctaaccagcttgtttgcacggcacagaggcttgaatactatgatatgggcccaatctttctcccgttagttataaccctgctcatagaggctcatgatcaaccctcccaagtttcaacctgcttatgcaacttatcctgtagctgctactgacttctgaaagtcaatgacagacactgatttcctgtcatacaatgggaatgtatacttactagcgaacacttccaagcgcactcctatctgggtggatgtgtacacacgtctcgaatatagatatcca

SEQ ID NO: 24018 - DNA, 364 bp, Glycine max
  Clone ID: PAT_MRT3847_12168C.1
catgaatttcccaaaaagccctcaacccagaccctcatctccttcctcttcctacattccaccccaccgtacccaactgcaccctcgcatgatctgtgtgtattcttcttcttccccaaatccaaatcccaacaacaaaccccacaccaccagatgcctcttgtttttcttcgccctcctcttcttcaccgcccacttgctcttttactattctccaccgccctgcaaatccactcctccccaaaattcgccgactcccgccccgccttcttcgtcctagccctccgcgccggaccacacgccctccgcctatctgtcttgcacttcctcggccccagccgtgccctactcgccgccgctcact

SEQ ID NO: 24019 - DNA, 480 bp, Glycine max
  unsure (1)..(480): unsure at all n locations
  Clone ID: PAT_MRT3847_121690C.1
gggctttagggaaatcaccctcgcagccactgtgaggggctaagccaattacatcagagggtattatgaataataggagcggtgtatgatcctatgctaatttgctatggctctccgagttaaagatacctgtacctggcgagatttggtacgagctngtatgctgtccaggccgtgaccttccccagacaagcatgtctcaatagccgtgatagaaacctagatattgacagatattcctagcctgaggtcttgaagaaaaattctagtcaacgacatttgaaacctaggcattgaggttgtctgccgcattcctgactgcgatttacatttgcctgcattctaccaccccagctctgaggagaatactataatcttacgtgcaaaataggtattaggaaggttgatcgttccaagccaataaggcctgagggattgagatccctcactttctgaagatataataagtaattatttcct

SEQ ID NO: 24020 - DNA, 477 bp, Glycine max
  Clone ID: PAT_MRT3847_121691C.1
aatctatccaaattatgcatatgtgagcgtagacgttggcttttagtattgctagtctagctggggctatataatacttggattgtgaattaaattatgggaaaagttctatggtcgggtttaagataaatatactacgattaggacgtagcaacggatgcttgggcgggcctatgatacattgtatgtgttttattggtgaaagatcaatattttgatattgcctatgatacatattgccacaattattataatgaaaaaattgtgttaacttttttatttttaattttgatttaatagtatttgttttgagtggttcctagaaatatgaagatggaaacataaggctgggatagcccaatgacaccattgccttaattgattatttagctaattcggaaatctaagtgaattattcgatttcaagattttatttttttgtctcttaccatttgcaaattgcaatggcttcatctg

SEQ ID NO: 24021 - DNA, 625 bp, Glycine max
  Clone ID: PAT_MRT3847_121692C.1
tcttggatcagaatcttctaagcttgtggaacatttggatgggagttctaaagagaacttctgtcccactgctctgacactgaaatttacaaacttcgattctgttccttcaacaaccgatctcaacaacatttttggccgctttgggccactgattgaatcaaagactgaactgctagagaggacaaaccgtgccagagtggttttccaaagacgttcggatgctctggctgcctctgcttgtgcgggccttcactgcttagttggcccctcacgtgtttgcctccgccgccacatcttgccgcgtcagccaccccaggctgcaggagagcggggccgagttcggtggatggcgccgcggtctgtggccggcgcggcggcccgtccccccggtgttggcccggtcaaccttgcgtggggcgtctatgtgaatgtcaacattcctagtatattatgttgagctaaggtgacacgcattctaatacatagaattgactgattgatatttgagagtaggatccattacattttagttgccacggtgcatatagtttggaactaatacaaggaaagatccatgtttcagctggtatatgactgtgggaaagaattatgttatgttaat

SEQ ID NO: 24022 - DNA, 258 bp, Glycine max
  unsure (1)..(258): unsure at all n locations
  Clone ID: PAT_MRT3847_121693C.1
agagtagtaatatgtcctgaatcctgatcacattcatatcatagaagacgtttccttgtcatatttatctaagtttccttggcatatttatcctagatatccatgacaaaattgttagagataaacccataagtgtctcacttctcttccacttatttatatttgtgtgtgttttaatatgtattatgtcaataggttcagttgacaagatatcagtcccnnngnccgggggctgtcactttcaantgnnannggggg

SEQ ID NO: 24023 - DNA, 545 bp, Glycine max
  Clone ID: PAT_MRT3847_121694C.1
tgcccgcctgcagtccggtccggatttccggtcgaccgaggcctggatatgctcggaatgggtttggtgaagaggccacaagcttctttcgattaatgaagatgaaaagaatacatgttaataagttgacagttttaagtgtcttgatggcttgtggcacaattaagtctttgctatttggaagagaagttcatgcacagataattaaaagtaatatccataccaacatatatgtaggaagcactttggtatggttctattgcaaatgtaaagaatactcctatgctttcaaggtgctccaatatatgcctttcagggatgttgtttcatggactgccattatctctggttgtgccaggctcgggcttgaacatgaggctctggagtttttgcaggaaatgatggaagaaggcgtgttgcctaattcctatacttactcgtcagccttgaaagcttgtgcagaactggaagctccaattcaaggaaagttaattcattcctacgcgagcaagacccctgcctcgtctaatgtatttgtaaacagt

SEQ ID NO: 24024 - DNA, 421 bp, Glycine max
  Clone ID: PAT_MRT3847_121695C.1
aacaatgggtctcaatgggggttgtgttactcatcatagccatcatccttcacttcacagatgctttaccaattaacaagcaactctacagcttcagctatgtttgtttcacagctggggcagctggaattgtcttctctgggttctacatactgatcgatgtttgggggctccgcacaccattcctgttcttggagtggataggaatgaatgctatgctagtgtttgtgatggcagcggagggcatctttgcagcatttgtaaatggatggtattatgaagatccacgtagctcactagtacactggatcaagaagcatgtgtttgtcaatgtttggcactcagagagggtgggaaccatcttatatgtcatctttgcagaaatcactctctggagtgtggttgctggcgtcttacacaa

SEQ ID NO: 24025 - DNA, 357 bp, Glycine max
  Clone ID: PAT_MRT3847_121696C.1
ccatccaaaaaaataatctaaaaaatcaattttaaccttaaccctttttttgtccccgggggttgaaattcaaacctccccaaacaaaacttgttctaaaaaaatggaaaagggaaaccaaattcccttttgggggggcctgctttttttttcactggggaatgttcttttaaaaaatagcttttaaattcaccgaccaagcccttcaattttgttttccacttttaaaaacaactgcctgaccttttaaattttattttttaaattttcccaatacccccctcctttggtttccaaaaatttctcccctattttcctaaaggagtttggattagtgttcataacctttttcaccat

SEQ ID NO: 24026 - DNA, 362 bp, Glycine max
  unsure (1)..(362): unsure at all n locations
  Clone ID: PAT_MRT3847_121697C.1
cctggttgatccacgcgcccggatanaccggcgaaaatgtcccactgccatgaggaactaatttgatggaaactcgcaaggaatggcagccggatctaccttgtgacaagattcctagtgtttggtcaccacctgatgagagaacgggaggcacagaacatgagggatttgatccttcccttggaggaagtcaaaaatatgccactcccatgatgcccctagatgaagaaattctttgtaaggttgcacaagacatggttgaggaatggtttgatcgcgatgatgaggaggattcctttgaggaagattctttaagtgcagcacttaaaggtgttgagggtttggactatttggaaagaatt

SEQ ID NO: 24027 - DNA, 257 bp, Glycine max
  Clone ID: PAT_MRT3847_121698C.1
caatttcttattttactatgttcaactctatgtattcctctatccgtagagtacattgaatgtacagaaatggctataacagagtttctgttattcatattaacagctactctaggaggaatgtttttatgcggcgctaacgatttaataactatctttgtagctctagaatgtttcagtttatgttcctatctactatctggatataccaagaaagatgtacggtctaatgaggctactatgaaatatttactcat

SEQ ID NO: 24028 - DNA, 277 bp, Glycine max
  unsure (1)..(277): unsure at all n locations
  Clone ID: PAT_MRT3847_121699C.1
tgtgattattaatggttgggnnatggaaagagatnntaagatatggaaagatgggaaaagntttaaaantgagaggtttgatgaagaaggagaggagaagaagttggtagnatttggtatgggaagaagggnttggnnaggaaaaannatggntatggaaagtgttaggtataatttgggattaatgattgaatgttttggatggaaaagagtaagtgagaagaaagttgatatggnagagaataattggattantttgtnaagggtaattgaattg

SEQ ID NO: 24029 - DNA, 1266 bp, Glycine max
  Clone ID: PAT_MRT3847_12169C.1
gtaagctcggaattcggctcgaggtttggggccacgcgtccggcttagagttagatggagtcgcgcggacactcaaacccgcttctgtcattttccagcttcatccatcaacactgcgtccgcttagggtctgacctcgcgactcgtttggatgacacgaaacgagccctagctcaagctcatcataatcttctattccccaaacacgccctcgccgccacttctactctgggctccctgcacgtggctaagtccctcgtcggcacctctgtttacaccgtcagcaattccaacaatgagttcgttcttatctctgacgctgatggagccaagtccattggattgctttgctttcgccaagaggacgccgaagccttcctcgctcaggttcgatcacggagtagagagcttcgaagcaaggctagggttgttccaattactcttgaccaggtatacatgttgaaggttgaaggcattgccttccgattcttacccgatcctgttcaaataaggaatgctttggagcttaaaccagccaacaagggaggtttcgatggagttcctgtttttcagtcagagcttttggttgtgaagaagaagaagaagcgttactgccctgtgtatttctctaaggaggatattgagcaggaactgtccaaagtttccagggcatcaagaggacctggtgtttctcaacatatagcagttggtagcttggaagatgtactgagaaaaatggagatgagtgaaaggaattcaggatgggaggatttgatttttattccaccaggaaaaagtcgctctcaacacatacaagaacttaatgaatgattcccagggtgcgaatttaagctaaccatgatttcatgtggttttcttgagcaaattggatgttactgttgtcacaatttagtcagctagtgagatactaggacctctgccttcaaatagttgtgttcttccttcttctcaaccgaaattccttttgatgcgaatactgcactaagattttcagtggatataaggtaaatgtgtatgtgagaggacatcaacgctaacgtgcatttcaattaagagatcgttcccccatttgttgagcatgctagatacccaatgtgtgaggggggtttttcctcatacatgtacagataatttatttgttttggcaatagctgtaatccttttccttgaattctacctttattagttcagggaagagaacgattttcatttacatttgatatccatactgtttttgaagatgag

SEQ ID NO: 24030 - DNA, 672 bp, Glycine max
  Clone ID: PAT_MRT3847_1216C.1
gaagagaatggcttccaagggactcaccattctggctgtgttaatatgcgtttcagcactgggactgagtgcttctgttgcggcggaagggccaaataatggcctcgatatgaacttctacaaggaattatgctctcatgctgaagacatcatcacagaacaagccaagcttttctacacgcgccacaggaacagtgctttcttctggctcaggaacatctttcatgactgtgctgttcagagttgtgatgctccactgatgctggactccacaagaaggagcttgtctgagaatgatacagatagaggcttcgtgttgagagatttcaagtacattgagaccatcaaagaagcttttgaaagagaatgccctgtagttgtttcatgtgctgatatccttgatctctctgccagagatggcatctgctcgctaggaggtccccatatccctcttaagactggaagaagggatggtcgaaggagcagagcttatgtggatgatctagtcctgccataccacaatgagtccatttctgcagttcttgacaagtttggtgccatgggaattgacacccctggcgtcgttgcactgcttggagcacacagggttggtcgaaccccaattgttgaaattggtgccccgtttgtacccagagaatggattcagctctg

SEQ ID NO: 24031 - DNA, 622 bp, Glycine max
  Clone ID: PAT_MRT3847_121700C.1
aagagactagaaaacgctcaaatattatttgactattaggtagacttatatgtggctcgctggatgttaagctcactgaagtgcctcattgccgaacttcttgctgtacaagccaagagcccggatgggccagtagaacttgtagttggggtaagaaatcatgcaggactggttaaagacaccttcgatggactcctgcaaccactcgccattccgctgttgacgagccatgaggagtttgatgcctctctccagaggctctttgtgagggtactgcgcctccatgagagccaagcaggcccaagcagtctgaacaacctgagacttctcgtgctggacgtaaacatgcttctcactgctgaggtatgactcaccccagccaccatcggcctgctgcttctcgatcaggaactcacagcctcggcgagaatgttcactggtttcgtaggtctcgccgacactggccagactctccagggcgaacatggcagcataggtaaagcagatcccccatgaaccgtaccaactgccgtccttacgctgggcacgcttaatataggcaaccgccttcttcttcgcggcacggatatcgtcggcgcgatagtctgggtagaatttgctg

SEQ ID NO: 24032 - DNA, 835 bp, Glycine max
  Clone ID: PAT_MRT3847_121701C.1
cttcgagacggttcgggctcgagctcgagccgaggtcggaggctcgggcagttactgttactgttattatggaactcaaacaacaaaaactccttcttgttctgattctaacgcttctttttgccactgccacgcctgattctgaatacgttcgacctcttcctcgtaaaaccttaacaaccatcccatgggattcaatttccaaggcccactcctcttaccctcaacaggtacacatttctttggcaggagacaagcacatgagagttacatggataaccgatgataaacattcaccttcatatgtagaatacggaacattacctgggagatatgactcaatagctgaaggagagtgcacctcttataactatctgctatatagctcaggaaagatacatcacgctgtaattggacctttggaagacaaccatgctgtaattggccctttggaagacaataccgtgtacttctaccgatgtggtggaaaaggtcccgagttcgagctcaaaactcctccagctcaatttccaattacttttgctgtggctggggatctgggtcaaactggttggactaaatcaacactggcacatatagaccaatgtaaatatgatgtctacctgctaccaggagacctttcatatgctgattgtatgcagcatctgtgggacaattttgggaaacttgtggagccgcttgcaagtacaaggccttggatggtgacagagggtaaccatgaagaggagaacatactattgttgacggatgagtttgtgtcctataattccagaaggaaaatgccatatgaggaaaagtggatccacttcaaatt

SEQ ID NO: 24033 - DNA, 143 bp, Glycine max
  unsure (1)..(143): unsure at all n locations
  Clone ID: PAT_MRT3847_121702C.1
cngtctanacgacagacgnanntnagcncntgaatgtctganntacaggnagaanagaagcgatgcgtanccncnggnattaagacggntgancgntctaannagngngtggtcagnagtgcctagggnaaatangctnctnc

SEQ ID NO: 24034 - DNA, 759 bp, Glycine max
  Clone ID: PAT_MRT3847_121703C.1
ccacgcgtccggccgccgaagctgaaccgcacacagcatccccaccggcgacgaatagtttttttatttaaccaacatggacgtatcggagaggactttggatggagagaatagtgtaagacgaaggagcagaaaaaaatctatgtctggaactgcgagtggagcacgagagcatatggagcaattgcagaaacttcaggacaaggatcctgaattttatgagttcttgaaagagcatgacaatgagttgcttcaattcagtgatgatgatgtagatgaagatgtgggtactaacacagaagatggaaatctacagctagatgaggaggttagtgaggatgagattgaagagaaggaacaaaaatcctctaaggaagttataactacttctatggttgatttgtggggcaaatcaattcaagaaagtgggagcttgagtgcggttcgttcactgatgagggctttcaggacagcatgtcactatggtgatgatggggggaatgaatctatggcaaagcttagtgtaataatgtctagcactgtattcaacaaaataatgttgactgtacttactgaaatggatggaatactaagaaatttgttgaagcttcctgcttctggtggaaagaaagagaccataacagatttgatggccacgaagcattggaagagtcatggccatttagtaaagtcttaccttgggaacgctctccatggtttgaaccaaatgactgacacagaaatgatatcatttacttt

SEQ ID NO: 24035 - DNA, 1187 bp, Glycine max
  Clone ID: PAT_MRT3847_121704C.1
cccgcgtccgctctatactctgtcccgccgccgcgaagctgcaactacacatagcatcacgaataggttttttattcaaccaacatggacgtatcggagaggactttggatggagagaatagtgtaagacgaaggagcagaaaaaaatccatgtctggaactgcgagtggagcacgagagcatatggagcaattgcagaaacttcaggagaaggacccagaattttatgagttcttgaaagagcatgacaatgagttgcttcaattcagtgatgatgatgtagatgaagatgtgggtactaacacagaagatggaaatctacagctagatgaggaggttagtgaggatgagattgaagagaaggaacaaaaatcctctaaggaagttataactacttctatggttgatttgtggggcaaatcaattcaagaaagtgggagcttgagtgcggttcgttcactgatgagggctttcaggacagcatgtcactatggtgatgatggaagctcggaattcggctcgagctcgagccgattgaacttcttggcgtggatcttccaactgcatatcaacatgccttcacttacatccggcaactggctacaattttaagggaggcacttaatacaaagactaaggaatcttttcggaaggtttatggatggaaattcataaactgccttgaactttggactggggctatctgtgcctacagttcagagtctgactttaagcaacttgcatatccattgacccaaataatttctggggtagcccgtctagttcccacggccagatattttccccttaggttgagatgtgtaagaatgctgaaccagattgcagcttctacacattcttttataccagtgtctatgcttcttttggacatgctggagatgaaagaattgaatagaccccctactgctaggaaaaatgacgacacagatgattcacctccaaaacaaaaacgcaagcacaggagcacaggactaaaaggttgaaaaaaaaattaatctcaccttgacgggaaataatgataatatgacatgtctagttggcgacctcactattcaagtttgatacttttaggtggaatgtctatggcaaagctttgtgtgataatgtctagcactgtattcaacaaaataatggtgactgtacttactgaaatggatggaatacta

SEQ ID NO: 24036 - DNA, 476 bp, Glycine max
  Clone ID: PAT_MRT3847_121705C.1
catgcctgttctctcaacgactcctccgcgaaagagtatcattcaatatttcggctgggtgtgaatccacggggtctgaagtcgttgcagacatcaccgctattctaagagtgtctgagatcccttattgatgtccgatctgtacaacagaagacggctagttgcagtactgccgctaaccctgcgccgcacggtgggcatcgagctctgccttctgaaggcggtagcccttcagacttgctctctctagctggtggtggtttcttctaggctcttcactctgttcatgacttttagcctgcatagttttaagtaagacaggacagacagcgccttagtgactagctacgatcaccgcgtgttcttgatcatccacttgtgatccttctactactactactactacttactctccacacaatgatgctcagaatcaagaaggttaccactgacgtttccaactaccagaatgacga

SEQ ID NO: 24037 - DNA, 726 bp, Glycine max
  Clone ID: PAT_MRT3847_121706C.1
aattgatgctgtaaataattgcaagttagcacaaacatagaacaaagttgtcaagtcgattcatatttttcgttgagctcgaaaccaagctgtactgaccatagggcctaagctcttcaaaagagacttacaaaacaatcgacttgttacatgaaactgtacaaatacatacaaaagctatacactcaacccacaccaaaattcacagctatgttacatgaaactgttgcacagtcccttgctacagcttcatttctgcaagatgtgttgaatttacaggtctcgttagcttcctcaccaggtgctggtaattttttagtttcctcacggtacaagttgacacatcccatacaaacaaacttagaaggcattccatcagtattattatcaattccagcacatcttgtatgctgccaaacgccacaggtatcacatgctaacattttctctccgtcatcatccttagccccgcaagtgcaatccaccttccacacctctgttcctcgttccattcgaaatcgacttagcccatgtttagctggacatttaccttgaatttgaattgatccacttgttccaagcaagaaccttatggtgagcgaatcactgattgacccgtatcctagaagttcctcagcttgaaacctcttgtacattgcatacacctcttgaaatgcactagtggcttcactcctgaggtcaagcacggtagcattcaaaggcagc

SEQ ID NO: 24038 - DNA, 676 bp, Glycine max
  Clone ID: PAT_MRT3847_121707C.1
tttttagaacaaagttgtcacgtcgattcatatttttcgttgagcttgataaaacctagctgcacttaccctggcctaagctctcaaaaacagagacttgcaaaacaatcgacttcttctggcctcatttgctattaacataaaatcctagccgaagacaaccaaaaactatacagatacatacaaaagctatacactcaacgtacaccaaaattcacagctatgttacatgaaaccgttgcacactcccttgctactgcctcatctctgcaagatgtggtgaatttacaggtctcgttagcttcctcaccaggtgttggtaattttttagtctcctcacggtacgagttgacacatctcatacaaacaaacttagacggcattccatcagtattattatcaattccagcacatcttgtgtgctgccaaacaccacaggtatcacatgctaacattttctctccatcgtcatccttagccccgcaaatgcaatccaccttccacacctctgttcctcgttccattcggaatcggcttagcccatgtttagctggacatctaccttgaatttgaattgatccacttgttccaagcaagaactttatggtgagcgaatcactgattgatccataccctaggagttcctcagcttgaaacctcttatacattgcatata

SEQ ID NO: 24039 - DNA, 569 bp, Glycine max
  Clone ID: PAT_MRT3847_121708C.1
gtttgcaagtgttttaaacaataatttgttatattaacaaatgtatgaaatgtgcatgacatcctagatgccatggtatgaaaagaaagcaaaactagaagtaagaaagcaaaaaagagagaagagaacatgtaaccatcccaactttgtattttttgcaaatatagactccttgaactttctttttgttctaatttgtcctcaaacttttactattgttatagtagacccttcttttaacttggggttaagttactaacgataaacaaaattaaacctttttagttttatttatcagggaaaagaatatacattcaccctaaaatttatgctgcgcaaatagacatcttgagcttttgcagttcatccctcaattagttcttaaactcctgctaatggtgaatggaagggtctattataaattaaacaaggaactaaaaaatagctaagaattattggagttccttgcatacttttcaacaaggaattatattgtggaagtattccttgttgcctcttcaaagcatggaacctgcttttctatatgaaatatcatactttgtcactga

SEQ ID NO: 24040 - DNA, 1733 bp, Glycine max
  Clone ID: PAT_MRT3847_121709C.1
acccacgcgtccggcaaaatacctatacagtagcaatgatctctttcacagtctttgttttccttacactcttgttcactttgtcattggttaaacagctgagaaagcctactgcagaaaagagaagactactacctccaggaccaaggaaactacccttcattggcaacctccaccagcttggtacgttgccacatcaatcccttcaatacctttcaaataagcatggacctctcatgttcttgcagctgggttcaatacccaccttggtagtttcctctgctgagatggccagagagattttcaaaaaccatgactcagttttctctggcaggccttcgctatacgctgcaaaccgtttaggatacggttcaaccgtgagttttgcaccgtacggtgagtactggagggaaatgaggaagatcatgatcttggagctgctgagtccgaaaagggttcaatcgtttgaagctgtgaggtttgaagaagtcaaacttctgcttcagaccatagctctttctcatggtcctgttaacttgagtgaacttaccctttcgttgaccaacaacattgtgtgtcgtattgctcttggtaaaaggaacaggagcggggcagatgatgcaaataaggtttctgaaatgcttaaagagacacaggcgatgctgggaggattctttcccgttgacttttttccacggttggggtggctcaacaagtttagtggccttgaaaataggcttgagaagattttcagagaaatggataacttttatgaccaagtgattaaggagcatattgctgataactcttctgagaggtcaggagcagaacatgaagatgtagtcgatgtgcttcttcgagttcagaaggatccaaatcaagcaattgccatcactgatgaccaaatcaagggtgtactcgtggacatctttgtagcgggaactgacactgcttcggccacgataatatggataatgtctgagcttattaggaatccaaaggcaatgaaaagagcacaagaagaggtaagagatcttgtcacaggaaaagagatggtagaagaaattgatctctcaaagctcttgtacatcaagtcagttgttaaagaggtattaagactccatccccctgcgccattacttgttccaagagagattacagagaattgcacgatcaaagggtttgaaatcccagccaaaacaagggttcttgttaatgcaaaatcaatagcaatggatccatgttgttgggagaatccaaatgagttcttacctgagaggttcctagttagtccaatagattttaaaggacaacactttgagatgttgccgtttggggttggtcgaaggggttgtcctggagtgaactttgccatgccagttgttgagttagcacttgcaaatcttctgtttcgttttgactgggaactgcctcttggacttggaatacaagacttggatatggaagaagcaattggtataaccatacacaaaaaagctcatctttggctgaaagccactcccttttgcgagtagtacttttttccataattaaaaatggtcatgtttatgtcatagaaaataataaatatgatttggttattccccctttttttcagtagtcgtaggtatctctatataataggcaggtaatcctatagggctataggctcctataagagcttctaatattcgtcaacacaaaaaccctataaccagtaacaccactttagg

SEQ ID NO: 24041 - DNA, 785 bp, Glycine max
  Clone ID: PAT_MRT3847_12170C.1
aaaaaaatattctttgaaaataattattgtaccaaaaataaaacttcgctaaaggggcatactactgaaagttttaccaaaattattagtgtgattaagcaaaaaaacagtgatcattatgcatgagtaaaaatgaaaattccgtagtaggtggccagagtgtattggattaagaagcaaaacagttcgctatcgctgggacagtttttgtttgacaccactcggaaatttctctgcgtctctcctattttttctgaatctaacattaacaacaagaatggcatccaacaggggtcaaggtggaattcagcagctgttggctgctgaacaagaggcacaacggattgtgaatgctgcgaaaaatgaaaaattggctaggttgaagcaagccaaggaagaggctgaaaaggagattgctcaataccgagctcaactagaggctgagtttcaaaagaaagtgtcagacagtactggagattctggagctaatgtcaagcggcttgagcaagagactgatgaaaaaatccagcacctgaaaacggaggctgcaagaatatcggatgatgttgttgccatgcttctcaagcatgtaacaagtgtgaaaaattaggaccctttgatatatattggtgctgaggacttctaaattatgatgattattattccgagtttattttttactctagatattttggtgcgggtgagatccttgttttgttacaatgcttaataccttgctgcactgtactcagtcagaaatgacttcaaatttggtaaataaacat

SEQ ID NO: 24042 - DNA, 262 bp, Glycine max
  Clone ID: PAT_MRT3847_121710C.1
tttaaaacttttccataaggaccccggatacaataaaccacaattgaagtataaattggcatgcacacattattgttaggcctggtaaacaacatgtgggcctgatataaccatgattgcattaagtggaaacacttatttggaacaggggtagcttgccaatgttataattcagctgggacccataatcaatgcttacacttccttggaagaaaagagcagctgacagactgccaaaccttaacgcatgggggaccttaaa

SEQ ID NO: 24043 - DNA, 293 bp, Glycine max
  unsure (1)..(293): unsure at all n locations
  Clone ID: PAT_MRT3847_121711C.1
cnatttatgatgatcccaattntntgtnggaaacaataagggaatctatctgtnttgattcgnaattnattttncctgaaggagatagatgtgtgtgtggganggattttttggtagttagtatctataagggtaacattgttgctcgtcaacatgtgttgcagatcaaatccttctaggaggtgttcctaattttgcaatattttcgaaattgtgagtgtgtggtttggagcatcattgtttctatgtgatgaacaagttatgcaaaatagtacatctagtccttcaatatg

SEQ ID NO: 24044 - DNA, 401 bp, Glycine max
  Clone ID: PAT_MRT3847_121712C.1
ctattgattcctttttttttttcaaacttggaacggacaatagccttttttttatgaaatcctgacaacagggaaaacaaccttttttaaagcccctgcatgactaaaaaataatacttaggattttatttaattaaattcatggggcaacttaaaggcttgtattttagagctttatctttgacaagggattaggcagcttaaaagttctagcccctttgttgctttccaggaagtcatctctttggtcttcaacgctaacaatgattgtgattaccttcttctccaacttgtttttttaaaattattttaattcaaaagataacttaccagacgtctaagatgggtccctgataattaacttttcccgtgatgctaatctcaccaccgttaaattcttg

SEQ ID NO: 24045 - DNA, 132 bp, Glycine max
  Clone ID: PAT_MRT3847_121713C.1
cagcattcaagtagttaccgtttaaaaccccgttttcttcatccatgagaatccggtggcaatttttgtaagtgaatagtgtagaactttgattttttttttaaatgattgttctgaactcctgcttctttc

SEQ ID NO: 24046 - DNA, 1019 bp, Glycine max
  Clone ID: PAT_MRT3847_121714C.1
gcacgaggcaaggatgaagaagattcagagggaagaactgctttgcattttgcctgtggatatggtgaggcttgtcaaacatgttaaaatatgagagtcaatttctaaagcattgctgaaatttggggcgagtatgggttggacttgatgacaaccattggaagcatctgaaatttccaactgtctgatttttcttgggtaatggagaagctaccggctgcagctgattctaggaaaaaaacaatggaaaatgacaatgatgaattggatggattggaaatggagaagaaagcacaagagcaaagagggaagcagttggaaatgaggaaacaaagtgcaagttgatgatattaggctagtttggaatcatctgccttttagtttttttttttttttcatttgcaggcagatactctcttggtgaataatctgctttagatgttggttgatactggatatgttcttacacttttgacttcggagcaatttttcacatgttttgaaaagggacgagtgtaacacttataactatttgtttacatggttctctgatgggatctggtatgaaaatcttatctgtttttcccattataccaaattatattttgacaattcatcaaaaacttactaattactaagtgagctaaattattttttgattgtttgtctttgtcagtatttgattagtgagtcaggacataggagcatgaacaggaaaatgaaagatttgagtccatctggtttatagaatgcttgcaatttcaaaggcatttatttacccttaattattgtatgttgtgggatagcctctacatggccacttatgcacgcttattataaggagagttctctctcataagtgaaggaattggacagtttcctttaatttttgaaggaataggttattaactaacctagtaattttcctttttattacacattcttttaggtgggatccactatatagattaggcaatgccattttattctttcaaattattatattcatcaaacggaaa

SEQ ID NO: 24047 - DNA, 769 bp, Glycine max
  Clone ID: PAT_MRT3847_121715C.1
atcacccagcacctccaacctgttcattttttaagggttgatttggttgataagctgtctagttatggtattgttaaattcagccattctcttagtgtcattgggtatgatttgaaatatttgagagctaaaattttgcacatgtagggcttgaaaaatgcactagccgctggtgctgacaaggatgaagaagattcagagggaagaactgctttgcattttgcctgtggatatggtgaggtatgctaatatttggagtgaatattttctcatctcttatatcacatgctttttgtttcttagaatgtctgcttatgttgttgggtggtggtgttgactttagaaccatggtgcgaagtaaatgaaggatatattgaggctcagggtattatttagtaaaagactgtggtcttgattgtttcttccaccatggtgggcaatgcaggcttgtcaaacatgttaaaatatgagagtcaatttctaaagcattgctgaaatttggggcgagtatgggttggacttgatgacaaccattggaagcatctgaaatttccaactgtctgatttttcttgggtaatggagaagctaccggctgcagctgattctaggaaaaaaacaatggaaaatgacaatgatgaattggatggattggaaatggagaagaaagcacaagagcaaagagggaagcagttggaaatgaggaaacaaagtgcaagttgatgatattaggctagtttggaatcatctgccttttagtttttttttttt

SEQ ID NO: 24048 - DNA, 261 bp, Glycine max
  Clone ID: PAT_MRT3847_121716C.1
aaaaaatttaattaaaaaaaaaaaaaaaaaaaaaaagaaaataaaaaaaaaaaaaaaaaaaaaaaaaaaaaaaataataaaaaaaaaaaaaaaaaaaaaaaaaaaaaaaaaaaaagggggcggcccccacttattaacctcttcaacccggaaattaattccgaaccggtccctgcaggcttcccacttttccttttatggagccgttttaaaccttggcgtaataatggccatagctttttcctgtgtaaaatttttttc

SEQ ID NO: 24049 - DNA, 446 bp, Glycine max
  Clone ID: PAT_MRT3847_121717C.1
taatcataatttataattgtcatttttatttggaggcgtggttttctggaaaaaaaattggtcacagagttggcagaactagaaaggaagctcaaaataaggctgctgaggattctatcaaacatttggcaggtaagatattctaaattttttcattgtgacttgctatagtattatctagtctacatttttttgccttttgtaatttttgtcccctccaaaaaatacatatggtagtttatatttttaaaaaaattcaaaacatcaaaagcatagcctgccttgttaaatcaacctattggcttgatattgaggtttagttaatgatgttttaagctcatgcatggtcctgccatcaataaaaactcagtgtataccttgttagagatctaaaaccatttttgggcattcttcttatagctttagctttctaagggagttgatct

SEQ ID NO: 24050 - DNA, 578 bp, Glycine max
  Clone ID: PAT_MRT3847_121718C.1
ggcgaaacatatagtttttgcaattgaatatagcgattgggatgagtcataagcgacactaatggtgtggctaacacacccgcggaaacatccaccaggtaatattttaaaatgctacctggcgacaacaccgccgaaaatccgggtagaaacaaacacccgtagaaccatagagtttttagcactcctggacccaagaaaagaggctgaaaagtacaagatagccaaccatacaacttgaaaaggcccattggaaccacaaataccggggtaccctcctaccggccacgccaaaagatggacctggagggttcccacccttaggaaaaataaaagcagcacgctatgttccataataatgatggataagatacaaatcctatgcgagggaggcctacagcgcacactatagggttccgaaaagtgaaaaccccctaaactctataacacaatctttaaacgaggtttttcccttcacccaaaaaacagtttgctaacctcgaagagcacatcaacggtcaggggcctgtgtgacatatacagcacatccacaaccccttgcccttgaacctttgaag

SEQ ID NO: 24051 - DNA, 590 bp, Glycine max
  unsure (1)..(590): unsure at all n locations
  Clone ID: PAT_MRT3847_121719C.1
tatttattttttataagaataaaataaatagtctccgtggggtgattgattctgacgaacagtgccctctacttgttcctctgcgaatgtgaaaaacaccaaccaacgaggattcgaaatcacagaggaaaaggaagatctcacaatgttcaatgttatcggtttctcgttgttgacgatggattcggtggcgtacaggggattgctctacacattcttcatactcaattttgttttggtctgccaactcattctccttcaacctctcgtctctgcttctgatggaaaacctgaaaatgctgctgagttgtttgagcgtgcatcacagagcataaaagtgaaagattatactgaggcacttgtgatctaaatgctgcaatagaagcagacccaaccctttcaaaagcataccttttcagagcctcagttcttcgtcagttatgcagatatgagcaatctgagaggagctacaaaaagtgttctgggttaaaacctggagattcagctgcagaaaaggagctctctcaactattgcaggctcaaagggctctggaaacagctcantccctctatgattcgggcaacttctc

SEQ ID NO: 24052 - DNA, 196 bp, Glycine max
  Clone ID: PAT_MRT3847_12171C.1
tacggctgcgagaagacgacagaagggggacgcacattctacaaaacagaattttgtctgatttcaagggcccaaaagagagagagaaaatgtgaacaacgttggcttggctgggtggtaccttctttgctcattcagctgtttcattacacctacacttaacactttctttattaacgggcatttctatatggac

SEQ ID NO: 24053 - DNA, 382 bp, Glycine max
  Clone ID: PAT_MRT3847_121720C.1
gaattggagtaaaacctaaatgattttcaggttggcagtaaatcttcacaagtcggttgaacgctgccggtatactcctggtttaattgactactcagcccctaaaatatgcattaacttgccctcaagcttgaagctgcaatctcacccatcccaagccagcatttccaaggatggtcgaagatattaatcaatttctcgtatgaatcattatacagaaggttgttactgtgaaccatgtgatatcccatttagattgatacgtggtgtctctgcgtgtgtaataattcatacttgttcaatatagaatcaggattatcactttactctccaaccccctaccccggttcatgaagaacccaaaataaattggatttaaaaa

SEQ ID NO: 24054 - DNA, 660 bp, Glycine max
  Clone ID: PAT_MRT3847_121721C.1
gttccattgttttctctttgtttcttgttgagggccccacacttcccgataggggaaagggatactccatttgtgctatatttatggtatgttttgatttgtgtggtgtctggaaatggcctatttcattcccaggccctttccccgagtctatgggggatttgattgatgagaattgcttatggtgtatttccttttccaatgaaatgctacaacctttactgcaaaaaaaaaaaaaaaaaaaaaaaaaaaaaaaaaaaaaaaaaaaaaaaaaaaaaaaaaaaaaaaaaaaaaaaaaaaaaaaaaaaaaaaaaaaaaaaaaaaaaaaaaaaaaaaaaaaaaaaaaaagaaaaaaaaaaaaaaaaaaaaaaaaaaggggggggccccttttaggggtcccaattttccgccccggggaacccaagaaaattttttttttttggggccccaaaaaaaaaaccccgggcccggggtttaccacggggggagggggaaaacccggggggcccccaaattaattgcgttggcaaaaaacccccttttcccaagtggggaaaaagcaaaagggccccccccggttcccctttccaaaagtggggccatcttaatgggaaaagggcccccccccttaagcgcccattaaggcccgggggtgggggg

SEQ ID NO: 24055 - DNA, 1244 bp, Glycine max
  Clone ID: PAT_MRT3847_121722C.1
ggttcaagggactgatcaggatcgtttgatcctccacatatctgaatcgtggctggatgaacgaatgcaaatgcagctggaagcaggtcagaatggttttacggacaaatccatagtcgataaactaagtcttgaaatagagactttccttaaagctaaacaaaatagtaggagtacagaaaatattgcagtaaggaattgccgtaattccttggaatctgtaccactgaatgatgccgtcagtgcaccacaagaggttggtgatgacgatgattctgtgggcagtgattcaaattgttttgagttgaacaagccaagcaacaagggatctaaggtacatgaagaagagcctgtcggcaaaatttttgaggagacatcaaaaaccaaccaaccaaagaaaaaaccaataccacgagaagggttaaaacatcgtagcccatgtagcctgcaagtggagtttgaagaacagattgcttgggccatgtcatctgattcgcataagaagtcccagtcaattgatgcagatcaggggaagaccacagatactaggccagttgaaggaattgtatctgaaaagtctgaacactttgagatttacgaaaatgatgattctgagagaaaaaatatccccactgaattgcacagctccagtaaaaatcacattattgataatctcttaagaggtcaacttttggcatcggaaggtggcaatatgcatgctgaaaataattatggtgaggcttcttgcagcaatgctggatggaggaatcaggcaagccctgtgaagcagtggatggcaaaacttgcatcccaagaccttgacatatcagaggcttccaaagtgccttcaggatcaaaggagagtaataatactttgaaagcaaagcttcttgaagctaggtccaaggggcagagatcgcgtttaaaagccttgaaaggttccttttagaggtggtttagcttaaacataacatgttggaaaattcaggctaaaggtaaataataagttgtggggaatttgcatcctgttgatggtggtcattacacttccccctcgtctcttcctttcacgtgcaacttttgttcataattttcactttgtatctgtaacaaatttctcctttgggttttattctctctctatatatactactgtagatgtcacgcatgtagctaaaagaatcggatcgagtcttgagaagtgaaaaaacaagtatacaattttggatagttttttgtttctc

SEQ ID NO: 24056 - DNA, 492 bp, Glycine max
  Clone ID: PAT_MRT3847_121723C.1
aaaggggttatatgtaaacatttgaatggggaaaaggggaatacctaaaaaaaaaaaagggggggtttccttacaaaaaaattaaacaggaaaaaccaaaggggggggaaaacaagaccatgtgaaaaacaaaaatggcaagctacttaaaaaagttgcatgggtcaaaaacccaaactttaaaaaaaacaaattttaagggaaggtaaaaaaaaaaaaaacaagtccggggaaagggtcaagcacctaaaaagggaccactttttttgttttgatcaccaccaatggtatgtatatttttttcccaacccggggcccaacggggggtcggaagcggggcccgaaaagggaataccggacccgaacgggggggcgaacaaaattttcctgaaggggggaaaataaaagcttggggaaaaaaagggaaaagccttttccggggggaaaaaaggatccccttaaaaatacaaaaaaaaaaacgggggggaaaaa

SEQ ID NO: 24057 - DNA, 548 bp, Glycine max
  Clone ID: PAT_MRT3847_121724C.1
ccaaaagaagccgaaaaaattgcagagggtgcggcaaggaataaggggacagggaaccaaaaaaggcccccaataatccaacaaatcgttcttaaacccagaaaggggaactaaagggggacctaatggcaaaacaaaccaaaacgccccccacttgggggcgccgggggtggggtaccttacaagggcacccctccctgtttcccttcttaggaaacccccaagggacccccccaaaggcaaaagccaaggaaagggcccggggaaggaagggggtgggtatctaccccaatttttgaaaaaagccccccgggaaaaccctgaaaaaaactttttgaaaaatggggccaaggttagggcccccggaaaaattttgactgcccaaaccactgaaaggaccccctaatttaaaagcccgtttaaagggcggcccacccgggaaacccccccacaaaccggggaaaaaaccaaggggactggaaactaattccgagcccaattacgcgtttatggaaccgggaatgccatttaaaagggcccctaaaggg

SEQ ID NO: 24058 - DNA, 688 bp, Glycine max
  Clone ID: PAT_MRT3847_121725C.1
cccacgcgtccgcccacgcgtccgcttaacttcgtattgtgtcttgagatttttttccttgcacagttgggccctttgtcttccgtgatggccaggtgaagtcttttaaggaaaaggatgaagtggatgcgtggcttttcagcaaccctatgcggcgccttgaagcgcttcattttcggagagaaactacattgttataagctacgatcttcataccaattccaccagtcttcagcagcgatggaagtacgaggatcccacggatttgtttcatcttcctcttcagcttgctgccgatagggaaattgtcagataccttattggtggtgtgaaaatttttaaaattaactcgttatattctgccataattgaattgtatttgtgtttcagagtttggaattggtgtttctgagggaattcgcgcacccttccatgaatcctttctctactgtggcttcaaattttcggatcctctcacccaagtacacacttttagtccatgaccctaggaaattgtgccatagttttatgattaaatttactgttactgtgtggtttttttgttcacttaggcaatgaatatgatggggctttacgactttgcttactggttttcctggctcatctgggaggcagttgtcacgatcctatcgtccctccttataatttcttttgattgcattattat

SEQ ID NO: 24059 - DNA, 1312 bp, Glycine max
  unsure (1)..(1312): unsure at all n locations
  Clone ID: PAT_MRT3847_121726C.1
aaaagcatgattcttacctgcaatggacttggtatcaatcagacagacagatggtatttattttgatttttttttcctgtctttctgtgcactgttgttcaatggcagaggtgggattcacctgctataaagtcttgaatgtaaccatctataatgtcttgaatgtaaccataacaaatcctgtcgatctatgaggaatttcaaaatgaacaggactaaaatctgtttctagtgaaaacttgcattaccgtatagagaactatataattggttctttccacgcaaccacttgaactttattttctctaaagcccaacatttacttcaagggctctaaagtcaaaactatattttggatgtcaataaaggttttagccattatgtgggggaatgtgttgtgttatttttaagtgagctaacacaattaactaaaaactggcataggatgcaactcgacgtagatgtgctcaaggagtatgataattttggtcgccacagctttgatgtgatactttgtaatcaatctcagatccgaaccaccttgaacagttgaacaacagatttaatattgtaacaagtatttctacgtagtgctttgaatatttaataacatttggagaatttaggagacactggtcttctgttggattctttcattccattatgtcttaaggccaaaacactttgaaacccaagcttctgtttttttacttctgggtcttcctatatttcctaacctaagtaataaacccaaaatccctcatgatttattgataagccttgaaaacatcaattcatttgatattggattacttttttgcataagctgttcaccgcnctcgaaaagccttaatttcggcccttgactgcccccacgcgtccgccccaactgaacatctatttttgtaaatggatctgcggtatatctgatgtaagttttatttcttattcaactctaatcttacctaaccaaaatttaaatcttgtgctataatgcaggtcacaacaattgattgaaaattttgagtccctagataaataaggcatctaaatctcaattttggccagtggagagtgatgaataaggacatctaagcgtgtctttttcctttaacatgctcttaaattccaccccactcgatttcaatgagatttgaaacctccataattgaccatgcaacctggtctgattgaatcatacatactgtaacattatgctactccaatgtgtacgtttagaatgatctgttgtgataaacctttaagtccttgtacaagttttctttcatgcaatcttcctcttagtttggtt

SEQ ID NO: 24060 - DNA, 165 bp, Glycine max
  Clone ID: PAT_MRT3847_121727C.1
acgcccacgcgtccgcagggatacactctatgatctgtctgaacctatgttcaaatttattaaggtggggatcgtatatacctgcgcgacatgcattttggattatttaggcttctatgaagctcgtccgataactattttgtagaacaaagctaagcatcaatt

SEQ ID NO: 24061 - DNA, 749 bp, Glycine max
  Clone ID: PAT_MRT3847_121728C.1
caactcgctcctaccaagtttatccttaaaactttaagtatatatgtggtgacgaggttttaaaaatcaaatcgcgaatcatcactttaacgaagcaaattggatatttgttggattattcttcggctccaccttcacctttaataaggcctcatctccacgcgacagtgtattgcgcacacatagaaatttccttaaaaaaatgtctgagaaggctgctcttggatcatggtcgagtggcttgtgcggctgcttctctgactgcagcagctgttgcctcacgttctggtgcccttgtgctagtttcggaagaataggagagatcgtggacaaaggaacaacttcttgttgtcttcatggatcacttttctgcctacttggtggtttctcttatttagcgggtatctacgcctgtatgtaccgtacaaaaataaggaggcaatacgggattgagggacaccaatgtgcagattttttactcagttgcttctgctctgcttgcaccctttgccaagagtatcgtgagctccaagcccgtggattcgacgtctctgctgaatgcatatataggttggaaagggaatgtccaaatgcgcacgagtggcgtgacggcggctccggtagtgaacggtggcatgagccgttagggcaggcgtgtttgtcctttgctccgccagcgtgatgatgccttgcacttatacagtggatgttgatcgatgatgctcctctctcgtgatcatttcgtggct

SEQ ID NO: 24062 - DNA, 161 bp, Glycine max
  Clone ID: PAT_MRT3847_121729C.1
ccctaactccccaaatttttactaagccaaaaaacttagttttcaaactacagaacaaagtttaaaaaataaaatagaagcttgttttgttgtggattccaaagaaaaagaaccacctttttctaaagatcaaaaggcttcccaccataatctttaaaaag

SEQ ID NO: 24063 - DNA, 530 bp, Glycine max
  Clone ID: PAT_MRT3847_12172C.1
ttctgtttttggtagtttacttgttgcagagctcgcagtgggtttactgactccactataatgatcaatacaatcatgtgcttatcccaaaaggctcatcatgacctaccgctacattaagtgtctctgcatctatcttctaggatctgatgatctcacaccctaactaatttaacatcgtggataagcctctacaccccaacacacgctggaagcacaccctgacttgtggcagttacgaataaacatgaacccttggactcttttacttgatgaactggggcttcatactgaacacgcaaaatgctactatgggtgcccgtcctgcactggcttggggagattcaagaggctacaacatcactttcctcctggggcgtccatcctaacttatgaggatggtgagcacctaatgactctccccgtgaatgtcgataaaggtgtatacttgatgggcgccgccctataattcgccgaatctagagtaggatcacgagacagatccaacttgaccaccattgttgatactc

SEQ ID NO: 24064 - DNA, 315 bp, Glycine max
  Clone ID: PAT_MRT3847_121730C.1
cggctcgagattctctacattcaacttgcacatgttaaattatcaatctagccttgttcgttgtgtgcttggctctttaattatgcttcagtacgtggagtgtcccctattcgacatttatggctttcagtgaacattacccatagattttaaaccaggcatagtactataagtactttcgcgagataaaccgctgagtatatagtaggtaaatgggaacaacatgatgcatatttatatccattgtcgctatttaatttccactttggctctttaagtatactgactaatctatttcacctggttatattattc

SEQ ID NO: 24065 - DNA, 1135 bp, Glycine max
  Clone ID: PAT_MRT3847_121731C.1
ggcacgggtaacttagttctgaataaacgcgaaagcaacacttattacggctgcgagaagagacagaagggggacgaattcaagggtagataagaaaaagaaaaaatgtgtagcctcgagaagcgtggcaacgcctgggtactaaccctcgacggcgacgacggcgacgtccaacaccgcctcaacccaaccctaattgattccctcctctcaacgcttaaccgtctcgcatctcaagccactcccggctccgtcctcgtcaccaccgccaccggcaaattcttctccaacggcttcgacctttcctgggcgcgcgccgccgcttccgcctccgccgccaccgaccgcctccagttcatggtggactccctcaagcccgtcttggcggcgatcatgtcccttcccatgcccaccatcgtcgccatcaacggccacgcctccgccgccgggttcctcctcgcggtcagccacgattacgtcctcatgcgcagcgaccgcggcgtgctctacatgccggaggtagacctcgggctgccgctgccgggctacttcgccgccgtcataaggtccaagatcaggtccccggcggtgatgcgcgacttggtgctgggcggcgcgaagctaacggcggcggaggcggtgaggatgggaatcgtggattcggcgcacgatagcgcggagagcacggtggaggctgcaatgcgcctgggggagcagttggcacggaggaagtgggtgggtgaagtgtacgcagagataaggaaaagtctttacccagacgcgtgtaaggttctagggttgactcagaaagcgatcgtctccaagatctgaatcaatgaatctctattatttcattaatccgtgtttggattggctttttcttactcttggacgcgcatcctcctgcaacaatataaagcggcttctacgtctttctagtagatacttacgcgcatccaaacgccacacaacaaacaattattagttaattatttttgtttgttgtacttttgtatcttttcctggacccgaaagatccgctttcacttatcaataataaataattttttttttttctaaaaaaaaaaaaaaaaaaaaaaaaaaaaaaaaaaacacccaaaaaaaaaaaaaaaaa

SEQ ID NO: 24066 - DNA, 256 bp, Glycine max
  Clone ID: PAT_MRT3847_121732C.1
tctttgtctgttgggcttttagggtctagggttagggttagggtatcggatagaggttctattgccatcacagcaatagatcacaagatgggaaggcatcaagctatattgaacacacatgtcagaccctagaaacagattcctgcacctactggactttcatttacgagtccgctgccactgactacatcatagaaaaacggattgactatctacctctaaccatgactgcagaggacagacaccattttttact

SEQ ID NO: 24067 - DNA, 320 bp, Glycine max
  Clone ID: PAT_MRT3847_121733C.1
aattcaagcacaaatgttcctctttttttgggaaaatgccttattcgaagcggaatcaattgaatgcccaccaaacccacgcttgtggggtgctggatttgcccatgggggatgcctaccatcaatatatgtatcccccacaccatcataaattccaatcatccccttgttataaatcattcaatcgtgtggattgtttactataccattcttgtgtggctcaataaaaagtgcactgtggccagtccaattggtccattgaggggattgtcccttttgtgctgaatgattccatgtggctcttaacaaaatttccaact

SEQ ID NO: 24068 - DNA, 811 bp, Glycine max
  Clone ID: PAT_MRT3847_121734C.1
gaaactaaaatcaatcatccaattgccataataaaaattcccaagtaactcaattaacttgaaacatagtatacgaaacaaaaggtgctgttcaagcttcaaaagcagctcataacaaatataaaggaaaatgatcgacaaaactgacataatctaggaatgtaggtcatcagataactagcttcaagggcaatttaagatgaagcaccacttcgaagagcacccttcttcttgcttgttgccaattgggtctcagcctctttcttcacaggctcttccttctcagacaatatcagctcaatgtggcatggagatgacatgtaagggttgattcttccatgagctctgtaggtacgacgcctttgcttctgtgcttgattaacctggacatgggaaatgtacagagcatcgacatccaaaccttttacctcagcattactctcagcgttcttcagcaaatctaggatgaacttagctgatttgacgggccagcgtccttgaccattggagtgtctgctcttagcctgggctgtcctcccaacaccaccacagaagcgtcggaaagggatggcctgtttgtgggccaaaacatcctccaggtatcttttagctttaaccaggggcaacttcctgatggcaaaggcagtctccctagtgttcttgaaatgcactctaaggtcagcgcctctggccttgcaggacttggtgggattgtcgggttctctggagtacttcaccatggctgcggcgtcttcttcttccgcaaggttgaagcagagcaacggctgaaggaggaagaaaaactagggcc

SEQ ID NO: 24069 - DNA, 1151 bp, Glycine max
  Clone ID: PAT_MRT3847_121735C.1
ctgaacaagattctacttccgtgaattcccagcagcagggatccacagaattgaaactaaaattaatcatccaattaccataataaaaattcccgagtaactcaattaacttgaaacatagtataccaagcaaaaggtgctgtccaagcttcaaaagcagctcataacaaatataaaggaaaacgatagacaaaactgacataaatcaggaatgaaggtcatccagtagcttcaagggtaatttaagatgaagcaccacttcgaagagcgcccttcttcttgcttgttgccaattgagtctcagcctccttcttcaccggctcttccttctcagataatatcagctcaatgtggcatggagatgacatgtaagggttgattcttccatgagctctgtaggtgcggcgtctttgcttctgtgcttgattaacctggatatgagaaatgtacagagcatcgacatccaaacctttcacttcagcattactctcagcattcttcagcaaatctagaatgaacttagctgatttgacgggccagcgtccttgcccattggagtgtctgttcttagcctgggccgtcctcccaacaccaccacaaaagcgtcggaaaggaatagcctgtttgtgggccaaaacatcctctaagtatcgtttagctttaacaaggggcaacttcctgatggcaaaggcagtctccctagtgttcttaaaatgaactctgaggtcagcgcctctggccttgcaggacttggtgggattgtcgggttctctggagtacttcaccatagctgcggcgcttcttctgcttccgcaatgttgaagcagagcaacggctaagggaagaagcaacccttacatgtcatctccatgccacattgagctgatattatctgagaaggaagagccggtgaagaaggaggctgagactcaattggcaacaagcaagaagaagggcgctcttcgaagtggtgcttcatcttaaattacccttgaagctactggatgaccttcattcctgatttatgtcagttttgtctatcgttttcctttatatttgttatgagctgcttttgaagcttggacagcaccttttgcttggtatactatgtttcaagttaattgagttactcgggaattttttttttggtt

SEQ ID NO: 24070 - DNA, 302 bp, Glycine max
  Clone ID: PAT_MRT3847_121736C.1
ggactaaacctagatgattggactgtatgtttgtcgcttaaaccgcattcgaaatctctctaacatatctactggtgctcccatacgaatccacaaccagacggaatttacaaaaaacgttatcatgtttgacgatgacagagaggagaaggcctttggtctcacttttgcggaagctgggactatgtacatgagcgccgctgagattgataacaaggccttgcagttagattttacgaaatgtataccatagacatagataagtgacctttgcgagaaatcgtgattctatattatgagag

SEQ ID NO: 24071 - DNA, 871 bp, Glycine max
  Clone ID: PAT_MRT3847_121737C.1
gatcaaattaacaaaactagtattttcttagccacacgtactcttccacaatgtcttcctcaaagctcttcaccacttttcttttctcactaaacttagctctccttctccaaacatcttttggagccgaccctctcttccatttctgttcaaattctgagaacttcacagccaacagtccctatgaatcaaacttgaaaacactcatcaactcactcatctacaagaccccttcaactggttttggtgttggctctgtgggccaataccaaaaccaaaaggcatatgcgcttgccctttgccgcggcgacgtgtcggcctcagagtgcaaaacttgtgtctctgaggcacccaaagaaatcctcagtcgctgtccatacaacaaaggtgccatcatttggtacgactattgcatgttcaagtacttggacactgacttccttggcaaaattgacaacacaaacaagttctacatgtggaacttgaaaaatgtgagtgaccctgcaacgtttaactataacactagagacttattgagccagcttgctcagaaagcttatgtgaataataaattgtatgcaactggagaggcgaagcttgagaattcggagacactttatggtttgactcagtgcactagagatctttctagcagtgattgcaagaagtgtcttgatgatgcaatcaatgaactcccaaattgttgtgatggcaaagaaggaggtagagttgtgagtggaagctgcaacttccgttatgagatatacccctttgttaaggagtaaatactcgaatcttatggatattgagcctcatcagttgtaaaccttattacgctatttgaatagtgcatgaataaattaatggtttt

SEQ ID NO: 24072 - DNA, 2366 bp, Glycine max
  Clone ID: PAT_MRT3847_121738C.1
ccggaattcccgggtcgacccacgcgtccgaaaataattcctttttctttcggctcgagctcctttagtttactacatcaacagcaccgtcttactcgaagtatctgatttcaaatcttggattcgattccatcacttatagttctctcttctctttcttttcctttctttctccgccgaagatggcgccgcccacgccagcagttgaaggcgcccaggcgccgcaagggcggcagcaacagccgcaaggagggtttggcctcaccggaatcatacgcatggtcgttttctggtacttcgcttccaaattcttttcccccaaaaaacctaccgaaccttccgctctcatctccaatctctttcagaaagcacagcctctggatatgtggctttatctctccgagcacgagaagttcaatgactttggcagtgaaagttctcttgtatggcatgaaaccaatgttccatatgctgtttggggacctgagagtaccaggactcatactttgaagtatcatccgtcggagtctttgaagcataatgggagtctatatgctcatgttttctttgcgcactctggcttttcgcctgacccaagtgatccggagtaccaacctcaagcagcgtttggaaggacgcatcctgttgtgacgtacttgcccaagtcaaaagcagataaaaagaaaagtctgctgggaagttcaccagattctagtgaggctcaagtggcatccaaggtggttgatgaatctgaagatgatgatgattctagtgatgatggtgattctaatgatgatggtcctgtggagtgggcttcatattggaaaccaaatataacaataaacttggttgctgacttcactcagtacccaaagacaggtgtagcaccaaacattgctccttacttgaatgtcgatcctcttactgggaactactatccaattgtttatttcaatgagttctggttactcagggataagctgatacctttaaacgagacagtgactgaattatcacttaacctggaagttggtcccattagtatgacaaagtggcagttattcctgcagattgaccagtccttccagattcaccgtagttatggaagcatgcttgaaggcgaggctgatgaactcaagagggtattcttggaagggaatccttacctcctggcaattaccatggttgtttctcttctccattcagtctttgacttcttggctttcaagaatgatatccaattttggaataaaaataaatctatggaaggactctctgcaaagaccgttgttgtgagctttgcttgtcagcttattatcttcctttatctgcttgacaatgacacctcttggatgattcttgcaagctctggaattggttgtgttattgagttctggaaaattggaaaagccatgcgcatagagattgataggacaggaaggatacctatgttgaagctccgcgatcgagagtcatatgtacggaataagacaaaggaatatgatgatattgctatgaagtatttgttctatgttctatttctccttgttgctggtttttctgtttactcgctgatgtatgagcgtcacaagagctggtattcttggattctgtcttcgctcacaagttgtgtatacatgtttggctttattatgatgtgccctcaattgttcatcaactacaagctcaaatctgttgctcatctaccttggaggcaaatgacatacaagtttctcaacaccataattgatgacctttttgcctttgtcattaaaatgccaacactccatcggctttctgtcttccgtgatgatcttatctttgtcatatacttataccagaggtggatttataaagtggacaagaaacgtgttaatgaatttggttttggaggcgaggatgatcaggttgtggcagagacagacgccacaaaggaagaagagaacactacaacggaagaagagaagaaaactaattgatttggttttctctaaacaatttgagaaaattttacagtagataccaaatactgtagaattctacggggattggtttgtttttctcccccttttgttacacatttgcatttagatttttgttgaaagaaagctttagtttggccttgtctactggaatttttactaggatcgaaggattgagggaatttaactactgaaaccttcatggttgactgtaatggtcataacagctttttagttaccccctctgtagtttttctttgatctcaaatgtcttttagtttgtgatagataacccttttatatgtattattttcttccactcatgtatttttaactaatttatccctggttttgatttatttgtaaaaaaaaaaaaacaaaacc

SEQ ID NO: 24073 - DNA, 578 bp, Glycine max
  Clone ID: PAT_MRT3847_121739C.1
ggacgcgtgggttaaaaggtaaagtaaaattggccttccaactcaatttcctcattggactacttcgtctttgcctgcgcactgccaaaataccacagtcagagtcagagactcctcacgcatacacatttttacaatattcttatttatttattattattataataaaaacaaaataaaaaaagaagcagattcctcgttcctctttccgattttacatttcttgcagaggccaaccggggggtttgtctcagagaagaaaagaatctcgtcgtcggaaagaagagagaccgagagcgaagatggcttcgccgtcgaccacgggtgacacgaacaagattgcggttcggtcgtcgctcgtggaatcgtttcgcggctgcggtatttccgggatccgaattgacaaggaggagttgaagaagcagctgacaatgccgcagtacctgcgctatgcaatgcgtgattccattcggcttcaggaccccgtcgccggcgagtcccgctacatcaaccgtgccgagggcgaggacgccgccgctccgctctgccccatggtcgtcttcatcaacccccgcagc

SEQ ID NO: 24074 - DNA, 1190 bp, Glycine max
  Clone ID: PAT_MRT3847_12173C.1
ggttggtagcttggaagatgtactgagaaaaatggagatgagtgaaaggaattcaggatgggaggatttgatttttattccaccaggaaaaagtcgctctcaacacataggaaagtggctatcgctgggacagcttttgtttgacagcacagcactcggaaatttctggcgatctctgcgttttcccctattttttctgaatcccacagaatggcatccaacaggggtcaaggtggaattcagcagttgttggctgctgaacaagaggcacaacggattgtgaatgctgcaaaaaatgaaaaattggctaggttgaaacaggccaaggaagaggctgaaaaggagattgctgaataccgagctcaactagaggctgagtttcaaaagaaagtgtcagacagtactggagattctggagctaatgtcaagcggcttgagcaagagaccgaagaaaaaatccatcacctgaaaacggaggctgcaagaatatcggatgatgttgtcgccatgctcctcaagtatgtgacaagtgtgaaaaattaggaccctttgatatatattggtgctgaggactcctaaattatgatgattattattctgagttgattttttactctagatattctggtgcgggtgagcttcttgttttggttacaacgcttagtaccttgctgcattgtactcagtccgaaatgacttcaaatttgttaaataatcacttcagaattaaaaggcgagtgattttgtttgctgttttaacaagaacttaatgaatgattccttgggtgtgaatttaagctcgaaatgcatcatataataataatccatgatttcatgtggttttcttgagcaaattggatgttactgttgtgacaatttagtcggctggtgagatgctaggacctctgtcttcaaatagttgtgctcttccttctgaggcgaatactgcactaagattctcagtggatataaggtaaatgtgtatgtgagaggacgtaaacgctaacatacatttcaattaagaggtcgttccaccatttgttgagcatataaataccaaatgtatgaggggtgttcgtactcatacatgtacagataatttatttgttttggcaatagctgtaatccttttccttgaattctacttttattagttcagggaagagaatgatcttcatttacatttgata

SEQ ID NO: 24075 - DNA, 820 bp, Glycine max
  Clone ID: PAT_MRT3847_121740C.1
cacgcgtccgcaggggttggagaagattgcgtggccacccagttctaaaataattccttcttcttcttttttttccccccttttcggctttagttactaataaaccatatactacatactacattagcaacaccgtcttactcgaagtatcagttttcaaatcttggattcgattccatcactgatatttctcttctctctctctttctctgccgaatatggcgccgcctgcgccagcagttgaaggcggccaggcgccgcaagggcggcagcaacagccgcaaggagggtttggcctctccggaatcatacgcatggcagttttctggtacttcgcctccaaattcttttcccccaaaaaacctaccgaaccttccgctctcatctccaatctctatcagaaggcacagcctctggatatgtggctttatctttccgagtacgagaagttcaatgactttggtagtgaaagttctcttgtatggcatgaaaccaatattccgtatgccgtttggggacctgagagtaccaggactctaactttgaagtatcatccgtctgagtctttgaagcataatgggagtctatatgctcatgttttctttgcacactctggcttttcgcctgacccaagtgatccagaataccagcctcaagcagcatttggaaggacgcctcctggtgtgatggacttgcccaagtcacaagcagataaaaagaaaagtctgttgggaggttcaccacaatctagtgaggctcagggacatccaaggggggtgatgaatctgaagatgaagattctaaggatggatgggcctgg

SEQ ID NO: 24076 - DNA, 677 bp, Glycine max
  Clone ID: PAT_MRT3847_121741C.1
ccacgcgtccgatgatgtgccctcaattgttcatcaactacaagctcaaatctgttgctcatctaccttggaggcaaatgacttacaagtttctcaacaccataattgatgacctttttgcctttgtcattaaaatgccaacactccatcggctttctgtcttccgtgatgatcttatctttgtcatatacttataccagaggtggatttataaagtggacaagaaacgtgttaacgaatttggttttggaggtgaggatgatcaggctgtggcagagacagacgctgcaaaggaagaagagaagaaaactaattgatttggttttctctcaacaatttgagaaaattttacagtagatacttaatactgtagaattcaacggggattgatttgtttttctccccttttgttacacatttgcaattagatttttgttgaaagaaagctctagtttggccctttctactggaatttttactagtaccgaaggatggagggaatttaactactgagaccttcatggttgactgtaagggtcataacagctttttagttgcccttctgtagtttttctttaatctcaaatgtcttttagtttgtgacagataacccttttatgtattattttcttccactcatgtatttttccctaatttatccttggttttgaattggt

SEQ ID NO: 24077 - DNA, 354 bp, Glycine max
  unsure (1)..(354): unsure at all n locations
  Clone ID: PAT_MRT3847_121742C.1
cggctcaagattgtctcactaccatttttatctccttttcataccaaccgcacacacacnactgctattttttaattataaagtctaacaataatcccctaattttatcactacctaaaaattccctaactgtcaatgcaaacatcatacactctttttttaattacaatataaaactttcaaatgaacccctcaacaaacggatgtaacatcctgaaattaattgaatgtgaaaagctcgacattaccttattatcgttcaactggcttatatgctcctgctattattgccacggactaagcacaatcatgtaactagttactaactataagacccatctaaccaaccccata

SEQ ID NO: 24078 - DNA, 642 bp, Glycine max
  Clone ID: PAT_MRT3847_121743C.1
aaaaataaaaaactgttagaactattgctattagagtatattagtaatacttgtgatattgggcattaaggccttaagcccaattatgtagtatgcatttaaatagactttttcaatcaattagaagtgacaatattttctcacttaacaacaaaaacattgacttagtcaatacaaacaattcagaactgacaacaaaacataaccttcagattcaagtacaactggtacagcagatgcccttgtttgtcatgacactaccgtatcttggccatccaagatgaacataaataccacaagtctccaaacttctttatttggggcattcttgtcagcaagcattatagaattcgttttctttctgccttcttcagccactttctaccaatattttccttggtagccaagtgcaaacctgcctccagtaagctaggactagaagatgtgtccaaggtagtacgaactgcagatactagttgggcccgatattgttccagcagaagatgcccaggaagctcggggtcagctgctttttcaaactgagcatgtgaggcactagaaaaaatgaagttaacatgttcgtatgtatgatcttcaacatattcaataaaacttcatgctgcactgtagggatagctaatg

SEQ ID NO: 24079 - DNA, 499 bp, Glycine max
  Clone ID: PAT_MRT3847_121744C.1
agcaacttgagaatggagataaaactgaacaaattgatgaaaaagccaagaagtcagacgtagatatggaagaaactgatctgaatgatactaacaataaattagaaaatgattcagcggaaattaagaatagtcatgtgaaaggggaaaatgtgattactgaaaagcctgaaggtgaagaagcacaaaagcttgaaattgaaccagcagagaaagttgccgaagaagcggcggacactgaaaaatcccaagggcccctactgactactgaattagaaaaagaagagaatgaggagaaaacagatactgtgattctagatgctaatgggggagtcgagaaagagaatcctaatgctgctgcagaaatgtaatggggttatttggagctgtgcacagtgaaacacttcaacatttgtcatactgttgtgtaagctgtagaaatgtactgtactgttgccccatgacttttgtgatgctattttagttattttgtggcctt

SEQ ID NO: 24080 - DNA, 223 bp, Glycine max
  Clone ID: PAT_MRT3847_121745C.1
attatctaagaagacccagccatggatcattgaacaaatcactcccgggagagattctatattcctctgccatagcaacatatacaaatacaaaacatatgaaacctactaaagtcacaaatctaagccaatcgttttgaagcatttcatccttaaagaactttttactaacctttttgcatgatgcaaatttccaaaaactaatatatatccttccaaaaca

SEQ ID NO: 24081 - DNA, 124 bp, Glycine max
  unsure (1)..(124): unsure at all n locations
  Clone ID: PAT_MRT3847_121746C.1
gtatttttaaagtttatntttgaaggattttntccccttggaacattgatacatatgactattaacatcaatgnttcaatgttccaaganatcttatattatnntattaanaaaannnggnnng

SEQ ID NO: 24082 - DNA, 279 bp, Glycine max
  unsure (1)..(279): unsure at all n locations
  Clone ID: PAT_MRT3847_121747C.1
gtnacgaggctccgagaacggaagcgccacaaganggtttacccgtttcngcggtttnccggtggcnccggcggagncagacganatggaccaatctaatgcctctggtcgtgggcctncgtcgtcgttgcggagatcgcgtttctgggaaggttggacatgggccaagaacgcncagatggttgacacncctccgctgacttcttctacngtttctnccgcggtggttgaaagtgaganttgggggtggggcaggtggcaggtggtggccggcggtgg

SEQ ID NO: 24083 - DNA, 290 bp, Glycine max
  Clone ID: PAT_MRT3847_121748C.1
taaaaaaaatatctatttaaaaaaaccaaaaaaccaaaatggagggttttaatttaaaaaaaaaaaaaaacaaaaaaaaaaaacaaaaaaaaaaatgccccccccccaactaaaaacctcatcaacccaaaaataaattccaacccgaaccctacagccaacccaccttccctaataatgagtcgtataaaacctttcctaaatcatagccaaacccatatcctgtataaaattataatcctttcacatttccacacaacatactacccataacctaaaaattaaaaccc

SEQ ID NO: 24084 - DNA, 459 bp, Glycine max
  unsure (1)..(459): unsure at all n locations
  Clone ID: PAT_MRT3847_121749C.1
agggcaaacatggttgggctaccttccctagtagagatcctcatcatacagattgtgagtcatgttagctcggctaatattgtccattcaaatatttggggccatagttgtatcctctctatcttaggttttaggtactatgtcacattcattgatgatttttctagacatacttanactcttcttaatgaaagaatgttctgaattgttctttgtatttcaaaagttgtcttgaaatccatacccaatttggcaataaaattcgtgctttgcatagtgacgatgcaagagaatacttttttattcttttttcacttttatgacctctcatggtatgatccaccagtcctcttgtccccacacactgcaacaaaatggtgtcgccaatcacaaacttcagcatattattgacactgcacgtaccctcctcactcactcaaatgcaactntaaaattttg

SEQ ID NO: 24085 - DNA, 253 bp, Glycine max
  Clone ID: PAT_MRT3847_12174C.1
aattaaggatttttaatttaaatattgtaatttaatacaaaagactcggggtttgggaaacaaaaagggcaaacgaaaacgggacaagaaaaaacggaagggtcggggggacgcgggtgtcgaactggaaccagaaagaggacaacgaaaccttaaagggatcccgtttatagcagggggaatggaaaaaaagatttgcgttcaaatgaaattaaatttgcgatggggaaacataaaccggaaaacccggggg

SEQ ID NO: 24086 - DNA, 594 bp, Glycine max
  Clone ID: PAT_MRT3847_121750C.1
gtaaaagacttttgtcagccccttctttgagcgaatttgataaacctgatcaaatacacattaccagagcatataacacaaaattattatcaagcaaccaaatataacaagggaaaaaaatctctccttttgtgaccaaataataagtctttgaacaaccaagtttggattaattcaacagcttcaatgaaataacttcattggtgctacttataaaacctaataaatgtaggaagaaatgaagccttatcaattacaaagagcaaactgacacaaaaaatatcaaacctaacttatctaactgacttagtttaaataaatggatttcataccttaatttgtttgatgtctgaaatgtcagcaacatgagagttgatgcgaggattatctcctatcctcacaatgaaacatacagtggtgcagaaaagtaagaacaaaaccagatttatgctagagatgaaattaacattgttttgtatcctttaatatagtataagcccggaatgtacaaaaatgtaagatagtgaatgttctacgtcagctaatttcaaacaatagctccaggtccattattttaagtttataacaaagtac

SEQ ID NO: 24087 - DNA, 688 bp, Glycine max
  unsure (1)..(688): unsure at all n locations
  Clone ID: PAT_MRT3847_121751C.1
acggctgcgagaagacgacagaagggtacggctgcgagaagacgacagaagggtacggctgcgagaagacgacagaagggtacggctgcgagaagacgacagaagggaggaggatggagaaataattagtgaatcttcttcaaaatctgccccatctagcgatgaagatgagcatgaagaggaaagagagtcagaaggagatttgttcatgattagaaggatgttgggtagtcaagcagttgaattggatgattgtcaaagagaaaatattttccatgcaaggtgacttatccaagggaagttacgctctttgatcattgatagtgggagttgcactaatgtgcctaatgcaaggttggtttcaaaaatgaatttggagactaagccacacccgtggccgtacaaacttcaatggcttagtgaagatggtgagatgattgtgaataggcaagttgaagtgggattttccatagggaaatatgaagattatgttttgtgtgatgtggacctatggaggcttgtcatttacttcttgggatgccttggcagcatgataggagagtcatgcatgatgggttcaccaataagttcacttttgtgcataaagattgcaaaactactcttgcaccattggctccaagaaaagatggtgaggtcctnnnnnnnnnnnnnnnnnnnnnnnnnnnnn

SEQ ID NO: 24088 - DNA, 167 bp, Glycine max
  Clone ID: PAT_MRT3847_121752C.1
gggaaaaaaatgacatcattaatctccgttgggttagtgcttaagacattaccggggaaaattggcatgcttcaaggatcctaaactgagggttttccttcacccactttaacaatgaagcaacatacgatttctgcaacaaaataaccggtcgggactaatggaga

SEQ ID NO: 24089 - DNA, 240 bp, Glycine max
  Clone ID: PAT_MRT3847_121753C.1
tacgggtgcgagaagacgacagaagggggaattgaaatagtttaacatccccaacacccagcttaaagaaaagagacaatgagtgacacaaatagagcaacgggggagaacagccagagagggttaaaggaatgggttttattgtctcagggtctattgagcatgatattagtgccagagtttgttactggattgcaactactatcaaggggtgggttagttcaagggtctttcctcttt

SEQ ID NO: 24090 - DNA, 600 bp, Glycine max
  Clone ID: PAT_MRT3847_121754C.1
aaacatggtacgtaattgtttcagaagagatgaagcccagcgattaaaaaatatgtgtttaaattagtttaaatatatattttgtttgtaaaagagtttttttaaatacttatttctaaaaaataaattaaaaaacagataattaatgttagctactatttagcatcaatttatctcgtaggatatagtttctttactcttaatagtaattaacaatatatataagataaaagataaaacaacaacaatgaagaaaaaacctcaagaggtgatttactctaaactaacatgggatgcgtgattatagtttatagaatcgtttattttattgtttcattatgtacgagttaagagattcacaatgttgatttattagtggtagctggattttgctttcatgtgttgtagaacaaatcattgatcgttgtttgagtggattatatgaacaggtacttgtaaaaaaacgttccaagacaaattaacagtgagagaatgagaatgattgaggtttgtacgaatgatcatgcctacccgagtgaagataataatattccttatatggagccactataagatatctcatagttttgtggaatcaac

SEQ ID NO: 24091 - DNA, 190 bp, Glycine max
  Clone ID: PAT_MRT3847_121755C.1
tttggttttttttttttttttttttttcacccacagaaggccaccttactgtttatatttatatctaggttctacaaattgagaacaaagagcatccccattaaggggacactcaagtccaccccaggcacgactaattttcaaagaggattactcccccctgacgcgtcccattcctttttaaaatgtt

SEQ ID NO: 24092 - DNA, 280 bp, Glycine max
  Clone ID: PAT_MRT3847_121756C.1
acccacgcgaccgagcatacataaggtgaaaataaacatcataaaaaaaaaaaaaaaaaaaaataaaataaataaaaaaaaaaaataaaattaacacaaataaaatttataaaattaaataaaaacatcaaagctagtcaaagggctccccctccataggattctcacttcatttggcttacgtgcaaattcttgccacttccaagttctcacccaaatccaattaatcgatcttccttttcaaatttctctctcggtaaaaccctgtttttacccactt

SEQ ID NO: 24093 - DNA, 348 bp, Glycine max
  unsure (1)..(348): unsure at all n locations
  Clone ID: PAT_MRT3847_121757C.1
tttttaacattaattaatctacacccacaacatacacatctaactaataatagcgcaattctttcacccagctagtcaaattaataatacaaaattcacccattataatttactattcacgccaaataacttntgtgtacatcatataacataacacagttatacatttcccaaaaaatactaatatataaccatttcaacatctttaccaacaacacagacacaatcaattttactatactatatactactgcaacatatacttccaccattatttcccccctaatttacaaaatttcctccacatctataatcaaattctctcttcaaattcaaatacctctacac

SEQ ID NO: 24094 - DNA, 470 bp, Glycine max
  Clone ID: PAT_MRT3847_121758C.1
gcaggtcgactctagacgagcatagatcttggtgcaggtcctccatatgtggatagtgttggagacgtcgacagaggagatccaactgcactgggggagaagcacaccaccatgacggtgtaggtatgctcgcagtggatggagatttgaagtgggcttgtagagcaagtgtcgacgctatactactaaaacaagatgttttaacatcgttaaatctaagtcgggttttttaaaaattgatgtagaaaataaggggtgacattttttaaattaaatccaacttttttaagatggttatataaaacccgtctttgataaaaggtgtttacataggtctttagaaaactgtctttgcttttatagttactaagacagtttttactgctaaccgtctttaattttaagttaaataataaattaaattttcattgctcatgcctgcaattccacttctctgtcctttattgctt

SEQ ID NO: 24095 - DNA, 148 bp, Glycine max
  Clone ID: PAT_MRT3847_121759C.1
ctcagctgtcagaatccattcaggagtcatgaaagaaaccgctaactgaacaaccaaggtaagaaaaaaaggtgttaatttgagcaatcgtcctcgtgccagtttcagatctcgctgagaaatcattgtataataatgggggtgtcaa

SEQ ID NO: 24096 - DNA, 822 bp, Glycine max
  unsure (1)..(822): unsure at all n locations
  Clone ID: PAT_MRT3847_12175C.1
tgcatgccctgcaggctacaaatataagaaaagcaaggttaaaatgaaagccgagatcaaaaaggacatgaactaagttgaaaaacataaaaaggaacgaacgggaatcttgttttacaaaagattttgccattattgactttattgtaaaagcaaaaacaaaaacttatttcgggaaacaaattttaaaaagaataatactattatggaaactttaaagacaatgagacaaactgctggcctttttcaatcatgcatgtgcggtttagcatcaaatcaggcttatatttcggaaaagaaaaaaaattatggaataaaattttaataaatccatccaaataatttggtattcctcaagagatgcaattgtattatgattatcttttagtacatcctttgagttatatcttaaataaaattcttgccaaaataaaaggtcagaactgatctacttctgaattttgcattacatgaaagtacaagttaatcattggtgaaccctcaaaggtcaaaattcatcaccatgaagaaccatgtagatattacagtcccacaattagcacagaagcttagttcagtccacattgataaccattttataagaagggattatacagtaacaaacaattctttagccaatcatatatatgacgattatttcatgcctggaagatacttacatttgaaactttcactgatgttcgcagatttctgggaagaggctctcccatgtctttactttcctttgattccaaaatgcgtgcagccgcaactgaacggngcaggatttcaggaagagggccaaatatgtcatttccactg

SEQ ID NO: 24097 - DNA, 341 bp, Glycine max
  Clone ID: PAT_MRT3847_121760C.1
gctcacttaaatagtttatctctcatttgacatgatatctagaaccaggttgaggaaataatgaaaaccgtccctcaccggggacctactgtcctcggggggcctttctagtcattgcacttatctcagtgacctgcttccgcttttcgacgaacctttctcctttttcagccattgctgaccaccatcacttttttggcgacactgtccctgggtgagcctttctgattgtctcacttattcttacgacctattttcgcttttcaatggctctttctctttctcaagcgacttttcgagccactatcgaccatcgtcactttttcgaccaacgccacaac

SEQ ID NO: 24098 - DNA, 198 bp, Glycine max
  Clone ID: PAT_MRT3847_121761C.1
acttggaaaactaaaagatcttcaaaacaataatgggacccaaaccctgtttatattaacagaacagcgcaaagcactttcttaggcagggaggactacttgcaggaaaaaaaataccccacagcgcatctagagggttggaaaattaacaggggatacttgcctaaccaaataaaagctttttttttagtaaaggac

SEQ ID NO: 24099 - DNA, 398 bp, Glycine max
  Clone ID: PAT_MRT3847_121762C.1
ttttttttttttttttttttttttttattttttttttggggtttttttttttgtttggttctttttggagacccaggtttcccacagggaaatttaaaacagcccggcgaagtcatcgacatttttttatacggaggaaactgaaagccgcccacaaaaaaaaacaaaatacgacccggaaggaaaaaatttaacccccggagagccaaaaaaaaaaacaaccggaaaaaaaaagggttgagctcacggcccccaaaaagggggggaaacaaaaaaatccagctgcagcaaaaagggggtaaaagggcgaaaaaaggggggtcgccaatggagaaaaaaagtggttaatgtggggggagagagggggggaatattggaacgaaaagaagtgctaatcc

SEQ ID NO: 24100 - DNA, 633 bp, Glycine max
  Clone ID: PAT_MRT3847_121763C.1
acctcccgttactcacatttgcatcctttctgtcatactcttatagtgcttacactttgatggtgcttgtacctatactctgggatgatgccgtgtctgaacctcaacctgaaccggtacttgaagagttctcaactctctccaccctccccactattgatgaaagctccagtgcttagctcgtaaaggacgacccttatgccgacccctgctcatcgccgatgactccgacgactcctgcgcccctcgtttcttactctcctgctgtgtccctactagaaagatctgcttcgcgtcctgggatcaacatcgctcacgatgacctgctatggtcttctgcctgaccaaccacgtcccaacgctcccactgactataactgactgatacagagcatctcacggatgctgacacccctggatctgaagatcttaactaatattgttcgtggagacgttagttaacattagtgcgacatatctttatgcatctgtcactcgatagcctctgactattgactatatatgtgcctgacacttattgctccgatgatgactcattccctctattgctattcgtggtataataatttcgaggatgtggctgatattagctaaaacctcccataccatgct

SEQ ID NO: 24101 - DNA, 463 bp, Glycine max
  Clone ID: PAT_MRT3847_121764C.1
gctcggaattcggctcgagcacctagatagctatgtcgtttacgctttgtcgatctgcgagtcgggtgcgaatcgggggcagactgtctataatggtggtgtgtatgcacgcgctcgtttccttcacgcgcctcgacgacgcgcgtcttgctcattgctgctactactgcggggtcgaggtccgagccctcgaggagcgcgtcgaggcgcgccacctcgagatccacgtcctgctcatggacagccaacgctcttgacggcatgcatgtggcgctcaagcatgacctagccgtcgctcatgaagagctccgccgcctattcggcactgacggcgaggtcatagccgagcgcgacgccgatgtgcacgagatctacgagaagtgactcaagggctacatcaaggtgctcaccgtcgacgtcatgaactacgagctggatcgcgttccggcggacgtgcatgagc

SEQ ID NO: 24102 - DNA, 366 bp, Glycine max
  unsure (1)..(366): unsure at all n locations
  Clone ID: PAT_MRT3847_121765C.1
caaactacttttctgagagcgtttcaaatgggggagacgatccttcctctggtacctggaaaacacaaaatcccaaccccatgggaatcgcttgtaaatgatcttncttngagaatctggggggggatgtaanaatctctctctctngaaaaaanacacaaattctggggaaacccaacctntgnngcgagggggggggtatanngggactccacgttngcaaaagggccnattggacttccaatccccttatctgaggggaaacaanaaccatacagggggggggggcactatnaatnggttacttttgacatcaactctnaggagacctgtgataaggggtacaaccttcttgctcataattat

SEQ ID NO: 24103 - DNA, 1160 bp, Glycine max
  Clone ID: PAT_MRT3847_121766C.1
gccgcgtcgtaagctcggaattcggctcgagggcaaagtcactgctccagggttcatctcttaaaccttcttatccgctccctaagctttcaaaaaccacgatgatgacagctaattgcgttagattcagtttcaactacaacaacccatgtctcttattcgcaaatgggtacccttcttcttcttcacttccactttctcttcagaataagcccagaaaatcagcatcagtgattgtgagtgcccgaaagaaagataagaaagaagatacccatagctctgttcccaaacccgatgaggtcacgggtttcttccccgaagccgtgctccttaaaaagagaacagttgaggaagaaggtaagcttctcccggagtttgaagacgctgaggaaagacaactctttgaagcgctgatgcttgagctagatagtgatatggatgttgaaatattgcgccactacgaggttatgtacttaattcatgagaagcatgaagaagaggttgcagctgtcaatgagaaaattcaagactttttgagggagaagaaagggcaggtttggagactgaatgattggggtatgagaaggctagcttacaaaataaaaaaagctaacaatgcccactacatgctgataaacttcgagttggatgccaaatatatcaacgatttcaagactctgttggaccaagatgaaagagttattcggcatcttgtgataaagagggatgaggcaatcactgaagattgccctcctcctccggagtttcatacactgcgtgcaaatgcagatgataatgatgatgaagaatttgatgaaaattatgatgatgactgggatggtgaagatgaggaggatggcaatgacggcgatgatggcgaaaatggtattatttttgtagatgacgacgatgacgatatagattctagaaatgagacaccagcaaatgttagacaaccagatataagaaaattgagggctgagaatgtaggtaggtaagtgggtgttatcttttatccttgattcctttgtttccataggaatgcagagcagttctaaactttattatggctctaaatataggaagatccaagtaactctaatttcttgtttgcttatatagtcgtattattaaattataaaatggttgtgtgatgaaaa

SEQ ID NO: 24104 - DNA, 904 bp, Glycine max
  Clone ID: PAT_MRT3847_121767C.1
ggatggagtgagggttttacgccaaagaagcaccgcgacgctgtctctcccactcttctccgccgccggtaaatgcaattctttctccactctttcatttccttacaaaaactaagagacgcaccttcgatttcgcatgctcttttttttgttctttctttcttttaattcaattggttgcacataaattccattttcattcttctccgcttgcttttcattacattaccatattctctgtgttccgctccgcgtgcgtgtgcgtctagggtttccttaacaattaacaatttcaattctgtaatgtatcgttgggagtgtgcagcatgtgaattagaagaagaggaggcgaatttgttaatttgttgtgagtgtgttcgaaatgggtgaaatctggtggtcccttttgggggcggcgatccccgtggtggtggcagggcaagcgtttcgcgtgaagaagcggcgtgcagaggagcagagactgcagagtgctcgcgggagggaaaggagttccgatgaaatcttcgtgtgtgagagggtttgcacttcaaagaggatgctcaagaaggttggttccttctccaaagaccccattcctgatacctgcgtcaccgtttgtggcgcctccgatcttgatgcctgtgctgatgcatgtgcccgcactgtctgtgtcaaccaacatcaagtgcctaactggatgacatttgcctcaggaggtgccagagtgaatgcctcaaactctcttctcagagtcactcctcgtagcagttgagttgaattttatttagtcaaatgtgtgtatgagtgtatacattgtggttcaatgctttgttccatcattttgactatggaatttaagaattattacgccaaattctatggaaatggaaatggggttattccc

SEQ ID NO: 24105 - DNA, 988 bp, Glycine max
  Clone ID: PAT_MRT3847_121768C.1
ctgcgagaagacgacagaagggggatggagtgagggttttacgccaaagaagcaccgcgacgctgtctgtcggactcttctccgccgccggtacggctgcgagaagacgacagaaggggaattcactctactctcttactctctcgctcacgcctcacacgttttctgtctcttgctcactctactcagttcccttcccaatcgccgctcagccatcaccgtcgccactcacggggagactcgccctcctcgaccgacgttccctccacatccttcaacaaagtttccggcgtctgttcgagcatgtgaatcataggaagaggaggcgaatttggtaatttgttgtgtgttcgaaatgggtgaaatttggtggtcccttttgggggcggcgatccccgtggtggtggcggggcaagcgtttcgcgtgaagaaacggcgtgcagaggagcagaggctgcagagtgctcgtgggagggaaaggagttccgatgaaatcttcgtttgtgagagggtctgcacttcaaagaggatgctcaagaaggttggttccttctccaaggaccccattcctgatacctgcgtcaccgtttgcggcgtttccgatttagatgcctgtgctgatgcctgtgcccgcactgtgtgtatcaaccaacatcaagtccctaattggaacgacatttgcctcaggaggtgccagagtgaatgcctcaaactctcttctcagagtcagtcctcgtagcagttgagttttatttagtggaatgtgctttgtctattccatgatttttactccagaattcagaatttttacaacaaattctatggaaatggaaatggggtttattccactaggtgctggttcattttgtgttcactgacttgagatctatatgattctttttttttcctgcctcatttttgcttttgcaagcatgcagaatttggaaggatgcagaatttggaatgatgaagtaacttgacctccatt

SEQ ID NO: 24106 - DNA, 239 bp, Glycine max
  Clone ID: PAT_MRT3847_121769C.1
cttctccagagaagctacttaatcaacaaaaaaggcacccattaatgggtgctccgtggccagcaaaacgtgctcaacttcatgctactccagctgcatcagccccgctattctctatagatcattccggataccggatccccgcctctcaatagctgattataacgcactcggactcgggaaaacatgctactcctttctctgaaccatttgcactctacaacgctcaacaacatctc

SEQ ID NO: 24107 - DNA, 445 bp, Glycine max
  unsure (1)..(445): unsure at all n locations
  Clone ID: PAT_MRT3847_12176C.1
gggacccacgcgtccgtcactctcgctcttgcagttattcctcttctcgcagtccgcgctaaaattctaggggtcccaaatgggcgctgacggggagagcaagaagggggcccgcggaagagaggggggggggccaaanaagaagccgggttcaaggggcgtgaaagccgggctccaattccccgtgnggagagattggcgtgatttgaggagaagggggggcgctcagcgtgtgngggccggtgctcccgtatacttggctgcgggtctcgagtacctagctgccgaggtgcttnagtgtggtgggaatgcggcacgtgacaacaagaagaacaggagtattccaagagacgtgcttttnggantgaggagctatgaggagttnnggaaattggttncgtgggtgacaattgcgcatggtggggtgcttccaaacattaaccct

SEQ ID NO: 24108 - DNA, 436 bp, Glycine max
  Clone ID: PAT_MRT3847_121770C.1
ttaaaaaaaaaccatttattcatcgggggattttcattcattattttcatcaattacaatttttcctctcctgcatcagaggaaatcacaaaagacctgacagatttacgtagtcaactgagggcggagggtgctcaattagtagtacattagggagggctaattgataaaaaatcatttttttttttatataaggatttttatgacattggaaatgccctttggaccaactcaggacaagggacaaaatggggcccatggatggagctgggagcccagctcaccactgttcaacttttttttttgaaacaaattggccatggggaccctcaccatttgggggcaaaagggccaagtacacaggggtctttgcacctttttttgggcttttgggggccttgggtccccccatgtcagttttcacccaccctgggca

SEQ ID NO: 24109 - DNA, 249 bp, Glycine max
  Clone ID: PAT_MRT3847_121771C.1
cgggcccgtgcccatgacaggcccaaatctaggctgccgcaacttgaatttgggtttttcacctaaacataaccgggttggtggttctactgctgtttctgttccgggtcaagtttaattatctgaaacgctaaaaaagagcatggaccacaggcttgttgaattggagaagcaaccttttggaaataaacgctaagaaggagaaacccatgctgcgttttgtataaccaccagcgagtgggtcgagac

SEQ ID NO: 24110 - DNA, 470 bp, Glycine max
  Clone ID: PAT_MRT3847_121772C.1
aagcttctcactctcccagctcgaggcatagcaatcagcaaagggagtcattttaatactattctcggttaaagcagagcatgggaagaagcaaaaaaacatagcaattgaataaaacctcaaatggagaaatgaaggtgactggaagctgcaacacacaagaccctcctgcagtcaactatcacgcttggctcaaggaggagagcaagacaccaacaataaatggaagccaccgcaagagagaaagggggtgagaatttttacttctgtaaagggagaaaagggaattgcaaggagaaaaacttgttgtaattttcagggcttgaagaatttaggtgtattttggcactgagctattaatagtaggcaacactgatcttaattatctgtgtaagtgtaagttctcattgtgcaatctctatgtgaggaatatgttccatgtggttgattctaaaaaaaaaaaaaaaaaa

SEQ ID NO: 24111 - DNA, 390 bp, Glycine max
  unsure (1)..(390): unsure at all n locations
  Clone ID: PAT_MRT3847_121773C.1
cattcctgaagtcagggtgaccaaacagaacagagctgcaggaattcttgagaattttgcagagggagagaaatattcacaacatagcctgaggaagtatgttcgcggcaagcagcctcagattatgccatccgtcaacaacttcttctctgatccatcaaactaaagcaaatgccaaacattctgttcttgagaattgatttctgggattaattttttgctttccagtattgggaattgagaagtaggacaacgggatttgatttttcagataaagatgtactatgattctgtaatttgttggtggatgacattcaatctgtctaataataaaattttatactttcacatttaaaaaaagagattcaacaataaaacaaaatccncagg

SEQ ID NO: 24112 - DNA, 944 bp, Glycine max
  Clone ID: PAT_MRT3847_121774C.1
ggctcgagatgcatttaatttggcttaaaatattcagacataacttcattgaagatggttccctagtaaaaagagaaatgaaaagtggtgtcacaattgcctggtgtcccagttacgagttgttgcttgtttgaagaattatggatagatttgcataccttggcaagttgacctagtatgagcatagtctgggtttatacagttaatcttgtgagtggttttagtgtcaatataaatccagggtattctgtatccgtttccttagttcctgtatatgcaatcccctattcgaggtattgtgtgcctttttccttagttcctatatcatttagctgtctgccaaatacaattgggcgcttgaaatgatcctggaaagtttttggacaatctttgctcactactttgaagcaacattccatggatgatgtttcaggttcgtgtcttcggtcttctgttgacagtggagtttcttgtagagctcagacacctaaataccatagatggtgtgtgttactaaggataaataagggtcttgcgggacttattacagtgtggatattgatttacgtctaaaatatcattgtacagtatggtgtcgcatttctcagcataacgtagctgttacattgtcggttcttgattatattgtcaattttgtgaattgctgccttgggcgcaattgttaaatttataatccaagttatgctgttaaagtttacgtccaattcggctgttggataacttttatttgatgttgacataatcaagattttttgttcatggtagactctgcgtgccaatttggatgaagctttatctcagattagtccaaaaattatcgtttgatctcgactttgcaaaacatcattcagtctagttcttttgttgcgtgtaaacaatgcatctcagaatctatttgggaatctagtttttttaattattgc

SEQ ID NO: 24113 - DNA, 442 bp, Glycine max
  Clone ID: PAT_MRT3847_121775C.1
gaggcttcccacaccctttttaatgtaacccttttccattagatccacctaaagcataacggcctctgaggtcactaagctgagtgcccaacatgaccaaacccatataaggcaagtttgtataatctacctcaatatggcgatactccaccatattcccaaaaactgccattaagaagcttaaagcctgaacaaaaaaaacaagtgatccaccttaccattattatttgccactactccagcatgaaccaaaaaaaatcattcctagtcataaaaaactaacataccctggagcaagaaggctcctctttacgcgaaagtatgggggagggacattgcacgcaaactttcccttgcattagcaaagaggctatttgcagaataacgcctatgaccacccggtcaccgcagcacatctttaccattgtctcaaggctcaccc

SEQ ID NO: 24114 - DNA, 319 bp, Glycine max
  Clone ID: PAT_MRT3847_121776C.1
atttccttctaagttctaattaagaagaatccgaacttaatattgagctctttaatttcactaatttgaggaaaacatgactatgaaggtaagcaacttgcttaattcattaaatttcagtttgtgtttttcctctttgtcaagaaagtttcaatttgacttatctacgattccacgaacaatttccagactttgatgattctacataacttccagctaattccagatatgcatatatgtatacatgctaattaattatgaaatgttctacttctaatggaacagcaaaacatcgcaattgaggcgccactccactgcg

SEQ ID NO: 24115 - DNA, 448 bp, Glycine max
  Clone ID: PAT_MRT3847_121777C.1
gttctagatcgcgagcgggccgccctttttttttttgtttttttttttttttttttttttttttttttttttttttttttgtaaaaaaaacacacactttacacattattacgacaattaaaagagggggggaaatttttaaagtggcggagcattctcaacaagaggggaaagcctaatttccttttttggattatacaaacgaacaagcgagaagaaaacacaaattccaaatcatgcaaaggattccccatttttaaaaaaactggcagcagcctggggaacaaaaaaagcgggcttaaaaattttaccagcaatttcaaaatcttgagaaattcccaagagaatatcaaaaactgtgaactggttgggattggcaataaggaaactcaaatgccatgaagtttgattggcccactcagaactccacattttaaaaccattattg

SEQ ID NO: 24116 - DNA, 228 bp, Glycine max
  Clone ID: PAT_MRT3847_121778C.1
gcttgcatggatactcaggctcgctggagaccatttgaattcagggtaatacgtgattaaaaaacaaaatacaccatatacaaaaggaaacatactggtgttatggaaactatgtatctaggcattttcccatcagatacataactaacatgacggtcttacaaacaaccccaacacatgactgttgcacacaaccactcaaaaaataacacctccaaaattgaaaac

SEQ ID NO: 24117 - DNA, 411 bp, Glycine max
  Clone ID: PAT_MRT3847_121779C.1
acccacgcgtaacggccacgcgtaccgcccacgcgtcccggccatgcatctggttaaccaccaaccgaatccctaaccctaacgaagagatggcagggctcttgtcatcaatatttggggcggataaagaccaggtgaactgggcggtctacttcaagatcagagcgggcggggacggagaccgtggctgccggcttcacaccaagcgcacaagtccaccaacatttgttctggcgcacatgtaccaaaggcccaacatggacatgggcattattaccaaccgctatgagccacatccacaatcccttgacctgcgcaaggtgcaagatcactttggcgactattgcgaagatctctgccatgcgctcaataggtactgcccgagtgagagcttgaatatttgggacaacc

SEQ ID NO: 24118 - DNA, 477 bp, Glycine max
  unsure (1)..(477): unsure at all n locations
  Clone ID: PAT_MRT3847_12177C.1
actctacttactatattttaaacctcatacacctccaagtaccaatccaaaattcccaactccacccactcatgggtttaaatttttttcagggaggggcggggcaannnnaaannctacaaattaatacaaacctaatcccaacaaacataaccatttaactcaaccaaactatcacaagtaacaacaccaaacctttctcattaccaaccacacccacctctataataacctattctaccacttaacctacatcaaacaaaacctcaaccacataaccgaaaccctcaaacacaaaattcacaccctctacaactccacctcttactccctcctacttctcaaccacaatcaaacctctctcaacaccactcttcatatctctctccgcaccctcaacacacaccgcacctctaatctctacaacctcctacactactctgactacacctccccctacaacaaaatcaataacac

SEQ ID NO: 24119 - DNA, 312 bp, Glycine max
  Clone ID: PAT_MRT3847_121780C.1
tatatttcatttcctcgttttattttctccgggagacaaattcccatatattcatgacaggaaagttaattgagagatccacgtatgtcacaaaacacaaaaagaagagatgactttttttttaccaagtgaacacaggaatcataggaacaagagtgaactgttggacttggaggaaaaaggagatgtgggggcgagagaggaagagaggccgatcatctgtgctggggagatgataagtagtctatgaagctaaggtagagggatgagcacggattccaggatgacaagatgtgtagggatccttggctc

SEQ ID NO: 24120 - DNA, 602 bp, Glycine max
  Clone ID: PAT_MRT3847_121781C.1
gccggccatgtttgccgagccgtacgtcgccgacagcaaggacccggcgtactcgccgcccacaccaggcatgaaggtgcagacgaataagaacgccctcgttcccgagatcgtccccactttcgagccttccgacgccgacattcccgacaactatgtcacccagaccgtgttgaagcaaaaatacctcccgcccatcacatggcggaatctgctctccaacatccaatgggtttcgttcttggcgttgacgatcacgcctgctctggccatctacggcctgtgcacggtgccttacaatcagaagacggcgatctgggctgtcatttactactacatcaccggtctcggcatcactgctggctaccatcgtctgtgggcacaccgctcgtacaacgcttcggtgcccctccagtacgcgctttcgctcgccggcgccggcgccgttcagggctcgatcaagtggtggtcccgtggccaccgtgcgcaccaccggtacaccgacaccaagctggacccttactcggcgcacgagggcttctggtgggcgcacgtcggatggatgctcggcaagccgcgcggcaagattggcgttgccgaca

SEQ ID NO: 24121 - DNA, 270 bp, Glycine max
  Clone ID: PAT_MRT3847_121782C.1
gggccccctttgggtaccttccccaaccttttattaccttaagaaatttccggcctttataaacaccttttccacatttgcctagcacccgttttagtccctcaagggccgcccactcttttcaattaatatttagcagcccttttttaaacctttgaccctatttaaccccggtttcatgaaacaccctagtttccctttttccccccctttttttaggtgcgggctgaaacaaattccaatacaatcaagtcttttcccccgcccctt

SEQ ID NO: 24122 - DNA, 221 bp, Glycine max
  unsure (1)..(221): unsure at all n locations
  Clone ID: PAT_MRT3847_121783C.1
atatggaaaaaagccttaaatcacaaaaaaacattttcaaaaaacaaaaaaaccccccatccaaattaagaattcccccccccccaaccgcgnaacctccacacccaccttaatttaccccaaattccccccctatcaatattaaaaacaccctttaaggtaaaatcatcacccccttttctattatacctatacccccataaatttaacccctctccctt

SEQ ID NO: 24123 - DNA, 380 bp, Glycine max
  unsure (1)..(380): unsure at all n locations
  Clone ID: PAT_MRT3847_121784C.1
cttgccacggatgccacggtannagacctccagtgaaacgatcggttcgcttaacatactcactggtggtgaattctgcttcacactgatatgaagatccgacctcgaaggatcaaaaagcatcgactgtatgagcggtcggatgtctcaaatgcgctatccctgtggaatctttactgacacctctaccttcaacttccgaatgactaccggatctataggacacgctttcacgggttcgtactctgtactggaaatcatacactacnnnnnnttacccttttgctccacacgagatttatgttctggttgatctcatgttaggacaccggcgctatgttttaacagatgtgccnnnccagnnnngctccacacctgac

SEQ ID NO: 24124 - DNA, 769 bp, Glycine max
  unsure (1)..(769): unsure at all n locations
  Clone ID: PAT_MRT3847_121785C.1
atccaaccatcatttccgagtcattccagaaagctttggaaaagggtcttgaaatccttactgacatgtctcgacctgtgcaactgagcgacagagaaactttgttaaatagcgcaactacttcattgaattcaaaggttgtctctcagtattcaagtctactctctccaatgagtgtcaatgcggtgatgaaagtgattgacccagccacagctaccagtgtagatcttcgagatattaaaatagttaagaagcttggtgggacaatagatgactgtgagctggtggaaggcctcgttctcacacagaaagtagcaaattctggcataacaagagttgaaaaggctaagattgggcttattcagttttgcttatctgctcctaaaacagatatggataatcaaatagtagtatctgactatgcccagatggatcgagtgcttcgagaggagagagcctatattttaaatttggtgaagcaaattaagaaaacaggatgtaatgtccttctcatacagaagtctatcctgagagatgcccttagtgatcttgcattacattttctgaataagatgaagaattatggtggttaagggacgttgaaagagaagacattgaattcatctgtaagacaattggaaccaaaccagttgctcacattgaccagttcactgctgacatgctgggttctgctgagttagcagaggaagtcagtttaaatggttctgngaaactattcagattacagggtgtacaagccagggaaaac

SEQ ID NO: 24125 - DNA, 664 bp, Glycine max
  Clone ID: PAT_MRT3847_121786C.1
ccacgcgtccgctctctattatttttctcaacttcctcactccccaaccattcgagcttccgtgagccagaggagcaatggaacctccaacgtcaccgctgccaacttattggaaatgcaactcttcctccgacgacgccttgcggtttagcggcggtgttacgggtttctgacgctctcagggttatggtttatatttgtcaaatcggcgtttctcctggtgaggaggttggcgtttctcctggtgaggagattccgtttgggaaaatagtcaaatgccctagctgtcggatagctgtaggtgttgcacagccacaacaaggtattcaggatggggtatgcttgtgcttcattcagtgtgcaaaaattgtgtacattcccctctcacactgaacctagttcccttgggcatgttgataaaatgatgacgcaactacatcattgccaaacttctattccattcttactcacgagttccttgataggatgtttgttttaatgttgtcaatgaggggcattcttcagtgtgtacagtactagaaatagtatcttgtgcaaagtgtcgttgccaatacgaacttgttttgggagacatagtcagtattgaatcagaagaaatcagccagtgtttcctgccgaacgcagcatggacatcaccgcatgg

SEQ ID NO: 24126 - DNA, 472 bp, Glycine max
  Clone ID: PAT_MRT3847_121787C.1
agaagctttttcacattccatgatttgcactatgcaaattgttttctctttcatgtttgacatgcttttttttttttttttgttaaggatggagtttgatgttcagataatcagctttaacatatatcatgtgttgacatctgttattgttcaaaatgtcagaattggctatagtatgttatctgatgctgtagagattggagcaatttctcctgggaaggtacattatgaatattttttgtgtatatatcaatgcaatctttgctattccatctatctctaaacttattgtattgtaaccaagtgattgggtataagtggttaatgtgctgaagttaaagttaagtcgtttgggtactacctgagttccatcgttggcggaaacaatttttggtcgggctttacttacctcctggccgaactccggattagttagggtcatttttctctcatgaaccaaagggttaaggcc

SEQ ID NO: 24127 - DNA, 1865 bp, Glycine max
  Clone ID: PAT_MRT3847_121788C.1
gttaagcttcttcgtataagcattcacttaccttcccatcccatgttctctttctcatcgcaattttttttcttttttcttttaattttcctctcaagtggagcattcaggttgttagagcgtccattgagctttcaatctgtggctggattttgatctctctgagtttaaaatggatccaaaaggaagcttatgtgctacaaggtcctcttccttaacctctcctgggaatggactacaaacaaatttgtcgtcagatcctccctctttctatggggtcaggattgaatcacctttcgaagaattcatccaaccctctcctccaacccaatctgtacttccaggtgaatctaacacagatattgatatccctgaccaggaaaattgtccactgagtgactcatcacataccagtaaactccaagattggaatccaagtgcgatgttgaataacctttccttccttgaagtaaagattcatcagcttcgggatctagtgcatgtaattgttagtaaaaagtgccaaccttttggacaacctcatgaactagtgactcaggaacaacagctcatcacagccgatcttacatcaattattgttcaattgatctctactgctggtagtcttctcccctctgttaggcacaccctcacaaacgcaaatcccttggttggccagcttgaccagcttcatgggattaacctcccttttgaatcagaaccaagtagtggtattaggccacaaaataacagtggaaataaactgtttgatcagtccattcagaatgatctaccaaataaattggaaatggagcaaaactacaatatggaagagcatgagccaaaagatgaagaagatgtggatgagggagagaatcttccacccggttcctacgagattttgcaattagaaaaagaagaaatcctcgcccctcacacacatttctgtacaatatgtgggaaaggattcaagagggatgcaaatctccgaatgcacatgcgcggccatggtgacaagtacaaaactcctgcagctcttgcaaaaccacacaaagaatccgggtctgaaccaaagctcatatcaagaggtattcctgcccctatgccggctgagcgtaacaaggatcacaagaaattccaaccactaaagaccattttgtgtgtcaaaaaccactacaagagaacacactgtgacaagagctacacttgcagcagatgcaacaccaagaagttttcagtcatggcagaccttaaaactcatgaaaaacactgcggtaaggataaatggctttgttcatgtggcacaacattttcaaggaaagacaagctttttggacacattgctctattccaaggccatacaccagctattcctttggatgaaaccaaaggaatggctgagccacctgatatccagaacagagaaagcaacaataaggtagaaagtattaacttctgttttggatcaaattcttcaagtgaaaatgtagttcaaaacatgatggatatgaaaggtaataatgatgatcccatgaattatttctcatcattgaacttcgaaggctgtaactttggggcgtttaatgaattctcccaacctccatttgaagattcagatggttgtttctcttttcccatgtcaggatcctttaattatgctcccaaatttggtggcggtgaatcaagttctgacaatctgtagtgacaatttataataatgttactctacatcatgtctatgttttctttattcccctgttaacgaataatccttttgttttgtctaatttgtaaatccaggtaatatcttgtactccccccatttctttatattgaaaaaaataagttttatgtttatatttttt

SEQ ID NO: 24128 - DNA, 798 bp, Glycine max
  Clone ID: PAT_MRT3847_121789C.1
gtacttgtcaccatggccacgcatgtgcattcggagatttgcatccctcttgcaaagccacacaaagaaaccgggtctgaaccaaagcttatcaagaggtattcctgcccctatgccggctgcaagcgtaacaaggatcacaagaaattccaaccactaaagaccattttgtgtgtcaaaaaccactacaagagaacacactgtgacaagagctacacttgcagcagatgcaacaccaagaagttttcagtcatggcagaccttaaaactcatgaaaaacactgtggtaaggataaatggctttgttcatgtggcacaacattttcaaggaaagacaagctttttggacacattgctcagcaatgtgtccaaaaagctgctattcctttggatgataccaaaggagtggctgagccacctgatatccagaacagagaaagcaacaataaggtagaaagtattaatttctgttttggatcaaatccttcaactgaaaacgtagttcaaaacatcatggacatgaaaggtaatattgatgatcccatgaattatttctcatcgttgaacttcgaaggctgtaactttggggcgtttaatgaattctcccaacctccatttgaagattcagaagcttctttctctttccccatgtcgggatcctataattatgctcccaaatttgacagcgacaatttataataatgttactctacatgtctatgttttctttattcccctgttaacgaataatccttttgtttttgtctaatttgtaaatccaggtaatatcttgtactc

SEQ ID NO: 24129 - DNA, 753 bp, Glycine max
  Clone ID: PAT_MRT3847_12178C.1
acgagggtaatcggaggagactctgattgaatccaagaaatcggatacaaccctaattgaatccaagcaagcaggggaagtgggggtattatttgatcagaagtacaaagctcttcaaaacccaaacaacagctccacggaccacccctactgctctgctctgcaatggccgacgaggaacctgttgatcagaagagatatcttgaagagtcttgcaaaccaaaatgtgtaaaaccattactggaataccaggcgtgcattaaaaggatacatggtgatgattctgggcagaaacactgcactggacaatattttgattattggtcttgtattgacaaatgtgttgcaccgaagctattcaccaaactgaagtaatggagaaggatttgatggcttattatcgttgcattctgttctgttttcattcccagataacttcgtctaaacattcaatgttataataaccaaactatatgtcctgtatggataatattgtgtttactgtgaagttttgagcctatggagaccttagattatgatttaataagaacattatgccaaatttcaacttccgagatttgggaggacgtattttggatggatccaacgttgttattgggttttgaaaaaagttctgaagtgtggatttttgtattttctgtttacttggctggctaaaaacgtagccctgcaccaaaaaatagtcctccgattacatctaatcgaatcaaactgtagttggcatttcagaga

SEQ ID NO: 24130 - DNA, 643 bp, Glycine max
  Clone ID: PAT_MRT3847_121790C.1
cacgcgtacgtaagcttggcctcgggtgagcggccgccctggggggcggggggggttttttttttttttttttggggggtttttttttttttttttttttttttttttttttttgccgcccccccccgaacaaacccttttcccttcttttctgggctttgcgccccttccttcttaccgtccccgggttaccccccggggcgctgggtaaaagggggtttttcccccttcttttctgggccctggctgggggggtggcccctccctttcccgcccccccctgcttcttccttttgcctttgcgggcctccccggcggccccctttttcctttgcggggcccctaggcccagccttggggcccccctccccaaccctaggggggcctccctttcctgttttgcccgtcgcccctctttaaccttttcgggacccctaggcccggcctgggggggcggggggttcttcttcccgttgggggggtttggatcctccttcaactgcccggtggccccctcgggggaggccccgggtaaatttgggggggcctgggggggcctttggtgaaccggggcccttccgagggcctgggccggggggcccttgtgttgggtggcccggtggggggtgcgggcggggggggg

SEQ ID NO: 24131 - DNA, 417 bp, Glycine max
  Clone ID: PAT_MRT3847_121791C.1
ctgtcgcttagaatgctatccttatgaatgtgccagatgccgttcttccaatggggagacactctgttgtatatgctcatcttagaagtaactacaaaggacttcgactacatttagatgccagtctctctcatcatagcacatgaaagcctggctgcagacaccataaattttgtgtctttgccccacacgttggccgcagtcggacagactcaggagacaatgagatcgaaatagtcacaggaggaatttactacagctctgacaactacagagcgacctgtaccccctctgtcgagcgcagggtgtccatatcagtatgctaagggacatgagagataaacgtctacacatccatgctattttgccactgctgactagttgccccccatatacactatgtgcccataatgactg

SEQ ID NO: 24132 - DNA, 281 bp, Glycine max
  Clone ID: PAT_MRT3847_121792C.1
attcgctcgagcagaaccctaatttcatatttcactctggagaatttgtgaaccagaattctcgatcttctctgtaactgtagaatccttattgtcaaaaaggttgtgcgattcattattgttgaagctctatccgctctctgcaatggtggagatgggagtgactgcgtcgcgtccttctcggagttcaaaaatctgcttctgggatatcgtcatctcagacaaaagttgctatggatgaagttgtttcagagcactgacaactggtgctgcgctcaaac

SEQ ID NO: 24133 - DNA, 393 bp, Glycine max
  Clone ID: PAT_MRT3847_121793C.1
cgggtattgcttatcatatgaacaaggaaactagtgctcatgcacccagtaccatgatgattaaggtggtcgctcctcctgagagaaagcacagtctctctattggtggttatatcttggaatcacttatcaccttccaacagatgttgatctacacgggtgaatatgatgaatatgtgccacatatccgttatcacaagtgcttctaaagttgcataaacgtcgagctggatggtgaacaagctcttaatgcacccaatcctagaccatattatactctagtacgtctgacttatttactgtttgaacattcaccatcctaatatatctatctagctgacactatgataccataccgcgaatagtttataaccattctacggtagtgaacct

SEQ ID NO: 24134 - DNA, 2414 bp, Glycine max
  unsure (1)..(2414): unsure at all n locations
  Clone ID: PAT_MRT3847_121794C.1
atcaaccacncaanaacaataaaactttccacaccaccaccaccaccaccctcaaatgttaattacgctcccaattttttcccaagtagtggtggaatggcacctagttatttcaacatgccatcatcatcatcatcatcatctggggcaggtcctaggccaaggggtcctccaggatttgcaattggggcaggtgctggagcattggctgctggggctgttatgtttggtgataacttcatgtcaggatttgatgctccttctggttttggaagtgatccaactcttaccattgcaactgatcctcttttttgaactagaattaagcacttttgtaattattattatgttgggctgcacatatatatggtcattgtgccatataaaagagttctagctacatgctttgggattaaccctaacctgttagagaaaatgcatgaagagttttctttttctgcctgacattgcttgagtattcttaaaaagaattgtttcatttcaggaaattaaaagtaggaatgatttggattctggagagggacaaagatgtccagcgaagcaagtaaggttgaaatctctatgatcgaaaacagtgtccttgtggctctcctggtgtctcctactctattctcccctttcgttggcttttgaaggtgaaacttttcccctcttccgtgagaacagaacaacctcagaaaaccctaaacccctccaacccattcccacattgtactaccctgttagttagtcaagtagcttcactcactctttctatttccagaatgccaaatccaaatccaaagcaccttttccacgccactctcttgccccgaggtacacaacattctttcgtgaaactcagaaaaccctaaacccctctcaaaccttgtagattccgacatcctagaattagttactggtttagtagcttagcttcactcactttctatttcttccagaatgccaaatccaaagcacattattctgcagagctttgtcttcctctgcctgcttcttcaggcatcgtcaaaatccacgatcgagccatgctcgaactccgactcatgcaacgcgcttctgggctacaccctctacacggacctcaaagtctccgaggtggcgtcgctgttccaaatcgaccccatctcgctcctcaccgcgaacgccatcgacatctcctaccccgacgtcgagcaccacatcctcccctccaagctcttcctgaaaattcccatctcctgctcttgcgtcgacggcattcgcaaatccgtcgctactcactacaagacccgcccctccgacaccctctcctccatcgccgacgccgtctacgccggcctcgtctcctccgaccagctccgcgaggccaattccatctccgacccttcggttctcgatgtcggacagaacctcgtcgttcctcttccttgcacgtgcttcaacggctccgataactctctccccgcgatttacctctcttatgttgttcgccccgttgataccctcgctgccattgctgctaggtacttcaccaccctcactgatttgatgaatgttaatgccatgggaagcactgctattaacgatggcgatatcctcgctgttccaattcccgcttgtgcttcgaattttccgaaatccgcctctgattttggcttgcttgtccctaatggaagctatgccattaccgcggggcactgtgtgcaatgtagctgtggacccaaaaaccttgatttgtactgtatgccggcttctctggctgtttcttgctccagcatgcaatgtagaggcagcaaccttatgcttgggaatgttacagtgcagcagactagtggtggttgcaatgttacgtcttgcaattatgatggcattgttaatggcagcattgtaacaacgttgtccccctctcttcagcctcgatgtccagggctgcaggaattccctccccttgttgctccacctacaaccgttgcaagggacacagtgtttgcaccagcaccagcaccactgttcgatggagctggtccagcatcacccaaatcctcgctggtgccttcagcggggcttccaggaggattctctcctgcaaatggccctattagcggcatttcttccggggcttctgttgcatgctccttggtgaaaccattgcccactttgacgaatgcacttgtgttattgcttgtcaagttgatgatacctgtggcattgtaatcttctcaattttgtggggggtatagttggcctgctacttgtgtttgtcacaggtgcacctgtctatcgtagttgctgatattcattttgtactcttgaactgattcgtgaatctggaaaactatgggatttcgggtttcctctcacgcgcaaaaaaaaaaaaaaaaaaaaaaaaacaaagcggccgctctagagga

SEQ ID NO: 24135 - DNA, 2865 bp, Glycine max
  Clone ID: PAT_MRT3847_121795C.1
gattcccacattgtactaccctgttagttagtcaagtagcttcactcactctttctatttccagaatgccaaatccaaatccaaagcaccttttccacgccactctcttcctctcgatacttctccaggcgctgtctaaatccacgattgagccatgctcgaactccgactcatgcaacgcgcttctgggatacaccctctacacggacctcaaagtctccgaagtggcgtcgctcttccaaatcgaccccatcgcgcttctcaccgcgaacgccatcgacatctcttaccccgacgtcgagcaccatatcctcccctccaagctcttcctgaaaattcccatctcctgctcttgcgtcgacggcattcgcaaatccgtcgctactcactacaagacccgcccctccgacaccctctcctccatcgccgacgccgtctacgccggcctcgtctcctccgaccagctccgcgaggccaattccatctccgacccttcggttctcgatgtcggacagaacctcgtcgttcctcttccttgcacgtgcttcaacggctccgataactctctccccgcgatttacctctcttatgttgttcgccccgttgataccctcgctgccattgctgctaggtacttcaccaccctcactgatttgatgaatgttaatgccatgggaagcactgctattaacgatggcgatatcctcgctgttccaattcccgcttgtgcttcgaattttccgaaatccgcctctgattttggcttgcttgtccctaatggaagctatgccattaccgcggggcactgtgtgcaatgtagctgtggacccaaaaaccttgatttgaccgtatgccggcttctctggctgttcttgctccagcatgcaatgtagaggcagcaaccctatgcttgggaatgttacactcggaattcggctcgagcaaccactcttaatttctctctgccttttacacacctctccaacctttcagattgctctctcggccatgcacaaacaccaacaacaaaatgaagacccaaccggaaccaccagccactgactcaacaagcctgcctaagaagaacgcaacgaggtttgccccagaatcaaccaccgaagccaaaggaagccacacaacaacagaaacataacaacaactaccccagaagttgcagtcgagaggtggtgactgaatttctttgtgtattttttaaaaaaattcggctcgagcacaaccactcttaatttctctctgccttgctcatttacacctctgtctcgtttacacatctctccaacctttcactttcgtttctcagttttattcgaatccctctctcaatctcctttccaaatggccagcgttgaggttgcacagcaaacaccaacaacagttccagaaaatgaaacaaccgaggtaagcaagacccaggaaacaaccccagtcactgaggctcctgcaacagaacaaccagcagctgaggttcctgcaacagaacaaccagccgctgaggctcctgccccagaatcaaccaccgaagcaccaaaggaagaaaccaccgaggcaccaacagaaacagtagaaaaaacaactacagaagtagccccagaggagcctaaagaagttccagttgagaccgaggaggtggtggcaaaggagacagaggaagagaagccagcagaagagaaatcagaggagaaaactgaagaagtgaaagaagaagcagaggagcctaaagaaactactgaaacagaatcagcagcagcagcaccaccagcaaccacagaggaagagaacaaaccagctgagtcagttgaaaccccagtagaggttcctgttgagaagactgaagcttagacctatggacagtgtgagtgagaaaaacaagtttaaaaatggtcctagttgtggggatcaggtctaccattttgcatgccatgttgaaaagcctcttttttttttttctttttatttctttagtttactttattaatattattatatgatgcttaagtctttggttgtattatggagggtacacctacgtgtaagcacaacacttggctccacatcagcgtgcttgccacgtggtgacatgagaaattctgggagttgtgtattgaagtgagcaagctgctggtgctggagtttaggggtgatggtttattggcagggttacatgagtttgtgatggtgtgttactgtgtttctttaggtttgaataaatgatatttactttataatttatatttttgaatgtgcaaaagaattcccatcctcttgttgctccacctacaaccgttgcaagggacacagtgtttgcaccagcaccagcaccactgttcgatggagctggtccagcatcacccaaatcctcgctggtgccttcagcggggcttccaggaggattctctcctgcaaatggccctattagcggcatttcttccggggcttctgttgcatgctccttggtgaaaccattgcccactttgacgaatgcacttgtgttattgcttgtcaagttgatgatacctgtggcattgtaatcttctcaattttgtggggggtatagttggcctgctacttgtgtttgtcacaggtgcacctgtctatcgtagttgctgatattcattttgtactcttgaactgattcgtgaatctggaaaactatgggatttcgggtttcctctcacgcttagccatatattatttggtgctttgctgaattatcgtgtttatctactgtcagtaattttaggtataatctattgtcaatctgtaaagcaattttattattttttttttcccttttgagttaattgacaatcttgtttttgccatatattatttggtgctttgctg

SEQ ID NO: 24136 - DNA, 205 bp, Glycine max
  Clone ID: PAT_MRT3847_121796C.1
tgcttgtggagctggtgctgactgtaatcctatccatcataacggtccttgtttcctgtccaacaccgttagggcccactagtactacgccgtgaacagctacttcctaaggaagggtgaagctcaaaggtcctgccattttgagggaacatccattgttactgcatctgaccacagctttggctatgattgtgactacccttct

SEQ ID NO: 24137 - DNA, 337 bp, Glycine max
  Clone ID: PAT_MRT3847_121797C.1
gctctctctctctctaacagaacccaaaacaaaacaaaactaatgctatgtctcagttagttcttctgagtctccgaggttaagagttgagctaagacgcgacacacacacctctctaactctaacattcaaaattcgatgtcggggttttgatcccctagctgaggtcccacagcctcttgtattgtattgtgttgtatgtatttggggtatggcggaatcatgcactaattctgctgtttcagttgattccatttccagagacaacaagttctggaaaggggcatttgctgtcgctggaatcatgcttaccctcgtacacctatggtgtcttgca

SEQ ID NO: 24138 - DNA, 380 bp, Glycine max
  Clone ID: PAT_MRT3847_121798C.1
ggaaggcccgcccaaaaaatgaagtttgttctgccttttattcaatattcaatagccattcctcacaaaaggagcccgttgtggaaggaaaaatgttttgcggtttgccactcaatttgtggcttgtacttctaataatatgtttttaactaatatattttgagaaagcaaaacccaaaaccataacaggctcaggattctgaaattctcctaattgacactgctgttactctgttgacaaggaacaacgttttttgtatcagctcctaaaatgatgggcgttgctttggatcacttcgccagcggtcatcgatgattgatgcaacatggggatcaaccccctttggaagggctaatcgtttatccataaagcctacgac

SEQ ID NO: 24139 - DNA, 492 bp, Glycine max
  Clone ID: PAT_MRT3847_121799C.1
gtttctccaccaaacttccaaacccattctacgacgtcgtttttttttcaccttccgttttttcccctttgtttcatgccattcgcaacggttaaagagcgagagtgactgagagcggtcgatcgatcgatcgagagagagagagagagaaagagagagcccgatcttcctctatcgatctctgctctttcctctccgctttccagattcgccgcattttgcaattcctaaagaaatccaaaatcgaaatcgcgttccgttggctctcgattcccacgctccacgttcacgattttgattgagatgaaacttgaaagggcttgatagtcaacaagggaagagaaaatgctgatgcccaggttcatgggaaagtgcttctgttttgggcaatggctgcaatgattactgcctttgcattgtaaatttggacatctttcatgatgtggagatttgcatccaatgcccttataaggattggatcgtagagagggt

SEQ ID NO: 24140 - DNA, 439 bp, Glycine max
  Clone ID: PAT_MRT3847_12179C.1
gtgataaacatattaccatagcgttaaaattttaaatccctaatgtatacagtggaccccgcaaaaaaaagtacatcgtttgagagttatacgtcatattttctcaagcaccaaaacactttttcttggtttctcccacatgccgagacttttggtacccccccaacaatattattacgctgctttcttcgcatgacaatccaggcctttgcatcaactcattcagaatccaatgaaatatgcacgatggtccagacctaagctccattgattagagacccgtgctctttgaggataagtcccaagacctttccgctgccttgttgctcctgacccggagccattggttcgtcgtaaatgccgatgatcaaggccgtaccggtgcctcttctctgtatcccaccaggacccttgttgcctcgaatgacggcaccaggct

SEQ ID NO: 24141 - DNA, 200 bp, Glycine max
  unsure (1)..(200): unsure at all n locations
  Clone ID: PAT_MRT3847_1217C.1
aatggcacctctcacttatctcttcttcncactctttcttcngctntgccttaacccactccagaaccacaccacactctccccaaacgacactcctggacgtcgtttcctccctccaaaacgcacacaatgtcgtcgcttcacccaccaccaccctancaaacaccaacgacaacaagaatcctcgcttctaacgtcgt

SEQ ID NO: 24142 - DNA, 289 bp, Glycine max
  Clone ID: PAT_MRT3847_121800C.1
ttcggctcgagcgatgctggcggtgcaagcttctgatttcgaatgcacatgagtttttaaattctactatgattttccaattttccctcaacccctttattcctcgaagttgaaattatgggtttaattcaccatacggggacgattttatagattttatgatactatcattactaatactgttataagattttgagtagtagtagtactgtgataaggtgacatgtctagatgtgtttacatgttgcaaacagaaattgtaatcacttcagaatatcagtcgaatcgc

SEQ ID NO: 24143 - DNA, 274 bp, Glycine max
  unsure (1)..(274): unsure at all n locations
  Clone ID: PAT_MRT3847_121801C.1
ggaggtctggtgagagcttcagatgtatgccctgctaaccaacctgggangtctggtatggacgcagcaagagcgatctcagaggaggatggatgggacacgaactgagctgacgccgtttctcaggactgacctgttctacataaatatacacgtttcctatggaataatgtgatactgnttcatgttactagacactgaacggtttcctcattcccttaaaatgtattcggccttcccgtgaaatctataaacagcagnactgataaaaaaa

SEQ ID NO: 24144 - DNA, 275 bp, Glycine max
  Clone ID: PAT_MRT3847_121802C.1
tcccggtcgaccagctccgattttgcagcctgggtcaccttagcttaaccggttttttagccttggtaacctgtgccaatggtctctaacctaaatctaaaaccggttagttactcaaattacctatttggcatgaatcctgccaatatcaaattatgcaataaattaaagttggggttggatattgtctttttggaaaatctggtgcactctgttctggtgggtggcaccttggagtcctatcatggaaaaaaaaacccattttatgcgggttc

SEQ ID NO: 24145 - DNA, 362 bp, Glycine max
  Clone ID: PAT_MRT3847_121803C.1
atggataccggacgcgtgggttcgatccggtgaattaaaaaccggtacccccaggggtccaacctggaatttagggaggggtattgaaggggggccaaattatggtaaaaggaggttcctgggagaaaggggtattcagtggacaattccgcacaacagacggaaacgggagcctaaagagaaaagcccggggggcccaaggggggagctaaaaaaaaaaaattggggggggctaaaggggcggtttacaaaaaagtaaaacgggtgggccaactgccttaattaaagggggaaaacccggggagaggcggtttttaaataaatgccccaaggcgggggaaaatgtgaccagggaaacgggc

SEQ ID NO: 24146 - DNA, 316 bp, Glycine max
  Clone ID: PAT_MRT3847_121804C.1
tttgttattatttagacgaaacctttctttatacagagatattaaatatggagatattattctgatttacatgggtatacgtgggagtggacctatatatatattatatatatacactcatatagatataaatctcaaacaattgtttaatattttatagcacgtgtaccctctatccacagtttaggatgaaaaagaggcagaaagcagtgcaagcgcaatgccggatccattttgggagacctttagaatgacgtgcttgagaatatcttggcccaataattcatttagagctttgcgcaagtgcttcctaaac

SEQ ID NO: 24147 - DNA, 579 bp, Glycine max
  unsure (1)..(579): unsure at all n locations
  Clone ID: PAT_MRT3847_121805C.1
ccacgcgtccgcccacgcgtccggntaatttgaaaacggattgaacctccggtggaagctaagcaagggttgttttccaagagttgaaaagagtttttgggtcagagaggacaacaacggggtaggggttactgctccgaattgaagtttcccttctttcttttttctttacctttttctttttggttttcaattttaagaagaaaaatagtaacagtgaagctatcaaacaaaaaccggtttcgttttggttttacttctcccatagtaaaaggagaatttgttgtggggcgctgtgctttaattatgctgcagtgaattgaacacgcagagagagagagagagagagagagagagagagagagagagagggtcttttcttcacctttgatggcttatttaggtgttttgtggagtgtctctggctactactgattgagcttctgggattctattttttgtcgtttgattcctcttcaaacccatttcttcaaaattcttttttggtccttttttgattttcttgttgctgggtgggagcctttccaaatttttgggatctgggttcctaagggtttg

SEQ ID NO: 24148 - DNA, 476 bp, Glycine max
  Clone ID: PAT_MRT3847_121806C.1
tacggctgcgagaagacaacagaaggggtggatatacatataatgtattgcaataattattataattatcgtttgttacacacttgcacctttgatttattaagacatcagatataggattcacgtttttcatatatctttcgatgaatccttttctactcaatagatataagactaatcactcactgggttatcctaatggtgggagattggagtaattataatgtataaaaacttaagtatgatctttattgttacagttatacaccaaaaaataagactaaccaattatatctgattttccaacaattatatgatgttaagaaagatataagattgatataatgattagagaaagatgaaaggagatgtgaaatgtcaaagattcaaatattttaattgatattcttaacaaaaactaacaaattaatatttattgataaaaaaaaattcatatatacctgcagcctggggga

SEQ ID NO: 24149 - DNA, 274 bp, Glycine max
  unsure (1)..(274): unsure at all n locations
  Clone ID: PAT_MRT3847_121807C.1
ttttgggctcnnnccccatggggggggggggggtgttttgctctttctggctaccagggagactgccctgcgcccggttgtgttctagcgcggttttgcccttgttcccgtctcgatggcccgcgagcccttctccaagggcgccgatattttttttcctcccccnccccccttggcggggggggggggcattacatttcccgccaatgatcctggccccagcggggggggggggacgaagaccttcccctggtgccgttggaaccctgacgag

SEQ ID NO: 24150 - DNA, 495 bp, Glycine max
  Clone ID: PAT_MRT3847_121808C.1
ctcgagccgaatcggctcgagtacggctgcgagaagacgacagaagggggagcctcaaaactcaataagcacctaaagatgtcaagggcggtggtttatatcctaatagccaccgccatattgttcttcatattccggtcccctttgaatcatgaggagtcaaagggtcgccttaatcgcaggtttgggtacaaactacttgagcgagccccaaagtttgaccctcttgtgacaaatatagagagagtggttgaaaacaaaatgtatcacgaacctgctcctcgtatgttgtccaatttggatagtaccgcatcagtcagtgatgctgtagagacttaccaatatcttacctcgggtggtaaattgaacacgacgttacgtttgatcattttgttccctttgttagatagagaaccgaaagatggggtgatcgattttaatgagttagaggcttggattagtcaacgagcaacagagagattagattatctcacg

SEQ ID NO: 24151 - DNA, 130 bp, Glycine max
  Clone ID: PAT_MRT3847_121809C.1
tacacacaccaatcttttgtgtctgaatttcacacgagagagacgatccaatgcgtcgctacctgtggaagattctagggaacataatagaacacacactcctattccgactgaactgggagagctacta

SEQ ID NO: 24152 - DNA, 658 bp, Glycine max
  Clone ID: PAT_MRT3847_12180C.1
ccgggaaccctaattgaatccaagcaagcagggaaggggaccattattatttgatacgaaatacaaagctcttcaaaacccaaacaacaaccgtactgcacaactccaccactgtgcaatggccgacgaggaacctgttgatcagaagagatatcttgaagagtcttgcaaaccaaaatgtgtaaaaccattactagaataccaggcgtgcattaaaaggatacatggtgatgaatctgggcagaaacactgcactggacaatattttgattattggtcttgtattgacaaatgtgttgcaccgaagctattcaccaaactgaagtaaatcgggaaggatttgatggctatcattgcattctgttctgttttcattcccaaataacttcgtctaaacattcgatgttataatatccaaactatatgccctatatggttattcttgtgtttaccgtgaagttttgagcctgtggagaccttagagtatgattaataagaacattatgccaaatttttacttccgagatttgggaggatgtattttggatggaaaaaaaaaaaaaaaaaaaaaaaaaaaaaaaaaaaaaaaaaaaaaaaaaaaaaaaaaaaaaaaaaaaaaaaaaaaaaaaaaaaaaaaaaaataaaaaaaataaggggg

SEQ ID NO: 24153 - DNA, 238 bp, Glycine max
  Clone ID: PAT_MRT3847_121810C.1
cgaaacgagggcggcacgaggaaatgccttagttattcacttatggaggttactaaataattaggtgatattatagtgatgctttcggttattttatgcttttaagagcactggcctgtggtgtttttttccctctaattgtcagttatggtttagctctgtataatgagcaatatcatttctttaatcagggtttttgtttttttaaaatacattaagtgtttttctgctaaaaaaa

SEQ ID NO: 24154 - DNA, 715 bp, Glycine max
  Clone ID: PAT_MRT3847_121811C.1
ccgttgaggattttattctcataacagacaaggcatatacaagaaatgaagttttagatatggagaaattaatgatgaacatcttgcaattcaagttgtctgtgcctactccatacatgttcatgagaagatttcttaaggcagctcattctgataaaaagctggagctcttgtccttgttgttggtccagctatgcttgggagaatgcaaaaggcataagttttagccatcgatgatgacagctgcagccatttacacagctcaatgtagtctgtaccagtttaagcaatggactaagactaccgagtggtacactgattactcagaagagaaacttcttgaatgctcaaggctgatggttactttccatcagaaagctggatcggggaaactcacaggtgtatatagaaagtacaatacatgcaagtatggctgtgccgcgaaaatagaaccagccctgttttaactggataattaagggaatgcaagtaaacttctagtttctaatgcattgctttggttgttttgagagtttgcttgtactagaagtttgttttgagagcttcccaagaccaacctatcgacacccgttggcttcagtagtgtttgtctttttctttcaagcaccgtgtctttttctttgcacccaatcttacctttcaggattgtatggaccaagtgaattagcacattaattgcttttactaatcactg

SEQ ID NO: 24155 - DNA, 226 bp, Glycine max
  unsure (1)..(226): unsure at all n locations
  Clone ID: PAT_MRT3847_121812C.1
caacaacattgaagggtcacttgtgaggagcttataattatagcaagcttggctnnnnntaaatattatcgatannncttgaaacaaaaaatcaattagagctgaaaatttccccacgaaatagaaaaaaaagtccactttcaatttgtttgtataacatagtggaagaagaaccgaggaagtagaaatgttgagtttgagttcattcattcagtagtggatacct

SEQ ID NO: 24156 - DNA, 771 bp, Glycine max
  Clone ID: PAT_MRT3847_121813C.1
ggaatttggaagatgatatgtatcatatttatacatctggaacaacaggaaagcctaaagcagtatcagtgaaacaacgtaatatattaaatttagtatgtgcttggacaaaaagactcaatttatccgatgatgaagtttatctgcagtacgctaattatgtgttcgatgcttcagcaactgatttctactgtagtttattaaatggatatccgcttgtcattgcaacatcagttgagcggaccaatacagatttattagaaaagttaatttcacaagaaaatatcaccatcgcatctattccactacaggaggtgcgacaagtactccagcatttgttcaacatatttctaagcattgtgatatttatcacatcttgttggatatacgaaaaaggtgacgccataccatcgactattccgattgggaaaccgttagctaatgttgatatttttattatgtcaggcggtaaactatgtggcgttggtattccaggtgaattatgtattgcaggagaaagtttaacttcaggatatttaaacagacccgaactttctgctgaaaaatttataaataatccttttgggccaggacaactttatcgaagtggtgatttagcacgattgatgccagatgggcaaattgaatttcttggtagaatagacaagcaagttaaagtacatggctatcgcattgaactaggtgaaattgaaaatatcattaattcagtagatactgttacagatagcgttgttattttagctaaacagg

SEQ ID NO: 24157 - DNA, 272 bp, Glycine max
  unsure (1)..(272): unsure at all n locations
  Clone ID: PAT_MRT3847_121814C.1
ctttatcactatatccatannnctgccaaattatactaactcgctttctctatataaagaagagcaccctctaaaaaancatntnttnacttcctatcatctcacacttcatttttctgaaccataacctcaacctcccctcacattaacttttttcctatcttgaccctttctcttacctccttctcttccataccaccaccaccaccaccaaccaaccaccccttccatacaaaaaaatcccctcatcatcttataacaacaataacaaa

SEQ ID NO: 24158 - DNA, 268 bp, Glycine max
  unsure (1)..(268): unsure at all n locations
  Clone ID: PAT_MRT3847_121815C.1
btccggcacaagcaacggcggtaacggtaaagctacgggaaattcgggctcgagnaaaaaaaaaaaaaaaaaaaaaaaaaaaaaaaaaaaaacgnagaaaaaaaaaaaaaaacccngnncnngnaaaaaaaacccnncccggccnccggngaanaangcnccccaanaggggcnnagagagcngcgnaacaggnanagcgnnccgnnanaagnncnncnnaccaangnnannnnaagngannccncgnccgnngnnagnngccnganc

SEQ ID NO: 24159 - DNA, 489 bp, Glycine max
  Clone ID: PAT_MRT3847_121816C.1
cttataaatgaattaaatttaagtctcccaggaactttgactactttcttcaatttgtgtaataaaattgatgtatttaagagaaagttaaaaatgtggttgaagcgcacacacgagaatgattatgacatgttcccttcattttctgaattcttaaattcatcaggcttaaatatgacagacatcacaaggattatttttgagcacctggaaggactttctcaagtgttcagtgactgttttccaccagaacaagacttgcgttcaagaaatttgtggataattcacccttttatgaatcaccaaaataataatctcaccgacttcgaagaagaaaagctaacagagctatcttcagatttaggattacaagcactatttaaatcagtgtctgtaactcagttttggataaatgcaaagacaagttacccagaactccatgaaagggcaatgaaatttttattacccctttcaactgtttatttatgt

SEQ ID NO: 24160 - DNA, 254 bp, Glycine max
  Clone ID: PAT_MRT3847_121817C.1
tacggctgcgaagacgacagaagggggagtggaagtagtagcaagtacgtcgtatatgtggttgatcttttgctggatgcttgatttggtccttccaattgtcagatctggatcaccggactcactcttcagactcaatcacactgaatgggctctgaaggcgaccatcaacatcaacaacaacaccatcaagatcacgatcatcatcctcatgatcatgatcaccatcatcatcgcgacagaaggggagacat

SEQ ID NO: 24161 - DNA, 1138 bp, Glycine max
  Clone ID: PAT_MRT3847_121818C.1
tcgcctccttacattctgacccagcttggctttcatacttgttttgtgtggcagagcaagagagagcgcaatggaaggtatctcagtgggtttgaagaagtattggagaagaagcattaggggataccaaagattacacgtctcggatcggcgaaagaaggaaacggttcagcttggaggcagccagagaaggaggagatggcgcataaagttagctcgtaagatcagaattcccaaaatctcttctccaaagaaattggtgctgtgggtcagagacgcctacgtcaggatgatgctgggtatggctaactccatgggtgcctccgccgtcggctacggcggagacgccgcgttcaccgccaagggtggattcgagagggccccaccgcccaaggagtacgaccagaagatgatcatacatatgtacaagtccttgattatggcacagggacagttgctgccgcgagattcaacacccaaacctgccacaacaacaatggttaccacattctgagaatcttttttagctttttttatttattattattactataaaaatttcactttgtttttattttactatttaaacatttgtataaaatagtaaaagaaaaaaagacccctgtttttactatttttttatacaaataataaagaacccctctctctgagagatatccatgatttctaaaacaatacaaataataaaaaaaaaaaggaaaatgaagttatatttttataattgagataaaaaaattattaagtaaaaataaatagaaaattctgttaagctaagtttggcttaacttctctccttctcccccacgcttcatattccaatctttccatcttttccgttttggtttttctaattttacttgggcttttgcttttaatttttttaataaagttgcattgcatcaactacgtacctggattcttcccttcccagttagacctggattgtaattaatgacgtcgttgcatcatgacgttaccatatgtgtagcttggttgttatgattgtacgaatatgtgcagcagaatgcatattacaattcacaatacgattgaatcaaaaaaaaaaaaaaaaaaaaaaaaaaaaaaaagtaaaaaagggaaaaactaaaactggggc

SEQ ID NO: 24162 - DNA, 248 bp, Glycine max
  Clone ID: PAT_MRT3847_121819C.1
atcaaattggtctatataaagagattgctggtggcaatagaaaccacaacaagcaactcttctctcaatttttcctttctgggtcacaaccatgcgaccggggccaattgtaagattcgggtcctccattgatgctgcaaggagggcagcatccaggaaaaggaggatgggaattctgaagaggatggaggacttcaacttcctagggcaaaggttcgggaggcaccaggggaggttaaggaacttcc

SEQ ID NO: 24163 - DNA, 195 bp, Glycine max
  unsure (1)..(195): unsure at all n locations
  Clone ID: PAT_MRT3847_12181C.1
ttnngnacnngtangtnagctcgggattcgnctcgaggtanccatncngnatgnnctnnaagattnagngtagncgttgcgntgcngtctgaanccaactgnanangagcnngacncgtganngaatcttagcangcaggccatttcgaantcacggttcagnncctaaaacnntantnnngnactnaanaagac

SEQ ID NO: 24164 - DNA, 406 bp, Glycine max
  Clone ID: PAT_MRT3847_121820C.1
ctttgtttgttgtcatcagatgagagagaaacaaaacaaagagtcaatcactgaatcactctcactcactctgcatgctgtgtgcgtgactctgtcattgtgttttgtgttttaagcactttgcagttgtttagtttctgaggagcgttttttttttttctttcttatgagtgtgtgtctgttcttagttgctgctattgttgatcaagtttcggttactactactactactaccacatgtccatgccccttcaatttctgttcaactttgtgactttttgttgggttctaaaggaaaagaatgcaacttggttttgggtctaagttgcttttggttgggttttgtaagcaccgctggcaactcggaatagtgggttttttttggagggtggttttttcttttttt

SEQ ID NO: 24165 - DNA, 498 bp, Glycine max
  Clone ID: PAT_MRT3847_121821C.1
ggctcgagcttagatggagcggagttcctttatgtacatcatcccctccaattccccaacatttactcctgctcctccttagacactctcctttgcttcactcacacgattctttctttctttcttcgcttccacctttttcccttcactcctttattcttcttcggatcggagagtaactcacacactctcatgctcaatgccactttcctctgttttcattctcctcaccaatttccgcttctctaccgagatctcgagcgtgtaacagtataataattatcataataataatttattggtgagaaatgaggttgtggtggtttttggagtttgggtgtgtagttatagtaattgttctgaccggccttgtaaaatttgggaaggccgaggtttacatagccaccagtgagggagagcctatcatctgctacaagggaggaatcgatggctatgaagccaccgcggtggcatctgatgatgattatgatgagaagc

SEQ ID NO: 24166 - DNA, 331 bp, Glycine max
  Clone ID: PAT_MRT3847_121822C.1
gtccttaattcaccgatccagccacgcgtccgctctatcgctcacacacactatctctctgtctttctctcacccagatcttgtaacaagagctatgtctaccactccacgcgaaaaggtcacgtacatggccaagcataccgatcatgccaatcgctactaggagatgatgaaactcatggagaaggtatccgcctacaacgatagccatgagctcaccacggaggaacataaccttctctccgtaaactacaagaacgtgatcagcgctcgccacgcctactagcgcatcatctccataatcgagcacaaagaggataaacgcgtgaac

SEQ ID NO: 24167 - DNA, 423 bp, Glycine max
  Clone ID: PAT_MRT3847_121823C.1
ccatccaaataaaatttgaatttactatgcaatacatgaatttttgtttaaaataaaaataataatatcgtggagggagggttttctttcacttttaatcttttaacccatctaaaactagaatgaaaaaaatcactgttcacggggtttcatttttaagcctcaagcaggcagggcagcacccacagttagagtcaatgttgaaacaccagtgaagcttgtgttacaacattaaatacagggggggtatttgtttccttcgcatccttgggttcgccattgctaaggctctgattctgccaaaagacccttcatccttccaattaatttgacccacgtcaccctggttagaacttctggtgacaagctaaaataaaatttgaaataaatttaaacttttactaaagctagactgcataaaaa

SEQ ID NO: 24168 - DNA, 241 bp, Glycine max
  Clone ID: PAT_MRT3847_121824C.1
agcgcgaagttggcacccacccccaccaatcagaaagtaccttttatatttataatttttaatgaacaattattgttcatcgtgtaataataacatatacaaaagtaagcaaatataattttaagtttaatcaaattggcataacacgacatttggtcggggagaagtgtacttaactgacatcaagaaacatcaatataatactaattagctctttaattattaaaaaaaaaaaaaaaaa

SEQ ID NO: 24169 - DNA, 378 bp, Glycine max
  Clone ID: PAT_MRT3847_121825C.1
tggagcaacaaccccgatcataatcctttaataagaattactctgggctgttcaaaaagcttctggctgataacaagctcccaaggataaaaaaaactgaatgacttgtaattcaaccccaaccttgaaaaaaccctgaaacaaatcccggccctacaggcttaaacataaaactgatttaacaagaatcccccctacaaacgatagcatggactggacatggcaatccttgacccatacatcaacacacctgcttcccaatcggaccagtgatagaagaaccttccattgctcatttggtatcgactataccaccagcattctcttcataacacatagaatacgccggcgctttccgggcaatagcttggcgctgga

SEQ ID NO: 24170 - DNA, 314 bp, Glycine max
  Clone ID: PAT_MRT3847_121826C.1
gagattcaagtcggcggccgcccttaattttttttgtgtgtttttttaataaggccgtcaggtgcccctgcataaaataagatcgaagtagttggtgcatggattcacatgccaacgttggcacaaaagctaaaataataatattaaaacagcacaccacatgggggtgatgcccatttataaagtttctcaaacagctcgatacggaccattcatagggaccccagtggaaaaataaaacgcccgggcagggtctaccgcatacgtcatggaaagaagaatccacgaaaatggggttatgtgatgaaaccaaa

SEQ ID NO: 24171 - DNA, 565 bp, Glycine max
  Clone ID: PAT_MRT3847_121827C.1
catccatggaaaaggaaggatttacacgttgttggtggtggtgtttctgtgcagaggcgaaaatgtcagggaaaggacctggtctcttctctgcgatcggaaagataggcagagatatcctcatgaaggattacaactccgatcaaagattcaccttctcctcctcctccaccaactccggtctcgacctgaagtcaacactggtgaagagtagaggactttcctctggtgatgtggctgcggcatttaagtataagaataaagcggttaatgtcaaagttgatactgaatcaaattgccatccgtgaaaaccattgctttgattcgtttgcctgattacaattctggcaaggtactgagattgtcttgggataaaaggttggaatattcggtccaagtctgttatcttggacttctttttcgtaaaggtgttttaagacattgttgactctggaagagttattgaatgactgttatttgcattgggtggggtgagatacacccccttggttaaacccgctccccgctattgatttttctgggatgatgggtactcccagcattg

SEQ ID NO: 24172 - DNA, 246 bp, Glycine max
  Clone ID: PAT_MRT3847_121828C.1
cataagtctacatgctctctcttccccttcttttcgttttctctctctaccgctacttatgatcagggcctgataatcgcagagagaaaccaatctctctgttgctcatctgtaacgaaaggttatggcctacaagataagcagaacccacttcagtcttcactatacatattaagccataaacattaacggactttagttttaagagatacatattggaagaaaaagaagcttaactatgtccgc

SEQ ID NO: 24173 - DNA, 171 bp, Glycine max
  Clone ID: PAT_MRT3847_121829C.1
cttggcaagtctattgcatggggggtcataggctcaactcctctccatctctgcgattaacaatgaaggaagactttgcattgtttttgatgttggctgaggtgttgtcagctctggaggatatctatttacttttgatgtaatagcaatgtcattagtaccaaatgatgt

SEQ ID NO: 24174 - DNA, 662 bp, Glycine max
  Clone ID: PAT_MRT3847_12182C.1
ttttttttttttttttttttttttttttttttttttttttttttttttttttttttttttttttttttttttttttttttttttaaaaacaacaaccatttggttttttaatcccaaaaaacgggccggcccccaaaaacccaaaattggcaccggcaagaagggtttcaaattaaaccccccaaccgttaatggttctacctatcttggaaaaacaaaaagcccaccacccccctataggccccggccccaaaaatttttcaaaaaaagggcccaatttcgttaaaattggggggaaaggcaccccccctttattacggggaggcaggaacccccttgaaactaacttaggcaacctgggaaagggccttaagggaagggcccccccaaaaagtccctggccaaaaagggccccccctttgaaaaaaaaaatggcccacaactagccgaacccagggggaaagtttaaaaccttcctaaccggaaaaagttttcctaaaaagctccttaaacggaccacggtcaaaattttggaaaccacccacttaatagggaggggggtacacataacccccccggacaaggaaaagcaaatagcccagttcaggctccccccattgcccaaaaaagggggcctggaaaaaaaggccacccaggggggg

SEQ ID NO: 24175 - DNA, 428 bp, Glycine max
  Clone ID: PAT_MRT3847_121830C.1
gaattcggctcgaggtggggcggcggcagccactaccgtggcctggtaccaggtgagcccgctggccgcccgcctgctctacccctacctggcctggctggccttcgcgaccacactcaactactgcgtatggcgggacaaccatggctggcgtgggggacggcggctgccagagtgagtgcccggcccaccagggactgcagctgcaccagcaggtgccatcacgcttgtgatgtggtggccgtcacgctttcatgaccactgggcctgctagtctgtcagggccttggcccaggggtcagcagagcttcagaggtggccccacctgagcccccacccgggagcagtgtcctgtgctttctgcatgcttagagcatgttcttggaacatggaattttataagctgaataaagtttttgacttccttt

SEQ ID NO: 24176 - DNA, 598 bp, Glycine max
  Clone ID: PAT_MRT3847_121831C.1
gtgccgggataaaaagcaccagcggacactgatgccggagaagctgcacacaagctgctggaggctttccataaccagggccccgtgatcaagaggaagcatgacttgcacaagatggcagaggccaaccgtgccctggcccactaccgctggtggtagagtctccaggaggagcccagggccctctgccgcaagaaacagtgtgagctactgccacgctgaaaactacctgtgggttaaggatgtagttcctttgtaagggtgggcaggcctcgtaagaaagatgtagcagcatattcactatccgttaatccttctttctttgaggctggaacttgctctctctgcccctatttccttgtaaagagggagcacattgacttgggaatttcctccaggaaactcagggctgttttctcttcccttaggttggggcggacctttggacatataaaggaagcagttttagtatcagaaaagatttattagaaaattctcacgctgaactggtgtagcatgtggtgcagcattcagtgaaactggctggaggaaataggcttgtttccagagttgtccttatacaaaatgtataaaaagc

SEQ ID NO: 24177 - DNA, 479 bp, Glycine max
  Clone ID: PAT_MRT3847_121832C.1
tgcaacaggtagaagatcaagcagcagtggggcgccattggaagaagatgcagcaggtagaagatccagcagtggggtggcattggaagatgatgcttgcactaccataaattgccatagaatcagttagttagttagttacaaccatattagggttgttagaagctgttgtaaagttagttactgatttgttaaaagctattataaaggtagtgtatatacaggataatgcatgaataaaaggagagaaacatttcgagtaaaagcttagtttagttcaagagggaccttgacctcgaaccaaggcaatttatcttcttcctctcgctcataacatgctgttatcggtttaggtgggtaggaagtaggatgatattacattaagctgtatttcactttgagatgtttgttcatgagtgtgatgagcgaattagttagaagttcataactccatgagggtgtgcagtggtttcttgggg

SEQ ID NO: 24178 - DNA, 344 bp, Glycine max
  Clone ID: PAT_MRT3847_121833C.1
caagaaaacacactctattttgggtgggggtttttttcttttggggggctttctttttttaactgtaaatttttaacatgcgggccccacacccattaaacaagcccgggcccccaaacggacccccccctaaacaaaattaaaggccccccataaaaaaaccccccttagggcccctgaaaaaacaaccccccatatgcccaagggaatcaccgcggatccaatcacccgggaaaaaaccgcgggggcaataaacctgaccctcccaaccaaacaataggacggggcccccaacccaattggcccaccaccaaaccccccatatttttgtccccccccccccc

SEQ ID NO: 24179 - DNA, 485 bp, Glycine max
  Clone ID: PAT_MRT3847_121834C.1
ccagatacacctgctcccctcccattgatatttgacctattatccaacccaaactgatcggtcaaaacagaactagtagactgcctcttttcagcactttcccgaactcgaaactcagtgcgctgcatattccggcgaggcctcctcataaatcctccagagtctgggcgattaacccttgtagctggacctgatgatcttgggtttgaattttttacagtaacggcatatctctttcccctgccacaaaattgtgtttttgactccataaaattctcttttgaaactggatgaagtgatgcatctctagtgacaggctgaacttctgattcttttgcactggatgaaatattgctgctcttaccaactacattttgattccccttcttatccaattggtaactagaagtcctactgctattattaggatcatgagcagcctcaaatcgaccctttactccagcaatattttctgcatcggacgc

SEQ ID NO: 24180 - DNA, 259 bp, Glycine max
  Clone ID: PAT_MRT3847_121835C.1
ctataaacagctgtgtgaggtaatgcgaactcgaatttaaacagaaatgagtgcacgttacacatgctgtgcaaacaattagacgtgcttcacatatctgtgagctgctaaaaccctatcgagacatatgtcagacattggaactggcgtcagtgctaagcttgcaacaaggtcatatggactagagaggcatgcacccccacaagcccattatcaatgagtcaagaaggagcactttccaaacacctcactgctccat

SEQ ID NO: 24181 - DNA, 233 bp, Glycine max
  unsure (1)..(233): unsure at all n locations
  Clone ID: PAT_MRT3847_121836C.1
cttcttttctatctatcgctaactcatcttcccatatatnatgttctgaccatattcttctaacacacacccaaccctccattttgcacccctntgccttntttcaaatgtntaatctcttccattntaaggtnnaaaacatggntgttccttcttttccatgcctngnatgatatttcctgtttaaagatcaacccttgcctcnncncaaataaattaataaaggctgccac

SEQ ID NO: 24182 - DNA, 295 bp, Glycine max
  Clone ID: PAT_MRT3847_121837C.1
tatccttccgattgccaaggctatctacaaaagacacaatctagtagatagaataattctcactagccccaggccagaagtttttgtctaaagacctggccattttgcggactgctaaaagcgctattttgggctggtatgcgctacttgttcccacagtgaaaagtccactgatctttatgttcaatccagaacgaacagtccccttttgacctcgtgcgacagatacttctggcctggggctagtgggaattattctatctgctagattgtgtcctttgtttgtggccctggc

SEQ ID NO: 24183 - DNA, 170 bp, Glycine max
  Clone ID: PAT_MRT3847_121838C.1
accggtccgaattccttgtctctacgcgccgagtaaaccccaggcgggccggaggctgtggggttttttaaacggaccggcgtttctcccaatgaacaggggcaaatgcatggttgcctagaaccatgtaggaccgaggagtgctcttccctgacttgtagtggagaatt

SEQ ID NO: 24184 - DNA, 122 bp, Glycine max
  unsure (1)..(122): unsure at all n locations
  Clone ID: PAT_MRT3847_121839C.1
ggcggataagaagcatctggagccgcaccaaggaatccgcggaggccgacggggagtttgcccggtttttaacgcggggggggcagcccanacggagcgacgcgggcctgaaggagatatgg

SEQ ID NO: 24185 - DNA, 191 bp, Glycine max
  Clone ID: PAT_MRT3847_12183C.1
agaaaacaaccacacaccaataacgggaaatagtacacagcgccacataggacgggaaacatcaaccattggagtgtcatttatttattacaccaagagcttactttagaaattttttgttgggcaatccctgacaaagcattccgaagttacagctagaaacgctgagtaatgccaactggcacaaacaa

SEQ ID NO: 24186 - DNA, 471 bp, Glycine max
  unsure (1)..(471): unsure at all n locations
  Clone ID: PAT_MRT3847_121840C.1
aagatctccatcacataaaaacatacagtgactgagtactggattacacgattgagttgttcagggttcagataggaaaaacatcttggggactagagatagagggaatcgacagatgcgcagcagtagcgcgcgggaaacaggacatcacgattgcgttgcatgtcgtcggctgcgcagcggcggcgcggggcttaagacctgctcttgaatgggatcgccctgatgatcacctggtggtagatggcagccagggcagcgccaacgaagggaccaacccagaagatccaatggtcattccaggcatggtccttgttgtagatgatggcagcgccaaggctcctggctgggttgatgccagtaccggtgatggggatggtggccaggtggaccangaacaccgcaaaaccaattggcagtggggcaaggataggaacatgtgagtccctggcattcctcttggcatcagtg

SEQ ID NO: 24187 - DNA, 333 bp, Glycine max
  Clone ID: PAT_MRT3847_121841C.1
tattatatgataatcttaccccagttctcttcatactggaacattaaaataagaataaccatacatacgcattgttagtttgatattcatgttaaaaaaggaagccgagcgagacaaccagcgtaacccgaccttgtctccctcgacttgagggacccggtacatggattccccggtaccaccctcctttccgttatgggaacagacacgattgtcttagccaagacaacacatcttactggatatgagaaccgcgtgaggcggcacgagactcaaggcatcacctgccgcgactgtagaacgaagaggcgaaggcccccatttaatatgacg

SEQ ID NO: 24188 - DNA, 160 bp, Glycine max
  Clone ID: PAT_MRT3847_121842C.1
gctcggaattagctcgaagcgttctattcgtaccgcatggagcagcacactgcaacactcttcatgcaccgaggaagagtacctcgctctctgtctcatcatgcttcgtcacggcggcgccggcgaggtccccgccgccaagcatgctgtatccgacaac

SEQ ID NO: 24189 - DNA, 420 bp, Glycine max
  Clone ID: PAT_MRT3847_121843C.1
acggacgacagaaggcgggtttggccaaggggcataagagaagagatacgttgaagattgtacactaatggaacccgacgacttaggtcacactacactctcacactaagtcaatgaataaacacggaaacatgctgacatcgaatccacacaactgatactactatcttttaacttgtaaacaagttcaagtgtagatttcctataatcatatcatattcataatggaattgttattggtgcattattctataatatttattggaaaggatggataggatcttgaaggattactttctctggtttcgaggagcgctgggaaagtttgttagttataattaggggtgttaaatatcatcccaataaaacataaaaacgtgattcggtttggtgtgaatataacatcaaacgggtatttta

SEQ ID NO: 24190 - DNA, 206 bp, Glycine max
  unsure (1)..(206): unsure at all n locations
  Clone ID: PAT_MRT3847_121844C.1
aaaaaannnaagaaagaaaaaagacccaaaaaggaggannngaaangcgagancnaaaaacanancnnnccgnggcaccagnagnaagnacccnanggnncggggcnnnggcgggccncngganagagaacaagcggggggggccagaggcanngananncccnnggnggacagncaagnnancgacacggaaaggggngaagaag

SEQ ID NO: 24191 - DNA, 557 bp, Glycine max
  Clone ID: PAT_MRT3847_121845C.1
aaacaaacaaaaggggagcccccgaattagcttataaaacatagctcccccacaaaacggggggcccgttagttttagtattacaaaaaaaacaaggccacaaagtttaattctactttgcttttttatgcattttttaaaaacggcacatataacttaaaagacccatgaccaaaatataacagctacaaaacaataactttaattacaacccaaaacacaatacattaaacctgttttttggtcttttagcagttaatgccacactcctaaacattaggaccagggacccttggggggaagggatcaattctaacccacaagagggaaaaaatggatgcaaaaaaaatggaccccccccccacaaggggcggggttctgttttggccccccatgaaacctttgaggaaagggtataaatggatgatcacccaaaatgcaaaaaaaagcttaccaaagaggggcccccaagattgggagccactattggtggcataggaaaagccggcaaccccccaattatgtttattatgaaaagggtttggggggggataaaa

SEQ ID NO: 24192 - DNA, 235 bp, Glycine max
  Clone ID: PAT_MRT3847_121846C.1
gacgatatgaagatagaaaagtgagatggattgcatctctcgctttgtattggaagatgggaagcgtaaatcggaatgccttctttcgtttgagaagaattttgtgatcagaattagtgagctgaatacaagacaatgtgatagtgggaagcttttcgcaagtgacgactcagccctttcatcaagtacgacatgaagttatcacgaggaggacatcataacgctgggaagaggt

SEQ ID NO: 24193 - DNA, 307 bp, Glycine max
  Clone ID: PAT_MRT3847_121847C.1
cttagcttggaaatcggtttcagccacggctgatattttctactccagccgcccttctgttcagcacttatcatgggcaagggcaggatcggaatcaacggattaggaagaattggccgctcggtagccagagtggctcatgcgagagactatgttgaactcgttagccgctttgaccatttgatgattaccgatgacatgacatacatgtttatctacgacagtgttcatggacactggatgcattacgatgtcaccgattaggaccaaaacaccctgctccttatgtgacagggccagatcacta

SEQ ID NO: 24194 - DNA, 250 bp, Glycine max
  unsure (1)..(250): unsure at all n locations
  Clone ID: PAT_MRT3847_121848C.1
tggagagaaccctttctttctttcttttaaacatttactttaacaacaacttctttnctatgtaatgtttgtttttatctcaacgaacacccaacacccccttattccaaatccttcaccttcatatccgctttacgttatcatttcctctatccatctattcttctttccttctttcctaatataccattctatttctcctaacacccctttttaaccttccctttttactatactttcacttctttct

SEQ ID NO: 24195 - DNA, 233 bp, Glycine max
  Clone ID: PAT_MRT3847_121849C.1
agggacacaacttaatttgttgatccagattactaaaaacaatgtgatgaaaattaaaggccttgttttcctccatgccaaaaatttgggaacaatggaatgccaatcgtaacaaaagttcactcaccgaatgaacactggcttatgggcccgtattccggaagtgatatgcgcatctttgacgcttgctgtagaagcacacaagatctttggctttgagaccattcctgaag

SEQ ID NO: 24196 - DNA, 300 bp, Glycine max
  Clone ID: PAT_MRT3847_12184C.1
ggctgttatctattcatgaatatttttgaggcgcgactaggacatcaaacttggggaagctataattcgaacgctcggacgaaaggaaggcccgtccccgtctaaccagaggaaggcccaggtccaagtgaggacaatacgcccaaccgtaaccatggggctcttgggcgcctcagaaaagggccccacacactagtgcgtgaaagattcatatcttaagactcgagtaaatgctgatgtttttctaaaccaaaaaggggaaaaagacacctatataaacaccgacaacacaaacctaac

SEQ ID NO: 24197 - DNA, 730 bp, Glycine max
  Clone ID: PAT_MRT3847_121850C.1
atataaagttagaaaaaccagttttaagtttagtttttgtataaagttcaaaacaagatcggattttataactaattaagcacataactagtttaaaatcagtttggcttgtaaccgagtctctagatcaattcacatatttgtattaagaatcaaattgttttaaaacatttcagttctattaagttctaaattttgcataccattaatacttactagctcattttattattaataataatgactaacttatcattgttatcaaaaccacaaactcatcctcatttcaagtactctggtggtgctagaaatagtctcattgacaattcaattcgtaaaagctttagattaaatgatcttaaccactaagataacaattagtaacgtaaagaaatgacattgaacatattatatataaataaatagtacaggattatagttaaaagagttcatcatcagaattttagatggggctctcaattttcagattttcatccattctgttcttgctggctctgacaaactcaccatgggcattcttgaggcaaataccccaacttgtaatctgttgctatgtattgaagccagcatctacattgcacttggaggaggttcccaccgagcaatgttctgattgggtaggcttgtactttctggtttctttcaattttccgattggagccatcctcaaaactatctgcaataacagggagacagtttcgacaagcac

SEQ ID NO: 24198 - DNA, 228 bp, Glycine max
  Clone ID: PAT_MRT3847_121851C.1
agcgtgcacccttccacattcttgctcgtcttcgatctctctcgatgtttccttcactgttctccataaactacggacttcagatttgctcagaataggagggaatcgaatcgaatcgaatcgaaaggaaagtgcagaatgggtggacatgcggtggctggcgctcttggagaaggcagacgattcgacggcgagcaccgtattcggcgccgaccagtagttgtgaaa

SEQ ID NO: 24199 - DNA, 229 bp, Glycine max
  Clone ID: PAT_MRT3847_121852C.1
tatacctgacccatggtcattgattgcatttgacacaacaatgttagatgttccaatgaatgtgccttatatcatattactgagcttgtcaaaggacatttttgcatattgtgacattgattaccaattggatatttaacttgttattaatcttcctgtctatggtttccttaccattgctttttctcattaagtagatatctatcttccttccttcactgacttgttt

SEQ ID NO: 24200 - DNA, 349 bp, Glycine max
  Clone ID: PAT_MRT3847_121853C.1
gttcttgtgcgcgacgcgtgggatacatcgtgggggggcatgttctgactgtaccagcgctggtgcactgcttttggttgatacttatcataccaatcctgaaaatgcagttcgtagtatctttgttgcgcctttcagaggcggaaggcccattccggtggttacattttcgaataccatcgtgcagatcgaaccatacatgaattcaaggtttcagcttatgagtaccactaccaatggtgattttgttcaaggaaaagacctcgcattggttaaagctaatgtatcatgtgctgccgttggcttgacatcaagttacactcctacttcatatgtggaatcctggttt

SEQ ID NO: 24201 - DNA, 427 bp, Glycine max
  Clone ID: PAT_MRT3847_121854C.1
ctgagaacttgggcaagcttacgtctctaaataagttgattctgagtggaaaccttatctgcggtgtgatcccggggacgctggggctgtgtaaggctttgcagttgctggatataagtaacaataggatcactggttctattcctgatgagatcggttatttgcaagaattagatatcctcttgaacttgagttggaattctcttactggccccattccagagaccttctcaaatctctcaaaactatccatcttggatctctctcacaacaagctcacaggtacactcacagttctggttagtcttgacaatctagtgtctctaaatgtctcctacaatagcttttctggttctcttcctgatacaaagttcttccgggatctacccactgctgcgtttgctggtaaccctgacctttgcattag

SEQ ID NO: 24202 - DNA, 117 bp, Glycine max
  Clone ID: PAT_MRT3847_121855C.1
atatcctactacaccgtattaaagaacttaagatagactatcatgagaacgcggtccccattactgttacgaggaagtgattacctggcatcagttgctctcgcatccagcattccg

SEQ ID NO: 24203 - DNA, 897 bp, Glycine max
  Clone ID: PAT_MRT3847_121856C.1
agttttattgcaatatacaccaaaatattttgtatgaaacaacccatgcatgctagtgattccctttaaaaatattggttagggtcatctatggtatgatgtgtttatttggatattagatttaagttatctaatattcctttttcccccttttcaacaacataaattgagttcattcacttcttttcttgttcctaaaaactggcttttacctagcaatggtgcttttctgtttatttaatggcaaaaaataggaaatcattgatgcagcatctcatgtcccaccacctccctcagaagatcaaaagaagaaaattgcaaagataatgatgaagggcatgtgactgacagctgttaatcaaatttgcacttttgaagggctgccataggagaacagaaacgcctcaaaagcaagaaggtgctttcagataagaaggcgttcaggagaagtaaaaatagctgggactaatacggtgttgtccagaatcttgaaactgttttatgatttttgacgcagaaccacagtcctctgaattctaatactaccatattggatacacacagtagatgaatggttgaatataaccgtgaattcgagtagcatagcccaacaagcaaccaacccactggatggacctcaatggtggttagttagccaaaattgtgatgtagctaggatctaaacgaatacgatattttcaattagaaatatcatatattggttgaatctgtagtgtttttctttgtcagctttttgcccttttaatgcgcccttggcacgtgtccagattgatggatctatataggcattgaatgtccacaaccctgggaacgtgcttcacgtaaaaacacgtccatacataaagccgttgcccaaaaaaacggctcgagctccaa

SEQ ID NO: 24204 - DNA, 469 bp, Glycine max
  Clone ID: PAT_MRT3847_121857C.1
gaagggaatctgaaaatgtgattaatggaagctctccttaccaacgctccatggggactccgggtataagtagtggactactataatacatacttatctgaatggcagtggtccctacaagagctatgcggcacaactctcatgcagctaatatatgaccctgaaactgtgtgcccattacataccttttttggacatacctgacgagacgccctgtttgctttgattgctagacaaccaatagacccgcttcctgatatgatcatagctacttgggtgatagtacgataaatgattccttaagatcttcataaaacgctagagttgtgccttagattgaatggcgaaggactattataaaaaggaggttgccttgtactttatccaccccttaaatctatgcctcgaaaagtgacacccgatatgagcatggctattggagagatgatgcctagaatgcctaccaacc

SEQ ID NO: 24205 - DNA, 414 bp, Glycine max
  unsure (1)..(414): unsure at all n locations
  Clone ID: PAT_MRT3847_121858C.1
aaaagggggggggccacaccagcgtacngntnggnaaaaaaaaaacaatttgttttcaacaaaaaccacacccaactatgtattgggcgcacttcttatgaagcccccaaaaatatttgcacaaatatttttgttgttcccccaaaaaaaattttcaaataattatttttttacaaaaaaaaaaaagctggttttttttacttctacgagggagcaacaaacaagattcataaacaaaacaaccaggcagctttatcctttttttatataaatattcctctctaagaaggtgaagaaggtgtccattaccactaccctcaaaaagaattcatgttttaaaacacacacacccccctgaatgattttttttttcaaataaaccaaaaaaaagttttttaaccatttaatttttat

SEQ ID NO: 24206 - DNA, 452 bp, Glycine max
  Clone ID: PAT_MRT3847_121859C.1
tggcgagtgagaaggagggactcgccccctatatagacccatactaacccatcagaagtattcttggttcacctctacggacaccacagctgatggaagtgcacaactcaacttggcaatgcctagactaggggaatacgacggttctacgcttcaaacccaatgagaaaggcacgattcgcagcctcatcacgacacctgacttcgttgactgcatctacagctcttatactgaatgacaccgacgacatcactccacgccgactacgaaacgatgagagaactaccatgcttctgaaacccatgacaagccggctatcggtcatctgagctaccacggcttgatgcatcaccagaacgttgagggcctaagtctatgcaacagctgcttggcagggacattgcctagcaacctagccaagaagtcaccactgcagagcatagatagatga

SEQ ID NO: 24207 - DNA, 645 bp, Glycine max
  unsure (1)..(645): unsure at all n locations
  Clone ID: PAT_MRT3847_12185C.1
ccacgccgtccggtacatgcattgtgggtgggtgtagtcgcaaacgagggtctttcctactgttggacnacgacgcttcgtcttcacgtcacaaacatatgactcagaatgacctgtctggccattgtgcattccatcggccagagagtattagtgaattggtatagcgaatatgtttgttcggacacgactcatcaccgtagaatggtggtatagaaggtaccgtcgctcgctctgtccactagtggtaatagtatgcaaacctaatcgatctcttgaggactatttggtacacagtcaccttatgcctgtagcacttgatgtgatgagattctatgttggacacattgatacataaaccattcccatcaaggttaagtacactccttcaaaacaacctcgctataaccaggacaagactccggagctcatcataacgatcctccagattctagttacgttggatatcttgcgtttggcagagtggcacttcgttctacaccaaatcaacatgatcattcatctgctagatcacataaatactgacatttgcaatgataagttggtcatgaaaaccgccccccccccccgcatcttgagcaatcctatttgggctacagagatgaggggtggcttggatatgcc

SEQ ID NO: 24208 - DNA, 236 bp, Glycine max
  Clone ID: PAT_MRT3847_121860C.1
tttttaaaataaagatatattctaagagggcgcataaacggcatgggataagataggttataggttttcacacttgtacaaaggagtgataggcgctatttattgtctaaaaatgcgagctggcgcatggatcattggctttagtaaaatatctttctatcatacaccacaaaagctagattacagacgctttagaagagcctattaaaaaatttcaagctaagcatgcccgacca

SEQ ID NO: 24209 - DNA, 320 bp, Glycine max
  Clone ID: PAT_MRT3847_121861C.1
gtgaatcgtaaacccatgggaggttcatggcctaaggtaacgatattcgagtcattgttagtatggaatggaccgattgagataaaaagagtgttaatgaggattcaacgggtattactagatgtataactaagcagaatcgacagaatactcctagtcgattggaaatgagaaaatactgaccctcgcgttagcaaacatacaattgacgcagaaagccagaaatggatcaaattgaacgcttgcgtgataccctatgaaccaaagaacttcacatgattcacgatctatcttacttatctatatagatcgatctatct

SEQ ID NO: 24210 - DNA, 441 bp, Glycine max
  Clone ID: PAT_MRT3847_121862C.1
cgttgatcgacataactagaaacagtgtgatgaagatgaacggccttgtgcaattcgttgatacagcaaacggcagcatgtcagatgcgcggcattactatatgctaccctctgcgaatgaacactggctatggtgcccgtactccggaagggatatgcgcatgatgaaggctagctgggcaagcacacaacatgtgtggctatgagaccatgcctgatgagtgcgttgaagcaacaaaggaattcatacatggcgaacaatatacatcagactccaaaacaggtaaccaacaagcttacttttatgccagagacctctacatccatcccaaggacacatttgtgctcagtatagatggcacgcgcctctctaatattccatactacaaaaaacatggatatggagtggagaaatttaactcgaccttgtatgatgaatgg

SEQ ID NO: 24211 - DNA, 407 bp, Glycine max
  Clone ID: PAT_MRT3847_121863C.1
aaaggttataaaatgttttattgaagcttaaatttgttgttgaatattttggattgaaaggaatgattttgtattgatgaaagatgatgtcttggcttaaaagtcataactttatgtagctttgaatcattctaactagttacatcatggggtaatcgattaaaatgagctctaaaggttgattttggattttaggctgattgtaatcgattaaataggtttttaatcgattaattcgagcctaaggacttttttgtttacctgagctctgttgtaatcgattacaataagttataattagttacaatggccaaaacttggtcatagagttttattttgtaaacatggtcttcatgaaagttgtacccttggatgttagctaactaattacttttatttcacttaaa

SEQ ID NO: 24212 - DNA, 598 bp, Glycine max
  unsure (1)..(598): unsure at all n locations
  Clone ID: PAT_MRT3847_121864C.1
gaactattttataatttattttcactttttattatttttttcttaaaaccatttttattcatactattaacagcattcatctttccttattttctatcttaaattatttctcctggcttatggtgatacattttttttaaaaaaaatcaatataaacacttcttactatatcatgaaatagaaaacacacacatcatcatagttaactcaaattcaaattaaaaattatataatgagttttaatttttactttttcaattattgaatttaaatctttaactaacaccttattttttaaatagataagtttgcataaagatatataagagatgattttttcttatttatttttgcttataatatttcccaatcttaaaatttatattcttaaaattctttattttaattatttgtcttttaattaaataaacatgttaattattacaagaatgtccatacctgtgttactaggttgatattaggacacanagttatagaataaatacaaaattataaattaggtggtttatatttttaaataaaaacaattatttattagtattatattaaaaaaataaaaaaaatggaaattagaaat

SEQ ID NO: 24213 - DNA, 391 bp, Glycine max
  Clone ID: PAT_MRT3847_121865C.1
tcgaggggaaaaagaagagacaaacacagagacaagagacaaaggaaacaagacaaaagatcaaagcttagatcaagaagggaattggccagtcataccaattcagatagtggaagtaggagtgacaacaactctgatggcaaaagtggtgctgctcaagcgaaagataagaagcataaaggtcattctcagagacatgctgaaggtcaaccttccgtagttgcggagaaagagttacatcacatgcaccttgaaaagagggagaaaccgaatatgctagaggaggaagaattcccaaaggaaaatggagagtggcatagcaacagcactggggctaaccatagatctgacagaagggaagggaggcagcctgatgtgatggatgatcaac

SEQ ID NO: 24214 - DNA, 2196 bp, Glycine max
  Clone ID: PAT_MRT3847_121866C.1
gctaaaactggttgattgtcttggaactatcgctcaaagtggaactgcaaagtttttgaaggctttaaaggatagcaaggatgctggtggtgacaacaacttaattggtcaatttggtgtgggattttattctgcttttctggtttcagatcgggtggttgtctcaacaaagagtccaaaatccgataaacactatgatttggaagggggggcaaatgctagctcatatacaatatctgaggagacagatcccgagaagctgattccaagaggaactcgccttacactgtatcttaagagggacgacaaaggttttgctcatccagagcggattgagaagcttgtgaaaaactattcacaatttgtttcattcccaatatacacatggcaggaaaagggatacaccaaagaagtggaagttgatgaagatacagctgaagacaaaaaggatgatcaagatgataagactgagaaaaagaagaaaactaaaactgttgttgagcggtactgggattgggagctgacaaatgacacccaaccaatctggcttcgtaatcctaaagaagtcactaaggaggagtacaatgaattctacaagaaaacttttaatgaatacctggagccattagcatcatcacactttaccacagagggtgaggtagaatttagatctatactttatgttcctgccttcgctccctctggaaaggatgacataatcaatcccaagaccaagaatataagactttttgtgaagagagtgttcatttcagatgattttgatggagaactgttcccccgatacttaagctttgtcaaaggtgttgttgactcaaatgaccttccactcaatgtgtcacgtgaaattcttcaagagagccgcatagttcggattatgaggaaacgtctagttcggaaagcttttgacatgattctgggaatatccatgagtgagaacaaagaggactacgagaagttctgggagaactttggcaaacacttgaaattgggttgcattgaagaccgtgagaatcacaaacgtattgctcccttgcttcgttttttctcgtcccaaagtgatgaagaactgatcagcttggatgaatatgttgagaacatgaaacctgatcaaaaggatatttattacattgctgctgacagtgtgactagtgcaaagaacacaccgttcttggagaaaattgcagagaaggatcttgaagttctgtttttggtggatccaatagatgaagttgctattcaaaatcttaaatcatacaaggaaaagaattttgttgacattagcaaggaagacttggatctaggtgataagaatgaggaaaaggaaaaggaaatgaagcaggaatttggccaaacgtgtgactggatcaagaaaagattgggagataaagttgcaagtgtgcaaatttcaaaccggcttagctcttcaccttgtgtcctggtgtctggaaaatttggttggtctgcaaacatggaaaggctgatgaaggcacaatctatgggtgatgcatccagtttggaattcatgaggagcagaagggtgtttgagatcaaccctgaccattctattatcaggaacttggatgatgcatttaaaacaaatcccgatgatgaagatgccctaagagctattgatcttttgtatgatgctgctttggtttccagtggttttacgcctgataatccagcacaacttggagggaagatatatgagatgatgggtatggctctcactggtaaatggtccacacctggtcagttccagtccacagtaacccagccccataccccagaaactttagaagctgaggtggttgaaccaactgaggctggtggtcagaagtgaggacagtcgtgtggacatttttgttttcttcgcgttactttctgttctttcttttaacactgcttacggagttacgggtgaaattgtattcttgaagaacatgggtattgatagtaatatttagtttttttttttaccaaagtaatatttatagttatcctttccgttgtgattagaaaacatccagcataaccaagtagtttttcttttgtttggggaaaaaaagatatcaagataatttggataaatatgctctgtggcagcatgagataagaattatttcaatggaactgttgccaaaaaaaaaaagattatgcgttgtacttctgtcc

SEQ ID NO: 24215 - DNA, 628 bp, Glycine max
  Clone ID: PAT_MRT3847_121867C.1
aacgattgggagataaagtgcaaagtgtgcaaatttcaaaccgacttagctcttcaccttgtgttctggtctctggtaaatttggttggtctgcaaacatggaaaggttgatgaaggcacaatctatgggtgatgcatccagtttggaattcatgaggagcagaagggtgtttgagatcaaccctgaccattctattatcaggaacttggatgctgcatttaaaacaaattctgacgatgaagatgccctcagagctatcgatcttttgtatgatgctgctttggtttccagtggttttacgcctgataatccagcacaacttggagggaagatatatgagatgatgggtatggctctcactggtaaatggtctacacctggtcagttccagtccacggtaaaccagccccataccccagaaattgtagaagctgaggtggttgaaccaactgaggctggtggtcagaagtgagagaggacagtcatgtggacattttttgttttctacccgttcctttctgttctttcttttaacactgcttacgggtgaaattgtattcttgaagaacatgggtattggtagttagtattagtaatatctatagttgatcctttccgttttgattt

SEQ ID NO: 24216 - DNA, 401 bp, Glycine max
  Clone ID: PAT_MRT3847_121868C.1
ccttttctttcttttttttttttttattaaaagtaataaccactttgcttccgccttgcaattttgatgtctctgtagtgcactctcagatccggcaaacacacctttccttaatttactaacctatctttataaaaaaattttaataacctcataaaacattatcatttgtaatcaatcatagactataattcattatggttctttcatttcattaataaaactattatacctatttttacttaaaataatctctacaaaattccatatgtaattaacatatatttccatatctatttataattcccttacattctaatctactatcctttcttataaatattacttttttttttcttttaagcatcacatattttctgcaaacaccaattttcctctct

SEQ ID NO: 24217 - DNA, 205 bp, Glycine max
  unsure (1)..(205): unsure at all n locations
  Clone ID: PAT_MRT3847_121869C.1
cnctaanaagacgcgtgcatgagcncgnaattcgggctnganngaggtngntncttnngaacacgtcctgcggatngatccaatcctccngnnccgacatngatggaccngannggaaaacgantncaaagccnctctncgnntgcatcccgttgntccgacncagtcnncgnctacgacgagnctnnnttcatngattanggnc

SEQ ID NO: 24218 - DNA, 509 bp, Glycine max
  Clone ID: PAT_MRT3847_12186C.1
tcaacctttattttcttttccatccacccggccatgctcatgtattctggtatcttgtaccaaactctttgtactactatgatttatgggctgaattaactttccagattcttctgttcccaccaattcaaaaaattcagttgcttctttccatgtcccaactccagtacttctatctgattcttgagatgacctggattccttgatgtgcttttcctcaaacatttgtagaagtctttcctcttctaacgattcaagagtttcaggggcagccttcctagttttctgcctttcatctgtggcagaaactttatttttgccaattctctgatcacaagtcgcctgcattccctcgtcattcaaactattaaatctagttatattcacactcacctttgcttcattatttttacatcataacttgaatgtacattgctttggaaaacccctttcttcctctcctttaattctttggcactcctaggttttgcttccggtctgtgcatgac

SEQ ID NO: 24219 - DNA, 305 bp, Glycine max
  Clone ID: PAT_MRT3847_121870C.1
accggattcattgaggtgcgcctatactgagacttggtgctacgatacgtcagctacaaagacgccgtatcggatgcgccacacgcaaattcgatttggtggtttctgccagtatttaacgccgagaaggagacgacttgttttccggagctagactacaggatccggaggctggaccacacgatcaggaacgttacctaactagctccgacggtgaggtacctgaaaggcttaaagaaatttcactagttcgcagagtttaccatagatgacttctgaaccagcgagagcggcttgaactcagt

SEQ ID NO: 24220 - DNA, 224 bp, Glycine max
  unsure (1)..(224): unsure at all n locations
  Clone ID: PAT_MRT3847_121871C.1
actgataattnaaaatttttatttctctggggttatatacaatcgaacataacccagatggcggggtttcaaagcaaccaaaccacagactaatagcgctcgatttagcaacctaatacacgcgcaatttcttacttttggttttctcactcctaattagaccacaagaaagggataaaggaataagagagaaagagagagagaaagagagggaggagagagag

SEQ ID NO: 24221 - DNA, 293 bp, Glycine max
  Clone ID: PAT_MRT3847_121872C.1
aatgtgatgcagtataactaagacaggcagagctggctatgacaatcatattgatactaattcataggtcgtgaagtatgaaatgctgctacagtacctagcatattcggccttttgctggctgagcggaatcctataggaagcttgagacttgaacaaagatggtgacttcaatggtttatacctgaaagtgatctactgcaagttggtagatttaaggtctgtcaagcgttgctgtactcaaattgcctatttaatacatcatggtaaaagttggagagtgtcatgaaaaa

SEQ ID NO: 24222 - DNA, 169 bp, Glycine max
  unsure (1)..(169): unsure at all n locations
  Clone ID: PAT_MRT3847_121873C.1
acaactatancctatggggttccatatttgatccagtcctgccgtcgaatatgcatgacatcaactacacacaccccatctagtaacatggggtgtgtcatcggtcattcgacgcagattggtttccacaggcctaatcatttgtcattgagcctttccacacaacata

SEQ ID NO: 24223 - DNA, 683 bp, Glycine max
  Clone ID: PAT_MRT3847_121874C.1
gggctcaatgtaaaattcttttatttataagagagaacatatacacacacacatgactaattcaattgcagatcatacagaagcttcaatcatcaagcctatcctttattgttattttaagtttcaacttcaaatataattctactaccaagtattatttatttgtgtgtggaaaataaaaacagcatattttaatacaagtgatggcacagaccccagtcctacttgatacactattagtggaaccctgctgtaagcttgcttatggttatcatgccaaatggctctgtaagacaaggctgcttagtagccaatgacagttgttgtgccacagaacgcatcatgggtctggactctggagccgcacgtgtgcatgccatagccatggtcaccgtgaacactactgcttctgctaaattgcccgttggaggtggaagcctttggtcaagcacatccttcagtagcacaggtggttcctctgttgatgacaaagacttgtttgaagacattgtaaacaagagttctccaggatgctttcccatcattatctccaaaaccaccactccaaaactatacacgtcacacttgttagtgaccctcattgtttgagctagttctggagccatgtagccgtaggatccagcaactgaagtccatgtttgaagtgtttgagcttaacagct

SEQ ID NO: 24224 - DNA, 313 bp, Glycine max
  Clone ID: PAT_MRT3847_121875C.1
gctaattggtatggagactgctcaagcttgtgaaccgggtggagaatccgtgattgtggtgcgctaggtgttacatcacgtcatatgacagccttgggggttgctttggtgttaattgatgcatacttaagtcactcgattattggggatctatctctcccatttacaaaaaaaaaagccggtgcctgcttgcttctctgatgtacatagaaattaactctgtactgctagtggaatacttgggcgttgcatttgcctgtgaaaaattagaaatacgctcacgggcggacacaccactagagagcgtaggcat

SEQ ID NO: 24225 - DNA, 274 bp, Glycine max
  Clone ID: PAT_MRT3847_121876C.1
cgtaagctcggaattcggcgtcgagggcaatacatatgtcatacagaatcagataaataaggtttcgcttcaatttcttttgagacatctgcatgattacaattgcttctcagaattctggcttcaaactctttcttctttccatgtacatgattaatttgtgctctatccagcagaagaaaaggccaaaatctagtagtacatgagatgatatgtcatgctatacatgtatctttttgttttggcttcttatatcaatataagaaattcttca

SEQ ID NO: 24226 - DNA, 1066 bp, Glycine max
  Clone ID: PAT_MRT3847_121877C.1
atttttcgtccgtaaatgcaagtggtgcgtccgccccactgacactcactccctctgtacaactcccttgtttgtgagttgagcgaagccgaagacatgctgagaactctagttctgaagcgttcccttggtctccactcgcattttcaccacctcctgcttcggcgatgctcatcatccgcggcgcccaactcctccgcggatgcagaaacccgcaagtacgccggctacgctgccctcctcctcttctgcggcggcgccacctactacacattccccctcccggacgacgccaagcacaagaaggcgcagatcttccggtacgccccgctgccggaggacctgcacacggtctccaactggagcgggacccacgaggtgcagacgcgcaacttcctccagccggagaacgcggagcagctggagcgcgcgctgagggaggcgcggagccgtatccggccggtggggtccgggctttcgccgaatggtatcgggctttccaggaccgggatggtgaacttggctctcatggatgggatcttggatgtcgataagcagagcaagactgtcagggtccaggccgggattcgagtgcagcagcttgtcgatggcctcaaggaccatggtcttaccttgcagaattttgcttccattagggaacagcaaattggtggcattattcaggttggtgcgcatggaactggtgctagattgcctcctattgatgaacaagttattgccatgaagctggtcacccctgccaaagggacaatagagatctcaaaagataaagaccctgaactgttttatcttgctcgatgtggtcttgggggacttggagttgtggctgaagtcacgcttcagtgtgttgatcgacaggagcttgtggagcacacagttgtctcaaccatgaatgagattaagaaaaatcacaagaaattgctatctgagaacaagcatgttaagtacctttatatcccttatactgattctgttgtggttgtgcgatgcaatcctgtttccaagtggaaaggtcctcccaagttcaaaccacaatataccaaag

SEQ ID NO: 24227 - DNA, 427 bp, Glycine max
  Clone ID: PAT_MRT3847_121878C.1
ggtcacaattacacaccagcaacatacttttacgtaaagtattatggaataaagaagctactcaactgataaaccaatctgctgctgatttaaaaaagcaattgattcaaaatgaaggtaagtttgatccaaagtctatgcctaaagccctagacaatgtgttgaagaaacaattggcattcaaaatcaagattgttccaaatagtagctgttattctgttttggaaacatctcaagattaagagataattaaatcagtgctgcaaaaaattgtaagtgatgaggtataaatttatagccaattgtttttggaaattgtatcaattactgctgatcaataatactgctcttattaacatttgtaatatccagctgagtgtgtccaagactgagatagaaaagttaatttcctctttgccgaggttgg

SEQ ID NO: 24228 - DNA, 593 bp, Glycine max
  Clone ID: PAT_MRT3847_121879C.1
ggctcgagtttttcaagcaagtcgcgcttccgccatactgactctgcctgctactgagttgtgacttgggcgaagacatgctgagaactctagttgtgaagcgcagccttggtcaccactggcactcgcattctcagcacctccgactccagcggcaattctcatcatccccggagcccaactcctccgtggatgcagaaacccgcaagtacgcgggctatgctgccctcctcctcttctgcggcggcgccacctactacacattccccctcccggacgacgccaagcacaagaaggcgcagatcttccggtacgctccgctgccggaggacctgcacacggtctccaactggagcgggacccacgaggtgcagacgcgcaacttcctccagccggagaacgcggagcagctggagcgagagctgagggaggcgcggagtcgtatccggccggtggggtccgggctttcgccgacggggatcggcctttccaggaccgggatggtaaacttggctctcatggatgggatcttggaagtcgacaagcagcgcaggactgtcagggtccaggctggcatccgagtgcagcagctt

SEQ ID NO: 24229 - DNA, 482 bp, Glycine max
  Clone ID: PAT_MRT3847_12187C.1
ctcgagccgagagaacttcttgctcaatacctgttgaggtgttgattgttcatagtgcgcaattagtttttttgggaacttagatgctggggagtttatttttctgtcattaaagacaaatttgaggccatatagagaacatgtctagtaagaaggaagagaaatctcaggctgcggctgaaagaatcaaggctgcagccctgagtgctgcgaaaggccttagtcgtgcccaggctgaaagggctgcgactgcagctgcccgaaacgtcaatgcttatgggcagaaggaagatggcccagcagatggtagggggaaaagggaggaaagaggcagatttttttgatgagtacccgaaaaagctgtcaaattgggggatagaaaagaccttaaagcctgcaatgtcgggatgccgtggattgggttagtgccaaaagggtttccaaagggggcactggacatacgaatgcaagaatgaacgggt

SEQ ID NO: 24230 - DNA, 356 bp, Glycine max
  unsure (1)..(356): unsure at all n locations
  Clone ID: PAT_MRT3847_121880C.1
atttataataaaaataagtagttaaaattaaatatttagaaagaaatttgttatccattacaagattgtgtccgctaaaaagtatgtgcggtctaagagaaaataaaaaagaaaggcaccattgttaagcaatacaaaaagaggcgactttgacttgagtaacttgtcatgaaactttgttagcaagaaaagagaaggtgcaatctgaatctgaatattttatggagacccagtagagttattttacggagcttgaagtcgtttggacagagaaatatgttagaaaaatattaaattttatattttttattaatacagagtatttactaatattttaaatgattaanaaattaata

SEQ ID NO: 24231 - DNA, 184 bp, Glycine max
  unsure (1)..(184): unsure at all n locations
  Clone ID: PAT_MRT3847_121881C.1
tcggattcggctcgagccctagggctggtgagaaaccacattgcccgaagccaataagcanacgcaggggangaaaaaaagaaaaaggagtntcataataatcataagctggttagagatgaagaaatgggcctcacccccccccttgggaagaagaagagtgaagcctccccctttttttttt

SEQ ID NO: 24232 - DNA, 412 bp, Glycine max
  Clone ID: PAT_MRT3847_121882C.1
atgtatttggcgcgtctaatggggtatgattatcatatccagtatcgttccagcatacataaccaggcggctgatgccctgtcaagattgccagaacaagacccatcaatgttcatgattctgtcagtaccgtgcttaactttcatggaagaacttcgccgtcaacttgacagccaccctgagtatcaacaccaacatcaaaatgttcgcgattgccccgccaaacaccctgaattttccattacacatgaccttgttctgaacagaggtcgtatttggttgccatggggacttccgataatttccaccttactcacggagtaccatgccatgcccactggaggacacataggggttgccaagaccttagctcacataacggaaaatttctattggcctggtctcagggatg

SEQ ID NO: 24233 - DNA, 261 bp, Glycine max
  Clone ID: PAT_MRT3847_121883C.1
ggcctacggcgactccttcaacgccgtcgcgagggacctcgcgaagacctgagggcgctcggcgcggcggaagtcgttcccctgttcgaaggggacgtcgacggcggtgacgtggatgcggtttacgatcggtggtgtgagaaggttgtggcggttttgaaaagtggtagtgttgggaaagctgtgataatgatggtgctgaggaatctggcgtcgttacgagttctgaagatgagtctgatgtggatagtagtgagattg

SEQ ID NO: 24234 - DNA, 592 bp, Glycine max
  Clone ID: PAT_MRT3847_121884C.1
aatgaaaaacagaaaaagtgaccatacaacttttctaaattattctaatggatcccctcaaatgatccaaggtatgagcctaaggtaaattcatatccacaaaattgccaaaaagttgacaggatattttatcaacagttccaagaccataatgatcaaatctacaaacatctgtagaagggcaagaaatataattggggtttgaaataactaaaacgtatgaacaaactatgcttctttttcttttggtccattggacagactaagcttctgattgtatttgtctgccggcttgaatagctccttgcagggactccacagcaccttcatagttcaagaagcccataaaccaaaattcatgattgtcgacagagatcacctggatgtacttttcagcaggattggatgtgttagatgaaggattcactgattttagctcgagcaatgggatgactaccttgtaatagctccattctgtttggttgtcatttttatacgaaataggattgtcaccggacgctggggtctttgcagtggatacatacaaaactcccattactggaccagcagacatggatagataacatgcata

SEQ ID NO: 24235 - DNA, 794 bp, Glycine max
  Clone ID: PAT_MRT3847_121885C.1
ccacgcgtccgaataggtccaaagtttcacctgtcactacttgcactgttgaacactactagctgctttgacactaccactttcactaaagcttagcagttcttaaaattgacccaaacaaatcaactggtttatttacttggccatataatacacagaatcacatgcagtccttcttctttcaaccactccttcacaaacatctcctcaatttcactagaatgcaaatgatggacaactgagccattaaccaagcagaatgaagaagagcaagatgaaaatgaaaatccagattttcatattcttctgtttcattagttgtttctcttatggttttgcggctgctgccacaaatgatgaagtttcagctttgctttctataaaagaaggtctcgttgatccgttgaatgcccttcaggattggaaactgcatggcaaagcaccaggaacggatgcagctcattgtaactggaccggcatcaaatgcaactcagatggagctgtagagatacttgatctctcccacaagaatctcagtggcagagtatccaatgatatacaaagactcaagagtcttacttctctaaacttgtgttgcaatgccttttcaacaccattgccaaaatccatagccaatctcaccacactcaacagcctttgatgtaagccaaaatttcttcattggtaactttccattagcccttggaagaagcatggagacttgtggccttaaatgccatccagcaatgagttttcagggttctcttttcctgaggaccttgcaatgcctcttc

SEQ ID NO: 24236 - DNA, 246 bp, Glycine max
  Clone ID: PAT_MRT3847_121886C.1
gctatgggttagagataagggctcagggtcatgaaaatccgaagagacaaggaggtgttgctgattttccattccgtgcctattttgtcccttctttatcagcagttcagctgtttaagaaccatgaaaatttatgtgtaaataacggtgacaggctcccaaattctgaggtttcagaggcatgtgaaatggttgacatttcagcaaactcatctactgccagtcaacattcaatattttctgttc

SEQ ID NO: 24237 - DNA, 438 bp, Glycine max
  Clone ID: PAT_MRT3847_121887C.1
aacggaaagaaaaggaatgtgtatttggttttggtttttaggaattggccatcaaaaacacccaaagggcaaaagaaaccaacccaagccgggggcaggggcaacaggaaaagacagggaaaaccccaacgggaaaaacaaaaaccgaaaaagggaaaaaaggaagatgcatttaatgaaaataaaaatggaagggtaagaaaaactaaacaaatttaaactaaagcgagaccacccctgtagtggaaaacttaaaaataaaaacccttttaaaatgaacgggagcctaaagcacaaacaaaaaccactggggtggaatacaaagaaaaggaggaacatggttagggcaaaaactccaacccggtaactttaatttgtgaaagttttcccccaggccggcagcatcttgaagaaaaaaaaaaaggccctggcccaatt

SEQ ID NO: 24238 - DNA, 149 bp, Glycine max
  unsure (1)..(149): unsure at all n locations
  Clone ID: PAT_MRT3847_121888C.1
ataccgggctctacccacgcgtccgccttttcgtccgtttttttttatctttttggacacngccgaagaccctagaattatttatttatcagtgaagtgaatgataatgagctttgagttaaaaagcaaacgaacacatgggcagacac

SEQ ID NO: 24239 - DNA, 2142 bp, Glycine max
  Clone ID: PAT_MRT3847_121889C.1
tcgattcgaccgcccacgcgtccgtacggctgcgagaagacgacagaaggggggggaagaagagataggggtggtggcaatgtgttaccaatatcatatcatatattctttcatcttcttgggttagggttctacacttgcaatctcctttcacacccacccacccttcaaccatttcaattccttccctcacccaaaccgcactatcgttcttcgacacggtcctgtttattaagcggtttggataaaagaatagaagcgtaaaatggccttcgtagcacatcaacctcagggtttgtttgtgacatcttcctcgaggcgtttgccatggagcaaaaggctgaagttgaagcagtgtttaacaaaacatcacatgattggaagaactgaccggcattgcctagtaaagtggaatgcttgtttaagtttagggcctccttgcttttgtgtatccaagttcaaacctttaaggatttcaggcttcaaaggcagcacccaaaatgatgattcaggaatcagagctaatcggttgaaggcacccaatacttctgttagattaggagagagcggggaggctcacaatgttccactgtcttatgcatctgaaacaaatgatagcattgcaacatcatctgctattcatagacttttcaataaatggctgacaatgttgcgcacgcaaccatcaagccaagaagtggagaaattttttgaagaacctacatcagcaggaattttaccaaaaactcaacaagggactcaaattaaggaaagccgtgcggttttgaaggtggcatggtcccattttctggccctcgatgcaacaataaagattcctttgctggtatttgttcctctctacctggctgttaatgtaaaatatggtgctgaagtttccaaggagctaactcctttatggattttgggcccatttattgtggctacccaagtcttggcaatccgatggttatgtgcactctatgttttcagcttcaaacagactgtcaaattactcaagaattctccctcttactgcattttggcccacagctacgttttccgtggcaagctcaaagaggatatctcaacttatgttctgcagcctatattgagcgtaaaaaatagagactataaacagctaacaagaaaaaagttgaaagaattgcaggaatggatagtggagatgtatcttgattatgtggaatcgatctggccctactattgtcgaacaatcagatttttgaagagggctaatcttatttaggtttgaaaattgaaaatattcttaggggtagtctcctgaaaggctaaagagagggatgaaggagggaatactacgtagcgttgaaatttttaaatgagatatggccaatcccattttctgttgggttttggtgttgagcaagttaatggtcatgaggaagttaagtttctaattcatgttatattgaaaacgttactttattcttagattagattgtaatattttttctaatcgctgcttttgttttgaggttctgtgtgagattgattctattctgcaactagtactatggcagagtttctccccaaccctccatcttttgtattattatgttaacttgggaaactattgatgtgtgggaacctcgacctggttgaattggcgattgataaggcttggccgagtgagtgttcatgcattgtcaacctctaaaatagcctaagaagatatgtaatgttttggggcttctttgccccactgagtgtaatatttgtcagccagaatccggagaatgcattgcttgtagaatgaccctgcatagtgaaggaagaaagcggagatgacgaatcacctcttgattagggatttttggctgaattctgacttctagagataaaacagtgaagagagagagagaattgaagttgtctttgcaacatggaaacatttcattaactatgatggttggatctctgctcgttgctaccctttattaccgcttttgggagggtgttggaagctcctgctcttgcgaatcttccaggataaattgaaaatatcaaaagacttaaattatgttttcagttcttaatatttggataattatttttttagtcttttaaaaatgtttttattagttgctcaattttgtctagttc

SEQ ID NO: 24240 - DNA, 557 bp, Glycine max
  Clone ID: PAT_MRT3847_12188C.1
cttgattttagaaccctatcattatgtgataactaaaacaaaaattaacataattgttctcttccggtatttgtatgattgtatctggactatcagtgagataaaacttaggaacatagttgtatgccccttgtattctctaaaaatgagacaaaaataaaattaaaagaaactaatgacattttattcatccaagaacatttttgctgatatatattatagtccttgttttatgcatgtccatcatgaatcctctcatgcttgtatttatgacttggcaatagaaatcatatgtgcatcagtcgtcatagctacataacaagaacaatgcataattggtgtcactcttatcatctgacatttaggtgattgtggattgtgtatcttgtaaccaaagtatcacggagaagagttttgtttgctattcatgccatggcttcttgcctctggatgtctaatgctctagccacgttatgctttacagttggttctgttcatggatgcagttaatattttattcttttacagcgtgaatgttactgttggagtaaatgaag

SEQ ID NO: 24241 - DNA, 339 bp, Glycine max
  unsure (1)..(339): unsure at all n locations
  Clone ID: PAT_MRT3847_121890C.1
ncgnnnganaaanatnanaatgnnnagagagaagaacgnataanggcgagagaganagtgtccgctgcncacgaatcgtgnacagtattctnanggnnaagacncangcagaacatagttgngngacaggnncntnaagaatggagnatnagtngnngtnngannnncagaagnntagcancaaagcngaagagtnancnnantnagggcaaggangannntgntaanagagcgntnngnatngtagtaganancncgtnggagcngtcnggnatannagtntagnaagnngnngtnanannngaagngancnnaggnaggangggngaaagnnagncc

SEQ ID NO: 24242 - DNA, 295 bp, Glycine max
  unsure (1)..(295): unsure at all n locations
  Clone ID: PAT_MRT3847_121891C.1
cggcgacagccattcggagggtctagcatctctcatcatctcggtncttttatcgtttctggctcgttcgtggggtatcggtttgtgtcgattctcgttctgtagggatttgtcatgcctatacgatcgccaattacactcttctttgatcattcagtgatttcttctcttagcacttcctatatcgatttcctcgttaggttttgccttggagaccttaatctcgtaaaaccagcggttcaattcagtgttccctagaatctagggtgtcgcttcgaaaatgcctccgaagacg

SEQ ID NO: 24243 - DNA, 789 bp, Glycine max
  Clone ID: PAT_MRT3847_121892C.1
tacggctgcgagaagacgacagaaggggacaacaacacattccaatcacaaagccagccattgcaacatttgataattcttttgaagtcccagaaaatgcaagcaacctttctatgctcccatatgtttctatcataccctcttccagtcaaattgttgcagcgtagttcaccacacaagttgttcagtgatggcaccaccactcgtaggagtttaatctatgcatcaaaaagagacccttttgggcaccattatgatggaaatttggtggatgagaacatgatccttcttagaatgcgaattcgtgagattgagatggtggaaatgaagggtaaagctacttcggattggagcgtatgggagaagaagtattttgctgagaattatggttcggatgtatgtgaagcagttggattgttgcaaagagtgttaatgaacaccagaccttcttttgcattgggtatgctagctcttgtcatgctaagcatgtccatgtcaacgttgcaagttgggtttcatttaatagaatttgccaagggaatcatatgatatatatgatctgaaaggccttttgcatgcattaatctaagatccattcgaaacgatcaagcacaaattggaaaattcgcattgacagcacaacttccggtcaaagctggggccatggattgcggtcacaaatattgtttatatttttcttattttgttgaaaaaatgttgttcatacttatcatgtgtaaaaataacaaaattctttatgtagtaaaaaaaatttaaatagtattcttt

SEQ ID NO: 24244 - DNA, 253 bp, Glycine max
  Clone ID: PAT_MRT3847_121893C.1
gaccggattccttacgcgcgcgcactcagaaacacacactgaactaagggacatcaggagagagatgggtgagcggagcttcatcatgagtaagcctcgtggcgtccagagaggccttagtggcgagattaggagcagaggtgagaagaggggtggcgacttgagaggtttgaaacttgtgagtgtggaccgtcggtgtgcggaggatcagggtgcggatttgtctgccaagcctgtctttacgggtttggtg

SEQ ID NO: 24245 - DNA, 775 bp, Glycine max
  Clone ID: PAT_MRT3847_121894C.1
aattcggctcgaatcggaaattggaatgggaaattagaggaaataggttcgcaattggagtaacaaaagtggattccttgtggagggcaaaacaaaatggaggaggaacagagggttgcacaagtggaattggcgaagcagaggtgcaagtgcgtcattgatgccattaacagtttaccttgttccaccaacatcactgtctcgtgcaggcgaaccctcctcaagttggcacgtgccgagctcgctttcctctctcgcccctcttcttcttccgtgcccctcagtgccaacatcgggcacctcgaaacagttgtacatattctccagcaacccttcgtaactggagtttctggagtttgtgacccaatccctctctcaccttcagttggcagtgaggcaagggtccgttctgctcttaataacagaattgttgattctgccttcacccacaacacaagggctgtcagtattatagaatctgacagatacctgaaaaacagttggtgcattcaatatcagggacgagagtgtagcaattgacgctttcaagcacagccttcttgggggtgctgcgtgttggccttgcagtgtctgcagtgatggatgatggttctgcgccggcactaccctatgctgatcacgaggcccgggaggcaatcgtggatatgcttggttcggattgtgtacaagggtccttgtattagatgatgtttctctctttctgattagtatttattaaagtattatactccaatgctagatggaaatattaaat

SEQ ID NO: 24246 - DNA, 321 bp, Glycine max
  Clone ID: PAT_MRT3847_121895C.1
cttccgccaacccttcccccaacccttccgacaaattttacttacctttacttactatgcctaccacgaaactcttgcccaccagttgggcccttcttctcctttctgacttaacattcactcatgcctattgcctaccacccactccatctgcaaagcccacaccaccaactccaataccaacaccacccacaccaaagcccacaccacccactccaaagcctacaccaccaactcctaagcccacaccacccacaccaaattccacaccacctactataaagcctagttggcctcctacttctactacttcaccaccat

SEQ ID NO: 24247 - DNA, 373 bp, Glycine max
  Clone ID: PAT_MRT3847_121896C.1
gtgaaatgaaaaaaaaaaaaaaaattctcccttagctgcttttcttcctctgagaaaattctcagcaactctaaaaagggaaaacaacaccattacaacccatcaatcaaaaccccatttttcttcttgaagccaaacaaaatgaaagaaaactggagaggggcaacatcattacatcccatcaacccaaaatcacatcttctctgggaagccaaccataagccagaaaaaagaaaaagggtaggaaagtgggggaagaaaatcatgaagaaaccaaatccccttagttgatgttgttgttttcagcaccttgtaaggcaattaagttgttgatgatcacgaagttgacttttttcttgggatcatttgggca

SEQ ID NO: 24248 - DNA, 193 bp, Glycine max
  unsure (1)..(193): unsure at all n locations
  Clone ID: PAT_MRT3847_121897C.1
acgatccagctcgagncgctcgagccgggacgatcgggtcgcggcagaagacggagaatcgcgcggcacgatttgggtgacgggtgcacgtgtttgggaacggagacgtttacgaaggggagtttcaccgagggaagtgttcggggagtggggtgtattattacagcaggagcgggatgtacgagggtgattg

SEQ ID NO: 24249 - DNA, 187 bp, Glycine max
  Clone ID: PAT_MRT3847_121898C.1
taactgtagggcgaagcagtcttttggcatattccttaaacagaattattatattatctgctgtctttgcaaatggctatatgaaaaacataccattcttctctgtatagtcagggccatcctcgacagtagacttctgcttctcaagaagaatagctatattaccgacctaggacattattatatt

SEQ ID NO: 24250 - DNA, 1330 bp, Glycine max
  Clone ID: PAT_MRT3847_121899C.1
ccaaaccaaaaaaacctccaacgacattacagcgttcaatctcaaaccttcaaacgacggtcacacacaacacaatccatgccattctgaaacgcttcttcttttgcttgaacgaccgtcgtttcgttccgaaatggggactctaacgagttgcagtttcatgcctctgaactcggagtttcgccgcgccttcagggagaggattcagtgccacaagctcacgcgcttgaggggcacctcctgcttcttctcacgcgcgcgagtacccaaatggggcaagtcgaagctccccaatttcgatagccttaggagttttgctactaagaacgacaacagcgacggcgacaaggacaacagcaaccacgttggagccgccggagaggaaagtggcggcgacgattctaaatcaaatgttacgacgacgatggccgaagaagagagagggttcacttcggagaaatcgacgcctccttccacttctcacaggtcgtctttgtcgtcgcttggaccagcatacaacacttttcaagttgattctttcaaacttattgagctccttgggcctgagaaggttgatcctgctgatgtaaagctgatcaaggataagctttttgggtattcgaccttctgggtgacgaaagaggagccttttggagactgcctgttacgcattctttacattgtgggttttatggcaagggtgccatggttttgccaaactccatttacgctagtttaagtcacgggtgatgagtacaaccctcagcaaggtaatggtgatatctgccaatgttgacaatcagaaacaagtatgaatggtgtgctaggacttgtcttgatcccttgttttattgtatttgtatttctcttacatctagtctgataataggtggcatgttttatttaggacaaaatttagatgcagttgcttaggtgcttttggtgctgtgctctaattagaaatgaagtttctcctttgtaatttgcaaaataaaggtttgtattaatacttatatcagcatagtttaaaactccaattataattggagaacaccaccaaaaacacctgaaaaactgcatctagatttttttcctgatatttattgtagagggaatgtgctgcagactcctttatgcctcgtagagtgatgcttgtatactttcattagtcaccggactagttggtgtaggatcttatacacccttggatatgtgcccatgtagcatcatttcatgtgcaattttagaaacactaaattgtttcgccatttgtagaatgaccttaaaaatacttgaaaagcatgattcgaatgaggatacggcatttttc

SEQ ID NO: 24251 - DNA, 128 bp, Glycine max
  Clone ID: PAT_MRT3847_12189C.1
ctctctaggttgtgtgcgtaaccttatgaaggtgtacgctgctattgtggtgcgcgctcacaatgtttctaagatggagccaatcattttctgcaatctgggcgcttcgctcgcagactcattttgaa

SEQ ID NO: 24252 - DNA, 674 bp, Glycine max
  unsure (1)..(674): unsure at all n locations
  Clone ID: PAT_MRT3847_1218C.1
gaaatgcaaaggagctgaaagcaagatatggaggaacttacgtgttcacaatgncaacatcttcagaccatgaaaaagatgtggagaacatggtgcagaaactccccccaaatgccaacaagatataccatctctctggtactcagaagtttgagttgccaaaagaggatgttagaatagcagatgtattccaagctgttgatgctgccaagagaaacttcaccgtttctgcatggggtctagttgacaccacattggaagatgtcttcattaaggttgcgcgtgaggctcaggcatttgacaccttgtcataactgtcatacaaaataaattctgctcaaccaaatcagtaaataaataaactgctactctatgctaaccgtgtagcatagagtagctagtagtcaggataagtagttcggtctagtgatattctatttacccattatcctatagccccttcctaattgtgagattagtataatcgattggtctttacaaatgcaagcgtttaagtgattttcctgctgaggaattgctttgctgataacatcaagcctgaatattgtatggctgcggatgaacaattgattattttgttaaaagaatggttttacactgtgcgctatactaaacacatgtgaaatctatattctattactttttttagagaa

SEQ ID NO: 24253 - DNA, 164 bp, Glycine max
  unsure (1)..(164): unsure at all n locations
  Clone ID: PAT_MRT3847_121900C.1
ctaagttgaanntccgttcgaaccccggggaaatttaatttcccgggaacccgggtaacctggccaggccgtaacccaggcttttcccctcatacgtgaagtncgtattaagacgctttgggcgtaaatncatgngtncataggctgttttccctgttgtgaaa

SEQ ID NO: 24254 - DNA, 185 bp, Glycine max
  Clone ID: PAT_MRT3847_121901C.1
ggctgcccaagtcacacaaggagcaaccaaagcagtcctacaagccggtggctgctgctccggcaacttcacggacaacaagttcagtttccgggcagattggggcaaccttggaattcggggtgagctttgggttcggagaagtcttcatggatgtgtatgtggggacacccccaaaggatttt

SEQ ID NO: 24255 - DNA, 272 bp, Glycine max
  unsure (1)..(272): unsure at all n locations
  Clone ID: PAT_MRT3847_121902C.1
tcctctttganttgnccacgggcgccagtttttttctgccgttggctggctgttgggtcagttngttacccagcgagcgggggcgggctntgagtgtatctttcgtgttggacttctgcacagngaaacaatggtcccgaggggtcntgattacgcaccgttgtacggtctcgaacttctcggggtcggccaggtgcttcagtggggcgtgctgaatcatggtgagtctangcgctggattgtcggtggataccctgtttttggggtagcgg

SEQ ID NO: 24256 - DNA, 117 bp, Glycine max
  Clone ID: PAT_MRT3847_121903C.1
aagctctgaactcggatttagcttttagctcttaacactgaaccttgtattaatttatcaaatctgtgttctggcattggggcaatatgactgtcagataactcctccatacgatga

SEQ ID NO: 24257 - DNA, 195 bp, Glycine max
  unsure (1)..(195): unsure at all n locations
  Clone ID: PAT_MRT3847_121904C.1
gaaaaaaccataaaaaaaacctaaatagagtacggtttttttttttaatacaactactactcccactnaatgctttgcttaaattcgaagaatgcattcttaccttcaaaantcttcaatttttcatcctctacttattcaaatacttaattactgttaatccatctattgacctaaataatatttttccatacc

SEQ ID NO: 24258 - DNA, 297 bp, Glycine max
  Clone ID: PAT_MRT3847_121905C.1
cgatctagtagccagaagaccacacaacggctggagggacctattatcccattactgacaacaagacacctcacggcgcagcgagaccgctgctcagtgcaaagtgccctgcatatatcttgctgacagatgaggagctcttcttcctgagcaagctgaagagtttctggacagagcgaacttcgttagaatattctacattcaggctgtaatgtgtgctcacgggattgctaacattgcatcgttgatgggctcttgcactgtgggtggtgcttatattccagactatggccgcca

SEQ ID NO: 24259 - DNA, 465 bp, Glycine max
  Clone ID: PAT_MRT3847_121906C.1
acggctgcgagaagacgacagaaggggagaaaaatcaacacaacactgaactactcccaagagaccattctacagcctctattctcagtcagttcctcatgctccgcttactttctctctcttcaacttctatttcttttcaaacactgaaatcgtgtttctcgtttcgccatactcatttccttcaaacccaaaccctaaccatttctcccccgccacttctatgacccttcctccgaagcttcgagggtattgcacctggtgattttatggagttttttcttcggcatcttatgtatggcgttcctgtggttataggcgaaaactggggttgcaggacttttggttaaatattaatttagagtgtttagtttgggatccacttggtaagctgcaatcttacaggtgaattatgtctcagcagcaaaaccaaaacctacctgcggtttcgcaatctctgctaca

SEQ ID NO: 24260 - DNA, 780 bp, Glycine max
  Clone ID: PAT_MRT3847_121907C.1
ctgaaatcgtgtttctcgtttcgccatactcatttccttcaaacccaaaccctaaccatttctcccccgccacttctatgacccttcctccgaagcttcgaggttttagtgactctgtcgtttgtttccttcaaaaactcactataaagttttatcttttgattctttttccttctattctgttgataaattgagcatcttttgcgtacccacatgcagattttgtggctgtgaatctctgattttgtttttgtgtgtcctagggtattgcacctggtgattttatggagttttttcttcggcatcttatgtatggcgttcctgtggttataggcgaaaactggggttgcaggacttttggttaaatattaatttagagtgtttagtttgggatccacttggtaagctgcaatcttacaggtgaattatgtctcagcagcaaaaccaaaacctacctgcggtttcgcaatctctgctacaacaaacggtttctggagctgatgttaaacccttctcaataaggtactaatgtggttgaaaaagttaccataaacatacctttgcatttcaatttatgaatgaggttttacttttttttccctttactattatgacattattgcatgttctatttttagattgatctcttgacttgcactatctttaccttgtaaggcgccaaccacatgttgattgcaggccacttataatctttgctacccagcttaagcttatgattattctttgttcaacaactctttttcttatttgattttacct

SEQ ID NO: 24261 - DNA, 487 bp, Glycine max
  unsure (1)..(487): unsure at all n locations
  Clone ID: PAT_MRT3847_121908C.1
ggtactagattcagttaaggttactcaggcattgggaataaaggcacctattcacgtaagtatgaagttaggtgattcaagtaatgtgtataataaaattgttaatgctgcagaacaccctcatttgagcattccagaaactgagactgcacggagaaagaagcaacacaaccagcttcttcatcactctcttatttttgccttagttggggctgctatggcggttgccggtttaacagcttgtcgtgtgcgtgcagtgaagaagaatactgctgcttgacaatcaaacaaccgttatacaatttgatgtatagtaattaataatcacattcattgttgttgtaaggatgctttaacagggcttctttaatataacttatatctatttttttggttttcaattgggttttcactgtggacactctaaacacatcaaaccatttcaagccctgtaattnttttgttttgatggaagtcatatttatgg

SEQ ID NO: 24262 - DNA, 709 bp, Glycine max
  unsure (1)..(709): unsure at all n locations
  Clone ID: PAT_MRT3847_121909C.1
tcttttacgaatttagataactaatttaaaaaaaaaattgcttcagcgagaaacattggatgctagttttaaaaaagattacgtaggttgatatattttcaaaggaaacagagagatggaagaagaagagagtgaaaaatccccacaattggtgcgagtccttgaagctctgaaagaagccacccacgacatccaacgacaccactcctcggattccccagccataaaggcactcctggaactccactccattctctcctcctcggacccctacctctccgctctctccgaccacctcatccgcctcaaaaccctcgtccactctctcaaccactccaatggccttctatccttcctcactcgccccctctccactctctccctctcacgcctcgcctcccaaatcgagtccgaaatccaatcctggatcgaccgcgaaactctccacaccctttgctcttctctacgagaccctaacaataaccacgaatttgtctccttgttgactcagtccatttaccgtgtctcgcanggctttaatcgcgagttgcaggacctggttctcaaactaaaggtcttctcatcgctggagtcgggtctgttccaccattagtgtttcgatccccgttcgggaaccagccggtctggctgtctccgcttaatccggtcaataaagaacgtgtcgtgggccaggttttgatggggcccc

SEQ ID NO: 24263 - DNA, 541 bp, Glycine max
  Clone ID: PAT_MRT3847_12190C.1
cccacgcgtccgcgagtgatatgcaagttaaaagggtatcatcatctatgagtgctgtgaatggaactaaagattttgttgctatgaatagaagtctaagtggtcgatcaaggataaggtcacttaccaaagcggatggttccaaatttgacctagagaaaaaaccttacaatcgacaacagagttccttatctcacgtaaggacattagagagaaaaagaaggattcctaatgtcacacaactagaaggtacaggttctgtttattcagttggtacaaaacagagaaatctccattctggtggaatgggtggcaaaagaagggacttcaatgcttcctccctgaacaattctattgtaaaaaataaacaagttggtcaaggagaaagagttattaaggttaatgacaataagatcaatgtagtgtcatttaatccccccttgaagcaaaagataggaatccatggcaagagggaagagacaagcagtgataatgagagtatgagtatttccgaaggccttcgcctctgagagttgatgct

SEQ ID NO: 24264 - DNA, 333 bp, Glycine max
  Clone ID: PAT_MRT3847_121910C.1
tttttttttttttttttttttttttttagtggatttttctatttttttaatttcataatttcttattacttttacaaataacaatttttttttttaccctttttttttacaaaaaaaaaaacagccgtcaaaaaattaaatacccccttgttatataccaaaacatccggttatattaaaaaaaaaaaaattttttttaacccccccatgacaaaaattttttttagataatcataaccctcccacactttaattccttgtaactagaaaaaagtccttgaaaaaaaacttttcaagggtttttttaacacccaacggcttaggggccctcct

SEQ ID NO: 24265 - DNA, 367 bp, Glycine max
  Clone ID: PAT_MRT3847_121911C.1
ggtacatgataaactaaccttatctatcataaacactactactttacccttaacttttattatacatggcttcgctctattggagatgggggggggccaattcaaattatattcaaaaacaacctaatctctacatcataagtcatagaacacatagactcaatccaaatgttacattctcaaccaactacaaaacctttatcagattttcattcatactattactgcccccgtgtaaaagttaatcataactggtttactctaacagatctacttaacaccatatatggttcatattcaaactgcggagaggaacaaattatcatattcactactaaccacagagaaagaataaaaccttcattaa

SEQ ID NO: 24266 - DNA, 343 bp, Glycine max
  Clone ID: PAT_MRT3847_121912C.1
ggacaaggggggggggggtgcataattaacgaggaacagagcagaacataacatagctgaaaagtgtcagaactactggatcactgagacgcaacaagactgaactgcagtgtggaaatcactgcagcagtgaaggactactgaatcagaaagaaagtgagtaggggggggggtgatataagcaaaggagactagggccgaaaaaggaggctgctccagggactacatcactaatgccatatccattgtttcgcttcctgggctaataataaggccaaaagcccccttcctaggaacaatggctccgtggaccaaaggcagaggctgatgagtacctgagatt

SEQ ID NO: 24267 - DNA, 519 bp, Glycine max
  Clone ID: PAT_MRT3847_121913C.1
aattcggctcgaggcatcgccggagtcaaagccggttcccggcccagtcccgtcctgcagcagtctgcctcctccttcaacatgacagatgccgctgtgtccttcgccaaggacttcctggcaggtggagtggccgcagccatctccaagacggcggtagcgcccatcgagcgggtcaagctgctgctgcaggtgcagcatgccagcaagcagatcactgcagataagcaatacaaaggcattatagactgcgtggtccgtattcccaaggagcagggagttctgtccttctggcgcggtaacctggccaatgtcatcagatacttccccacccaggctcttaacttcgccttcaaagataaatacaagcagatcttcctgggtggtgtggacaagagaacccagttttggcgctactttgcagggaatctggcatcgggtggtgccgcatgggccacatccctgtgttttgtgtaccctcttgattttgcccgtacccgtctagcatctgatgtgggt

SEQ ID NO: 24268 - DNA, 153 bp, Glycine max
  Clone ID: PAT_MRT3847_121914C.1
accacgcattcgacatactagtactcatacatgaactgagaaggctaaagagacctgtacgtcgtgctgtacgcctagaccgagccagagcttcgtcttggccctggattactcactgcagaaccaacaccagtcacaactgacaccgtcact

SEQ ID NO: 24269 - DNA, 219 bp, Glycine max
  Clone ID: PAT_MRT3847_121915C.1
cccacgcgtccgcccacgcgtccgcaagaatattgacacagaattgagatttgaaatgctgtaagaaatcattaattgtacaaatttgttgcaagattatttatcattaattgcacaaatttgttggtcctttaaaccagcatatctttcatgattgtattgttgtaattatgtaattattgtatcaattctatttgaatgtgaacacacatttttctg

SEQ ID NO: 24270 - DNA, 462 bp, Glycine max
  Clone ID: PAT_MRT3847_121916C.1
ccactactataggggaagctgctccgcctggtgccgccgcgccggaattgccgggaccgaccacgccgtttatgcaaacgggagatccaaatcttggttggagggaaaagggcatgcttggcacacactacgccgggaccaagaacatgggtatggaaagcgacccgccttatcagaagaataagcgccccatcctgtacttacactaaagcatgtcaacataggcaaagcatggcgatgtggcactctgcaccggtctctcaggtttattatacaccgatcaccgcgtgaacagctactacagcggcttcacacaggtcccgtaccatatgatcattctcaccaaactactactcagccatactgaatcctccactgctggagcaatatcaactatccgggatgcggacacatggtagtcgagtgacagagatacgggacatgacattgggctacaacgct

SEQ ID NO: 24271 - DNA, 268 bp, Glycine max
  Clone ID: PAT_MRT3847_121917C.1
cgaccgcgtactttactttctggacgcagtttctgcggttcaaacgagcgttttgagtaagcgattcatttacctgtggacttccctcccagtcctcaagttccacgaccctctccttttccactctttcgtcgaccacttcctctccctcagagacgcttccaccaacgtccacgccctcaacttcacgtgccacgatgaactcgatgatgatgggcatgttgtagattccatcattgactatgttaccctcacacccaccatctcc

SEQ ID NO: 24272 - DNA, 262 bp, Glycine max
  Clone ID: PAT_MRT3847_121918C.1
aaaaatatcatggcacatttattgatgggaaaagacgtgcaagtcatgttgatacgggagcaaagcagacagcaaaatagcgaacaatatggatttcatttttgtaaaaatatatatgtagcagataaaagacctgtagtcacagacacctggctggcagctcagtggggctttagtattttctcccactgcttttgtctataaatcatgtcatcgagtcctttctcgagccgaattccgagcttacgtacgcgtgcatgcg

SEQ ID NO: 24273 - DNA, 322 bp, Glycine max
  Clone ID: PAT_MRT3847_121919C.1
gaaattacctctaggttgttaggaaggaaaggaggttattctgggacgattgttcttctcacaaactcagccatcggatacattctacaggaacgttcttcatgactatttggtacaaatgatacctcaacataacacctgtgtgtagacactctctgtctgatgtggtgtgctgaatctgcgagactgttttgtgccaactaacatggggacgtgccaggatacgcgaatgttgctcatttatgaagaacggacatctgatggtttgttatacacacttctcgttgtcaatgatttgacattttcggttgttaagtttttg

SEQ ID NO: 24274 - DNA, 467 bp, Glycine max
  Clone ID: PAT_MRT3847_12191C.1
gtgttctgttgtttttattacttttttttggtgcggcctggaagaggacgacatattgtcatgttaacagaggtgactaacaagatgcccacgaggaggttggatctgatttggtagtgcatctatgccctggttctgatagccggtcactttttttgtttaagcattcactatcctataccctggaagggcagaatccactgtaacttgtgaaaagaatgctggatctcgttcatgccgaggtttacacctttttggaaaatgaatatgttcacgatgagaaacccctgaaatattgcccaccaaaagactctagaaaactggtcttaacctccccgtgcctattaagtagtacccgacatatagctattcccatcagtatcctttataccgaattctgtttttattttcggggaagagagattacactccacctttttacacaatgacatggtgttgaatatgct

SEQ ID NO: 24275 - DNA, 321 bp, Glycine max
  Clone ID: PAT_MRT3847_121920C.1
aagaaggggaaatttaaacctaatttgttgccaggaacaaaataaagaattcgggggccattaacgttaagggacaaacatattttacccacccctcccaaacctattgggccattatggctaaaggggggtaagcagactacgtactacaagtgcgacgaaaagataacttggaattgatcaatcgcctcaataaactcgccatttaaatcctactcttacaatctcaaccaaaagttgtaaaacaatctatatctgtggatatatccacagctttagatgaaatttgggaatgacaaaatggaattttgctttcgatca

SEQ ID NO: 24276 - DNA, 420 bp, Glycine max
  Clone ID: PAT_MRT3847_121921C.1
gtgggatgacaccaagaatttttgagcacttatttactagaattcaaaaggaaaaagaggctcgaagagatgaaaagataaaatttacatgcaaatgctctttcttggagatatacaatgaacagatccttgatcttttggacccatcatctaacaatctgcagataagagaagacagtaagaaaggagtttatgtggaaaatcttacggaaacagaagttacttatgctcgagaagtcattcaattacttattcagggagctgcgaacagaaaggtagctgccactaacatgaatcgtgctagcagtcgttctcatagtgtatttacttgcatcattgagagtcagtgggagtctcaaggagtgactcactttcggtatgctcgacttaatcttgttgatttggctggatctgagagac

SEQ ID NO: 24277 - DNA, 230 bp, Glycine max
  Clone ID: PAT_MRT3847_121922C.1
aagctatgacgtcatgcacctactagctgaattcggtcgaggtcacaaggtccccactggtcctatgttgaaagacctgtctttttactgagcttttatattgccaactggggactttttggcagattctactggggcttcagaattaggatgggatggggtgggctgggtatctgctctacgttatgcatatatccctgttactcaaatcatcctttttttaagggagg

SEQ ID NO: 24278 - DNA, 518 bp, Glycine max
  Clone ID: PAT_MRT3847_121923C.1
ccacgcgtccgcgatggtgagctagataccgattacgaccaacagatcaccccggttacttgacaaagatgtttgcaccagcctgcgtttacagacactggcagcatcacaatgtatccgttcacgactagaatacccttctctttagcgacatgccaggcactatttttggacacaaaaaccctgaagagatcccatgggggtcaactggatctgacatcattgctgaaaccaccgtagttgtcaccgataatgacaaggtcgacgcacattctaatggtggagcactataaggatattatttactgcccccagtaaagatgcccccatgctctgatgttgctgtcatacgatcacgagtacaatccaacatcttgatattatttacaatgctacctgcacaaccaactgccttgccccacttgccaaggatatcagagactaactttgaattactcacggcttgatgaccactgttacttccattagcgatacccacatgactgactatggaccat

SEQ ID NO: 24279 - DNA, 739 bp, Glycine max
  Clone ID: PAT_MRT3847_121924C.1
gtttgatgctaaaataaaattccgattccgccgctaacaaaccctaataaagcttaattagcttggactgttaacttgactcagcgcaccacaaccccagtgtggttcccggaaccggaaggtactggcttggctaggttagttgcagcagcaacaccacacaacagccaaggtagggccagtttgaatatttgctcaacacaagcgtttactagggtttttttccgctgaaaagtacgtgtcccattcttgtcaacaaacgtggcgcgcttcttaacataagcacttgcaatggcggattcagagcgaatccaaaattcgtggatggcttcggatcaaactgcaattgaaatgagcggcgagggcacaggttccagggaatgctcttctctccctccgccgccgcaaaaaccattcaattctgatcaattgggaatcggagaacgagctttctccgccgccggcgccgccttcctctccgccatcattgtcaatcccctcgacgttgccaagacaaggttgcaagcacaagcggcaggggtcgcatattctcatccactcagtaatatgaccagtagaatggcttgttttgggccaaatatgatatttgctgatttaaaatgttctccatcatgccaccgggctggattccagggcacagtgtccatttgtcctcccgagtgttttcgctacaaaggaacactagatgttatctacaaaattataaaacaggagggaa

SEQ ID NO: 24280 - DNA, 520 bp, Glycine max
  Clone ID: PAT_MRT3847_121925C.1
cttagtatttcccacctttatatttgttgggattcattagcatttgaagacttcatctatgcattagatccccagatcgaagtcagatcaaaggcaaattttgttactgaaactgctttcataagagatgaacttcttcatggcaaccaagtttatctgaattttaatctttcaagaacctttctttacatccacatacaaccacttcaatgagaacatccaaatttccatgtaggggattggattatcgtctattccttctgatttttgctgtatgtttggtgttgtatggaacagtttcaagattgaatgctccaaatgtttcttatgccacaatatctaagttacggcacttcaatcctaagcatgttatatcaaaaggaaaagggtaccctcctgtgcttgcatattggatacttggcagcaaaggagagagtaagaagatgttgaggctgctgaaggctttataccatgcaagaaatcagtacctacttcagcttgatgatcggtcctctgagtc

SEQ ID NO: 24281 - DNA, 755 bp, Glycine max
  Clone ID: PAT_MRT3847_121926C.1
ccacgcgtccggtggcctgctgtggttgtagtatttactatttagttggcaagacttagggttaggctggttttgttaatactacaacatcaacacttctacagattcttttcttttcttttctttctcttcttggtttggttgctggaatactatggaatctaatccaacaaccatggacgcaaaacgcgaactcgaagtggaagactgggaactgctccacccaaacgacgacgattcaatcgtgttcggtgggcccccactcgactctatcctccccgatcacttctcccttaatcccaattccagttgcagttccaattccaattccaattcctcctccgaggtcgatcgcaacttcgacgattcctatgttgccaatcagatattcccaaattccaccctcgcaccctggaacggggattccgattccgacaccaccgccaccaacgcccccgtggtggcgatggccgaggccgaggccgaggctgtggtggaacaagaagaggaacagaaaaaaatggaagaagtggaagagaaagatgatgatgaggaggatgagggggaggaggaggaggaggaggaggaagaggagaaggagaagagattggtgtggtggaaggttccttttgaggtgttgaggtattgggtgaatgctttgcctctgcctctccctggttggtttctcactttccttgccgccggtgcttttcctggactcttcttcctggggaggaaggttgcacagaaagagg

SEQ ID NO: 24282 - DNA, 182 bp, Glycine max
  Clone ID: PAT_MRT3847_121927C.1
ccggaagagaaaaaactcgagtcattgccttaaaaaaaaaaaaaatccaacgttgttctcgtcaataaaaaaggggcaactccctagcaccaataaaaaatttttaaatcactaaacccccaagccacattgttctcggcaataaaacacatccccgactggaacattgttaatttcaagcg

SEQ ID NO: 24283 - DNA, 573 bp, Glycine max
  Clone ID: PAT_MRT3847_121928C.1
gttcatgctaaagaggacacatatatgtatttttctactacttttcacttaactatgggttatttagtggcaaatttagatgaagatataaagtgtccaccaaatgtggattcatcatgtgctgactgccaaggttaaggatgttttgttttgtttccatgattgaattctgttgactgttagactttcacattttttaataaaacacttggtaggccataagcaagtattaaacaagaaaatagaaggataacgtggcatatatgctaaagactaaagagagttggcttaattggtatgatcaaccatcattgacgaaaaaggtcttgggttcaaattttctgctagtggtctttcattggtatgtaatgttgtcaacctttggagctgtgctggacatggtaacagacagaattagcactgcttgtctacttgtagtcctttcccaactgtacaagcctagccttatcttcttgtcattgcttgctttagatattgccagccactggctgcaaatgtacagcactttcttgacgggaaagactagtcataaagatgtaaaagacagcagca

SEQ ID NO: 24284 - DNA, 355 bp, Glycine max
  Clone ID: PAT_MRT3847_121929C.1
ttttgtttcgtgggctttggaggaatcaggagggtgggtggagaggaccactgttgatgacatggacatagcagtttgagctcacttgattggatggaatgctcatttatcctttaatgcatgtaaagatctatgtgagttaccagagctttatgcaagcttataagaaacaacatcatcggtggcactatggcacaatgcagcttatcaggctatgtcttttctgctatactaactcccaagatttcagtatggcagaaggcaaaattaatataccttcgttctcccgtcgaggaaacatatctttccttactacttctttaacttggtttgaataatacctacccttgaaaat

SEQ ID NO: 24285 - DNA, 3846 bp, Glycine max
  Clone ID: PAT_MRT3847_12192C.1
ttcctactcgtccgattgtgagaataatagccccgccgatggtgactcatctttgctgaatggagctttggataatgtttctccaaaaatttcagttccatgttctaacactcagatttgtaatgctaagaaagatcaaaccttcagctctgtggatgttgaagctgctttacctccatctaaacgcctccatcgtgctttagaagccatgtcagcccacgcgtccggtcaagcccatttggaagcatcatcctccatgatctcatcaagtggcatgtgctgtatatctgatgtcaagagatgtccgagtatggctattactaatcaacaaggtaattgcttagaactgcaaaagtcggatacttacaacaatgattcttctcatatcaaagtgtatggtttctcaatcagttcaaatccaatgatttttacagagaataaatcacctatccaagtgggtaagcaattgaccatgatacaacatgaaagtgacaaggatgttctcccaggtgctacagatcaagttggtgaagagcttagtgatcatacgatttgtcagacagctaaagtagatttaaaaattcagtcaaatggacaaatttcttctaatcttggttcaaaatgttgttatgttggaagcattcaagattcaccagatccatcattaccagcaaatagtgaagacaacattagaactgtgaatgattccaatacagcatctgatgcatcagaacataatggaataagccttgaccctgtaatttgtgtggacaaaaatgatgccttttcacctcataatgtcgatgtgctccacgcgtccggttgcttgtgaggatacgatgaagcatgcagttggtgacagcagcaaacctaatgacacgcatgaggtcatcaaagaggtaaaatttaaaggacaagaggaggatatgaattctgtttcaatatcaaatgattattccgatgaaaagggtaatttgggcattctgtcaagcccatccttgactgatgtgagagtttgcctcccactaggttcacctccaattacatcagtttgcaatatttctacatctgacagtagtaatatccttcaaaatggaagttgtagcccctgatgtacaccaaaagaacactttatctggtcctactgatggatggaaagatgggattgtggaaaatgaacaatcaagatctgagggcaagtcaactgaagcaggagatgctgcattgttgtactttgaagcaacgcttcgaacattgaaaaggacaaaggaaagtattggtcgagcaacacgcatagctattgactgtgcaaagtttggcattgcaactaaggtgatggaaattgttgtccacaatctggaaattgagtcaagcctgcatcggagggtggatctgattttttcttgttgactctattgctcaatgttctcgagggttgaaaggagacattggtggagtatatccatcaactattaaagcagtcctgccacgcctcttgtctgctgctgctcctcccggaaatgctgcaaaagaaaatcgtaggcagtgtcttaaggtattaaggctgtggttggagagaaaaatccttcctgaacccattattcagcatcatatgcaggacgctacaatcatatagccggccaggttctgcaggtgtccacgcacgccgttcttcaagaagagacaggccttttgatgaccctgttagagacatggagggtatgcttgatgagtatggaagcaactcaagttttcaactacctggagtttgcatgccccgaatgcttgaggaggatggcgggagtgattctgggggaggcccgcttgttgctctcagccctggtcttgattctgaaaaggtgaaagtgcatcattcatcccttacaagcgagaatccttggcaggtgttcggaggagtttatgcagaacttgaaatggaagttgtggctcttgtagttgatggtgaattgaatttgatttgtaagattgatagaggaaatgctagtgagtttgttgaaaagctttctctttcttttggcgccccttgtccacaggatttgccaccgtcttctccaacttctccatcatcccctcttacaccaccaccagctcctcctcctccatctctacctctacctccacccccgcctcctacattgcacttcaagtcagctacctctgatcaatatcatgttgcagttgattcaaaaggttttgaagattcactgactgtggaagccaatgtactccatcctatgtccgagcccttagctgaaccgagagatagtcgatctatccgttaagaggtgcggagggcatgcttgttgatgaatatggtagcaactcaacttttcagctgcatggattctgcatgccccaaatgcttaaagatgaaaatgaatttcaagagtgtgaatctgacgactatgcataataaaggttactcgataccaccacctcaccatgttccatcctatcatttttcttttgaaaatggagaacaacaaatgaagatgttaatggtgaacttgaaatggcaagatgatgctccctccaatgaagttgaaatgaattcaatttgagagtatgataaagaaagtcatgagagatcaaggaagacatatgattaccaagagagatggaatgttcctcctccttgttctggtcctcggtatagtgaccgaggtgtgcctgctccttatggttgtcatcctagtgaatcagttggttttccaggtcatggatggagatttcctcccccatcaatgaattacagggactccttgccttttagaccccactttgaagatgcaattccagtagcaaaccgaggcccaggcttttggcagccaagatgacaaaaattaccaataaatgaaggctggcaattggcatacttctgtctatccgcaagcctgtctggttatccttcaccaatcagtatctttgttacttataattcactcatggaatgttagatacaacccactttttgtcgtgggccctgcctttgtttagaagaggtggttgttgtgccctctttctgtacatgcaagaaagaatctttagaggtccgcagaatctgcacaggatctggtcataatatgctagaatttgtatatatacatatatattgcagcctcttctgcagaatgcagagcaggaagagtcattgtagagtcgttggagagctgtaacttatcttttggctgtcaacgtatcaaattctttttgttgcagattatataatttatttcatggccccttatggttgtcatccatgtgaatcaagtagaattccagatcatgggtggagatttcctcctcagtctatgaatcagaggaactcaatgccatttagaccaccatttgaagatgcaattccagtttcaaacagaggtccgagcttttggcagcctaggtgatcagaaaatacccagaaaccatggctggtatagcccactttttgggctgggctctggccttgtttaggaaaatgtgatttatggtccttcattctgtacatgcaagaatctttggagggggttcggcggaatctgcacaggacatgtgaatgatctgctaggttttgtacatatgtattttagcctcttctgcagaatgcagggcaggaattgtaattgtagagtttttggaaaggggtaacctatttaggttgtcatgtgtcaaaatttttttgctccaaattttataatttatttcatggaagcccttatagaagttagatgaatatatatatatatatatatatacaaattttcaggggatgtttcttgaaattgttctcttgatatatggaaaaacttccctctagcattttcggcc

SEQ ID NO: 24286 - DNA, 484 bp, Glycine max
  Clone ID: PAT_MRT3847_121930C.1
ctcggaattgagggacgagcaggatgccagccctcacatattcttgttttggtaaacccaaaaccgactgtggctgggtttcaactttccacagaggtgtagcttgacctacaaactagttttttttttttggtccttcatgcacacaaaaggagagcactgatgatccacaactgaccaccaactctcttggtttcgcgtatcctaattcagaaaacattctggcaggatgccgagcacagtcacaaggcataacatggggtggaaactcggaatggactcattcaatcagagtgcacagaattgcacctgaaggtacaatccaaattcgaacactaggacgcatgcggatgaagaagctgagtcctgaggaatgctagatattttagcccatcatgccacgaatattcataacatatgcatctatgacaaccaagatgactatgctaaggaatatctcactcacaaccctgatgagactctc

SEQ ID NO: 24287 - DNA, 2189 bp, Glycine max
  Clone ID: PAT_MRT3847_121931C.1
caacgatggataatttccttgaacacagcttgtggtcaagatacttgacatctatttactggtccattactaccttaacaactgttggttatggagatttgcatcctgtgaattcaagggagatgatctttgacgtcttttatatgctctttaatctgggtttaacagcatatttgattggtaatatgaccaacttggttgtccatggcacaagtcgaaccagaaaatttagggataccatacaagctgcctcaaattttgcccaaaggaaccaattgccacatcggttgcaagaccaaatgcttgcacacttgtgtttgaagtatagaacagactcagaagggttgcaacagcaagagacacttgattctcttcctaaagccatcagatcgagcatttcacattatcttttttattctctgattgacaaggtctacttgtttcatggggtttcaaatgacttgctctttcaattggtgtcagagatgaaagcagaatattttccacccaaagaagatgttatcttgcaaaacgaagcccccactgacttttatatactggtcactggtgccgtggaactactagttcttaaaaatggggttgaacaggttgttggagaggccaacgcgtccgtacggctcgtgatctttacagaagggggtgagattggtgtgctttgttataagccacagcttttcacagttcgaacgaagcgactaagtcagttgctcaggctaaaccgtactacgttcttgaatattgttcaggccaacgtgggagatggaaccataataatgaataatctccttcagcatttgaaagagatcaacgatccaatcatggagggagttttggtggatattgagaacatgttagctcgtggtaggatggacctaccagtgagtgtgtgctttgcggcagcaagaggagatgacttgttgttgcatcaattactcaaacgaggcatggatccaaatgaatccgacaacaatcgaaggacagctttgcatatagcggcatctcaaggaaaacagaactgtgttttgcttctgttagactatggggcggatcccaacattagaggttgttctacgtgcagatttggaaggtaatgtgccactatgggaggctatagtgggaggacatgaatcaatgagcaagctgttatcagagaatggagcaaatttgcaatgcggggatgtgggccaatttgcatgtactgccgctgaacaaaacagcctcaacttgctgaaggaaataatgcgctacggaggagatatcacgcttccaaacagcagcaacacagggaccacagctttgcacgttgcagtctctgaaggcaacgttgagactgtcaaattccttttggatcacggggcgagtattgacatgccagacaagcatggctggaccccaagagatcttgcagatcagcaggcacatacagaaatcaaagccctttttgattccattggggagcctaaggtccattcttccgtcgctattccggtgaggaatagcaagatcaagtaccttggtaggttcacaagtgagccaaccatgacattgcctcttgatggatcgtttcatggaactgatggctcttggagccagaaccagagccaaaaccagagccggccgaggcgtcggagcaacaactaccataactctctgttcgggatattgtcagcagcacacaatggggaaaagtacctgctttcagctgttgacatgaataacaatgcaaggaatggtatgaagagtagtagtgcagttggtccaactagagttataattagttgtcctgagaagggtgaggttgttgggaagcttgttttactgcctggaagctttcaagagctagttgagattggagccaagaaatttggtttctatcctaataaggttgtatgcaaagatggaggtgaaattgaagatatagagataattagggatggtgaccatcttgtttttcttggtgcaagtggagggtgctagaatccaatcgtgcagctccagcaacaccactaaccaatggcgtgcatatataaaatgcatataaggaacgtctttactgttattgtaattgttttatttttcctgtctcatctgtgttctcattctcaattgtaaatctttagccttcttctcatggttaatgtgaaataatatatttctgcctacgtccc

SEQ ID NO: 24288 - DNA, 411 bp, Glycine max
  Clone ID: PAT_MRT3847_121932C.1
aattaaaaggaaatggtcatttccattgcattatagattcatacccatcggggtgtgcaagctgtaaaacatcagagcgcattaatgacttccctcccaaaggattccatgctgatccaattgtaggaaaaaaggctgtatcctcagcaaatacatgcttatgcactcttcaacttttcaaattattttatccaaaaccccaaaaaaagaggggcctaaaaattattaacccatcccaccgctttttgcctttcccaagccagttaaacaaaagttactgatataactgccaccatcttttgctagttctaccgccatcaatggatttatccatagacccccccaaaagggctattttctaccggttaaccaaaaaaaaaaaaaaagctcttattccttttttgctccaaa

SEQ ID NO: 24289 - DNA, 269 bp, Glycine max
  Clone ID: PAT_MRT3847_121933C.1
cactctctctctctctttctttaactctcttactctctctctctagaatgcctctattctcctctgtcggtcacacagcgatcgaaagatcatagagactagaaagcattcataggcgccaatagcgtgtgtgtgtgtgtgtgagagagagagagagagagagtacacaaagcagagagacaagtctgtgtctttgcactcatccattttttgggggagacagatctgattcctcaccataagtgacatcgctttgccttgcttctcac

SEQ ID NO: 24290 - DNA, 381 bp, Glycine max
  Clone ID: PAT_MRT3847_121934C.1
accatgatattattaccctacataaaactgatcaaaagatattttatttgattggccaaagattaagaataactacgaaaaaattgaagcattaaggaaacaaacaaataaactttcttaattaaatgtggtgaaacgaacaagcaaaagaaattcagcacaaatggttagctgagataaacctgaataaactcaattacatgcaatcaaacagctgtttggatttcacaattggcaaatgtccaaccatgtttaatcatgttctctagttgcaaccttgcagcaaataaaagtagcatatataccattgccaataagccaaagacagtttgataaactcatgcatagtaattatccaaatcatcaccaagcgacaccaag

SEQ ID NO: 24291 - DNA, 371 bp, Glycine max
  Clone ID: PAT_MRT3847_121935C.1
tttttatttataattttttttttttttttttttttttttttttttttttttttttggggtacttgtttttttctaattagaccttggggagccgggggaaaaactggggacccaaggacaggggggaaccagagtgccacagagagccgaacaaaagaccacacaagaaacaagagccaagcgtcaagcgtgaaaaaagaggcgcccaacgagagagcaaagccaaatgaccgggggcagcaaagagaccgaacaccggggggaaagcgggagggacacacgcaccaaagcgcggggaaacgcgggtgggaagcagagagaaaaagggggcaccggggagacagagaaaaccagacagaccggcaacaggg

SEQ ID NO: 24292 - DNA, 210 bp, Glycine max
  unsure (1)..(210): unsure at all n locations
  Clone ID: PAT_MRT3847_121936C.1
gcgcccacacattctaccacacatacnatcacattttctttcttctacacccaaaaaaacaccgcaccccgcaaatttaaaattgtcccggccaaaacaaaaaactttcttcattttcaaaaacaactcataatatctcctaatctctttattcttccgatgccacttctttcattttataaacacttcacaattatattcatcacattc

SEQ ID NO: 24293 - DNA, 459 bp, Glycine max
  Clone ID: PAT_MRT3847_121937C.1
ggataaaaactacatgacaaatagtatatccaaccgcatattacaaaagaaaagcaaacaaacacactatcacattcacaaaagaataaaaaaaaatgcacccccaacacagcacactccacaaaatcacatcattggaagcttgtctaacattcacaaggaacaactctctctctctctaatactgtctcaaatggagctgagtgccaattcactctgttattccgcacaatcaaaattgaccctccccaccaatacttgatccaaacttcacttcaaatgtacccttcttgatcttactcgatttgctgagccagaatcctcggcatagcccccaacactgcctataatgggcatctcatcctttggtgattttcttggcgaagaagaagcggaaaaatgtttgagctcttcaactgtcaatgcacctaaaataggcctattttcatggctcaccac

SEQ ID NO: 24294 - DNA, 458 bp, Glycine max
  Clone ID: PAT_MRT3847_121938C.1
cccacgcgtccgtgagttttggctttcctcaagtaagtactaatggtttattctacatgaaatatgctttcatttaaatttgacaatggttacaggaattgaagcgctttccaactcttcaagctgaaatagcagaagcagctaatgaggggttagagagattccatgatgacggtaagaagacaacgttgcggctggtggaaatggaatcttcctatatcaccgttgatttcttcgggaaactccctcaggaagttgacaagggaaagaattcagcttcctccttgttagatgatcagtatgccaagggacacttccagaggatcggttcaaatgtttcatcttatgttgggatggtgtcacaaacgttgaagaacaccattccaaaggctgtggttcattgccaagtgatggaggctaagcgatctttattagacccgttttatgcacaactgggc

SEQ ID NO: 24295 - DNA, 753 bp, Glycine max
  Clone ID: PAT_MRT3847_121939C.1
aggtggtgcatccaggtcttctctgtgtctgggtccggtgcacatgcacatgcactcgctctcgctcctatagttactgcctctcttcgcaagaaaggatggtgtggcacttccaaatcttctccgtgtctgggtccgatgcccatgcacatgcacttactcacggtcatatagttacttcttctttttccaacacaagtcttgcgttgcaatgccaaaagcctctcttcaaattcagcaactcctcttctctccctccttctatttactataccggggccacaactgaagcagagtcaactccagtttctggagatgataattttgcaaaatgctacgtatgtagtttggaagtcagtgaattgagacataggaactgtgcaaatcttgattgtaatttgctttttctatgctgcggacaatgtgcagaggatctaagaggttgttgttgtttgacgtgcactactgctcctcggcttagacctgttttaaatggaatgcagagatacaaaaaatggcactactatcgggatatggattttcaagggaaaatgaaaatttcagcttgaatgcccttgtcaaccaatggaaaaagctagttcctctccatttttgttgttttccagctgtgcattgatatctatatgatctgtacaaactgtcaatgaatttccatgcatttagctatttacatatggatcatgttaacaacattggttaagaaattaagaaggaaatttttttttttggatt

SEQ ID NO: 24296 - DNA, 883 bp, Glycine max
  Clone ID: PAT_MRT3847_12193C.1
ggctcgaggttatgacaatcatgagagattaagaccaccatatgattaccaagagagatggaatgttcctccttgttctggtcctcggtatcatgacagaggtgtgcctgctccttatggttgtcattctagtgaatcagttagtttttcaggtcatggatggagatttcctcccccgtcaatgaattacagggactccttgcattttagaccacactttgaagatgcaattccagtagcaaaccgaggcccaaacttttggcagccaagatgacagaaattactattaaatgaaggttggcatacttctgagttctgtctatccgtaagcctctttggttatccttcaccaattagtatcattgttacttataattcactcattgaatgttagatacaaatgaataatatgaagatgcaatcagccctaggttcagtaagaaaccgctggctccagacctattccttcaacaagttggtactcatgttttgcattgctaggcccactttttgggctgggccctggccttgtttaggaaaatgtgatttatggtcattcattctgtacatgcaagaatctttggagggggttcggcggaatctgcacaggacatgtgaataatctgctaggttttgtacatatgtattttagcctcttctgcagaatgcagggcaggaattgtaattgtagagttgttgaaaaggggtaacctatttaggttgtcatgtgttaaatttttttgctccaaattttataatttatttcatggaagcccttatagaagttagatgaatatatatatacacacaaattttcaggggatgtttcttgaaattgttctcttgatatatggaaaaacttccctctagcattttctttgtc

SEQ ID NO: 24297 - DNA, 246 bp, Glycine max
  Clone ID: PAT_MRT3847_121940C.1
gggctacgcgctgagtataagcatatcaaacgaagagagcggaacagagaggagaaacaaggaagcagtccaagaggaaaagtagatgcagagaaagcaagaccaatgggagaaacaaaggtggaagctaaaggaagagaaaaagatgtaaccaaagagggtggtgttgaggaacaaggaagatgaagataagaaaatggacaatctagcttgaaagacatttccaggtacagagctgaagctcaa

SEQ ID NO: 24298 - DNA, 242 bp, Glycine max
  Clone ID: PAT_MRT3847_121941C.1
gatagagagaatgtaaaaggaggattgaagggtattagatagaagatgatagtaaaaggatattggtgattttataaatttggatgaatgtagttgaatggttgtgaatagagaatcggaaggaaaagtacgagatttggaatgaggggttatttcttgaatggtagttggctaaattgggatcagtattgtgtgattatagttgatgatgtgagaaatacacgtgcaagtggtgtcttgtg

SEQ ID NO: 24299 - DNA, 251 bp, Glycine max
  Clone ID: PAT_MRT3847_121942C.1
actctcactcgtacggccagagagtgatacaggacagggtgcgttgctgctccttcaccacacctccctgccaacatgggtatctccagagattctatgcacatgaggcgtgccactggtggcaagaagaaagcatggtggaagaagagaacgtattagcttgttcggcagtctgttaacactaagctgtgaagctacaagacagtcatgaggatccgggcccaaaggggcaatgtgaagtggaaggcact

SEQ ID NO: 24300 - DNA, 195 bp, Glycine max
  Clone ID: PAT_MRT3847_121943C.1
aatggggtctctaatggcctctctgactctcacgcttgtattggcatgactctctctaagcgtgcgatctcaaacctcagcggacaagtacgagtatgcatctccgccagcaccggagaagcctgacaactaccactctccaccaccaccagcacacaagtagccatacaaataaccttctcctccatgagctgt

SEQ ID NO: 24301 - DNA, 1830 bp, Glycine max
  Clone ID: PAT_MRT3847_121944C.1
cctcgtgccgagcaaattcttcatcagatggaatcactaacaacatttcaggacaaaccttcttcaatgctgatcttattaatagtgttaacacaaacatgaacttgaccatgaattggccagttgcaagtgaggtaattcaggttcccactcttccatcacttccatggccttctgggttgttaaatccaagtatttctgtattttctttgcttctcaaggcattgcaacttagctgccatcaacgcatagaaacccataaagtaaagaggcctttaaaagctcttattggtgatgtattgagcttactttcccagcaactcattggtacttctcatatatttgtggtgctccctcttcagtttttggtaaactaaacttcttcaattcaagggggtatcaaaatctgctggttggtttcatcaatctgatggaggaaaatctgcctcccggatttaggttccaccctacagatgaagagctcatcacatgttatcttacaaggaaggtttctgattctagcttcacatccaaagctatagcagttgttgatctcaacaagtgtgaaccttgggacctcccaggtaaggcatcaatgggaaagaaagagtggtacttttttagcttaagagatcgaaagtatccaacgggacttcgaacaaaccgagccactgaatcagggtactggaaaaccacagggaaagacaaggaaatttttcgtgctggggttttggttggaatgaagaaaaccctagtcttttataggggtagagctccaaggggcgagaaaagcaattgggtcatgcacgaatatagactagaaaacaagcatcactttggaccttcgaaggacgaatgggtggtttgcagggttttccagaagagcttgcaagtgaaaagaccacagcaaacaccctcctcacaaccagagtccccatgtgacacagcctcaatggtcaatgaatttggtgatgttgagcttcctaatctaataaataacattgcaaattcatcaggtggactcactaacaacatttcaggacaaacctgcttcaatgctgatcttattaatagtgttaacacaaatatgaacttggccatgaattggccagttgcaagtgaggtaattcaggttcccactcttccatcactcccatggccttctgggttgttaaatccaagtatttctgtaaattctttgcttctcaaggcattgcaactcaggagttatcaacaaagagaagcagcaacagatcatttaatagcatcatatgtgcctcaaggagtgtcccatgttggaactgacctaagttcaaatctcactgcctcttcttctaaagttttagaatgtatgccacagcagcaacagctggagcaaccattcaacttggactccatttggtgaatctgtttagaacatgaagctaggcattgtgtaattacatcaacaaccctccagctcccataaataaaatggtaccatttccaaacttaacacaattgctgatgttgtaaacattgctcttcagatattattgtaagtaggtgttaaaataggcagcttttaaattactgttgaaagtcctttgatgtgcaatcattaggttcgttccaagtttcatgttctagtattaagtaaattcaaaggaataatttgtatatcttgcccaatctctttgctttgtatccaacccctcattcagcatgcagttatgcatggatgtaatcatgatgacaagtgatgactatcccagtatatgaaaacaaaggatatgcatggatcatataatatttagatccatgcatgcccgtatccaaatcgatcaaaaa

SEQ ID NO: 24302 - DNA, 423 bp, Glycine max
  Clone ID: PAT_MRT3847_121945C.1
ggcaacctaggcaacgacttgcatattccatcttaactgctctattgtaggctcacttccaatgtttgctgttatccatgctttctaacacaacttttttaacgcactccattatttgggtagaatgacataatcacaaactatgattatacagtatgcttctttattgtgaaggaagtcgaccaataaaatgatttctatgagtagctgcaacttggaaaaccctcaacactttctacatcatttgttaactatctttctgaccataagcacccaaaaacatctgcagctcttaaccagtcaacctatattccttattattacatgttacaaaaaattaatgaaaaaaattatatactccaagccacgggtcccatccctgagaagaatccaccggacacagcgttcgtccagatcccgccg

SEQ ID NO: 24303 - DNA, 955 bp, Glycine max
  Clone ID: PAT_MRT3847_121946C.1
cacgattctcccgctattccacactgtccaatatgtctttcgaaaccacaggtaccattgcctcctttgggggcaagcttctcaagttgaagcacaagtccgagagcacaaacacagacatggagcttaacatgttcctacctccgcaagcactcaagtccggagccaaggtccccgttctgttctacctctctggactcacatgtaccggcaacaactgctcggagaagggcttcttccagcacggcgcagctaagcacggcattgccgtcgtataccccgacacatcaccaagaggtcttcagatcgaaggtgaagatgaagcatacgactttggatctggcgcaggcttttacgtcgatgccaccaaggacccatggtcgaagggctacaagatgtactcttacatcaccaaggagcttcctgaagcgttgttctcatccttcaaagaactcgactcgagcaaagtcagcatcacagggcacagcatgggcggtcacggcgcattgacattgttcctcaagaaccctggcatgtacaagtccgtctccgcattcgcccctatcgccaaccctatcaactgtccgtggggtcagaaggcattcaagggatactttggcgaagaccagcaacaaaagtggaaagagcacgatgcgtcagagctggtaaagcaatggaagggtcctctggaggtgctcatcgacgtgggcaccggagacaacttctacaagcaaggccaactacttccagagaacttcgtcaaggcagctaaggaatctggcaacgacaagggcattcaactacgtatgcagcccgactacgaccacagctactacttcatggctacatttgccgatgaccacgtcgagtgggcggcgaagcatctgaacgcgtaaagcggttcgggtatcagagagaaactatagaacataatagaatccaattcgtacacaaa

SEQ ID NO: 24304 - DNA, 152 bp, Glycine max
  Clone ID: PAT_MRT3847_121947C.1
gttggaaccgttcttcgtgttctccattcgctctctcagtccttgcatctacgtgaatcttcgcttccgttccttatcttgtgctttctttcctttacttgtgatcttgctcattgttgtgctcaataacagattgtttcgtgcttgtcttg

SEQ ID NO: 24305 - DNA, 296 bp, Glycine max
  unsure (1)..(296): unsure at all n locations
  Clone ID: PAT_MRT3847_121948C.1
tttttgctttttctaatttgttgtactttatctttataaanannnntatgtggggtgaatgcctttttttttatttatttttttccttaaaaggcaggaaatcccgggaaattttaaaaaagcggtaacccatcccctttttaccaaaataggggtttttccttaaccctatgggaaaaggataggtccttttaattttgttggaggggttgcccaactaaaaattttttttcccctgataaatataaatgttgggtactaaaaaaaagggcactccggggtttaaaacgaggggg

SEQ ID NO: 24306 - DNA, 370 bp, Glycine max
  Clone ID: PAT_MRT3847_121949C.1
caacccaccatacaatttatttttataaaaatatttggaactgattccattcccctggaggggggcttccctgaaagttaattttttaaaaaaccccttttttttttttatttgagggggtgggggcattaaaattaatgtggcaaaaggaataaaatccgccctttttgggaaccttcgcataaaaattttgggaaaaaaaggaaactccaaaaacctttttttttttgaaaatagccctgccaccagaaaaaaaaacaatggggaaaaaaagggcccaatccttttttttggggcttaaaccaaaaaaaaatttttttttgggaaaaacttggttatgttattggagccgcttcacaacggggggggg

SEQ ID NO: 24307 - DNA, 379 bp, Glycine max
  Clone ID: PAT_MRT3847_12194C.1
ctaaaaaaaaaaatacctgccattaaacaaacccggatcaaggccatggcttcatttgaggcttccctactctttttattttcccttccaaccccactttttttggaaaacctttttaagtttttttttttttcccaaacttttgggatatacaacacagggggtggggatcataaccccgcatatatatttaatttaaaaaaaaaaaaaacagggcccaaaactcccccgccggagggggggcaccaaggaattgatttactcaaaaacaaacccggcgctggggtttgtttggttaaccgccccaaacaaacgggggaaccaaaaggggggggggaaaaaacctccccgcccccctttgagtccccatttgggggga

SEQ ID NO: 24308 - DNA, 742 bp, Glycine max
  Clone ID: PAT_MRT3847_121952C.1
ggccgaccacgcgtccggagagactgacatgataggatataattattttatattgtacataggaagtggaaatgtgaatgtgtggcagggtgataaaaatgaaaagagacttcaaaatcacagtttctggcaaaacccttttcgaaggtgaccaatcggtggatcaaacatggtctaccgcatatcgcagtttcttccttcatttcatactctctggcaaaaccctcgtcgacggtgaccaatcggtggatcaaacatggacaagagcatgctagcggatttggattcgctccctgaggctgataagcaaagaatgactgtcatgatcgatcagctccaaatccgtgacagtctgagaatgtataattcactggttgagagatgctttaatgattgtgttgacacatttaagcataaatccctgcaaaagcaagaggaaacctgtgttcgaagatgtgcagagaaatttctcaagcattctatgcgggttggcatgaggtttgccgagctcaaccaaggagctgctacacaagattaatttctgtttaacttcttccaatggaaaactgttaatttattattgttattattttgaatgcagttcgtttacttgcatttttgatcctgaaaaatgagactgtagagaattctaatttgctattggtacacaataatttgtgctaaataatttcatcattatgcaataacagtgtttctgaatcctgatttgattgagtttatt

SEQ ID NO: 24309 - DNA, 304 bp, Glycine max
  unsure (1)..(304): unsure at all n locations
  Clone ID: PAT_MRT3847_121953C.1
agaaggaagaggaaaggaggggagagaagggaaagaggaggagacagaggaaaaagataacaagcaatgggagaaggagacgacacacaagacaagcnagcaggaagccaagaaaagaaacacagagaagggcaaagacgttgagaaaggcagggaatgattatctggagaggaaacacgaagacggggaagcgagaatgcttcggcgcaaagaaagagggaggaagaaaagaaggcggaaaaaggagatgaagagactgttgaaacaggagaggaagcgggcaaaaaagcgaagaagagaggg

SEQ ID NO: 24310 - DNA, 154 bp, Glycine max
  unsure (1)..(154): unsure at all n locations
  Clone ID: PAT_MRT3847_121954C.1
atnnanntgcaaanaatngnantttcgttggctttggtggatgtccctttctgttactcttncaactctttggtcttggcggaggagnaaaagcccatggccaagancacgaagatttttgancatggctgtttgggccaaancacttccccat

SEQ ID NO: 24311 - DNA, 407 bp, Glycine max
  Clone ID: PAT_MRT3847_121955C.1
gatactagtaatacaagatgaattgatcttactgcaggggcgtacatcgaccgaacctatccgctggaaaaatgccaaaaccagaggctgttcttgtatacttttccctgatcgatcacaactcgtgcgtcgtgatcccccacttcgtggttgaggagacagggcgatggtggttacctacacactctaacactgaggcaatgacggtcatcatgcatgaacctctcacttacctataggcagagttagagctgtaacccaataggtcccctgctacaaggtcatgactgacgacagtgattgcgccctgaaagccctatactggggcattgaggggcatcatacatgagcctgaatgaacataggggcagatcaaaagttctcacccgtcgatgttttttaaacaa

SEQ ID NO: 24312 - DNA, 478 bp, Glycine max
  unsure (1)..(478): unsure at all n locations
  Clone ID: PAT_MRT3847_121956C.1
cccccatccccaccccaacttgtatattagtagcataatantctatctgcatctctctctcttcagaggagtgaatccatggattagaccacatagagcatttnacacannaactgnttaangtctttagctgggtttgattcctctcattgcttccacattatctttagctccagacacaacatattccgcaacctgtgcaatgaatccaaaccagctcaacacctgaaccagttgctgaccaaaatgcccatgtggttcaatattcaccgtatgctccaacgtaaggcagatttttggaccgctagatgctcctccattaaattctgacatcaattttctgatcgagcgggtgaatataagcaaaatcgcctgccaatataataaacaactcaagtataataatggcagacattgcttacccaccagtttcaatggcaaatatattgtataataaagctatgcttcatcacatgta

SEQ ID NO: 24313 - DNA, 647 bp, Glycine max
  Clone ID: PAT_MRT3847_121957C.1
gtttcacagttcacaccatatttttatacacaaacacagaatgacgagggttgaagccccaacacgatgaaatgaagatcgaaaacgccacattgagatctatttctcttccttttcgctcactcacttaacccccccaaccctattctctattcagatccctctctacccaaaccccgccacgcgatgcgtttcaaatcggagtcataaacccccgcatctcgcacgatccgacgccgtttcgtgaaaaatgggtgcgagtcagtcagtgcaagtggtggaagacagcgaagaagaagaagatgagaggaacctcaacgggcccttgatgggccgggcccaattgggcaaccacatggtgaagaaggttctggaacaggagcccgagatgctgccgtgccacgcgtcggcgtctccgctctcgccgcagctctcgtccctcgggacgccgcggctcggcccctcgatcaaggtctgggacccctacaacgtccttggcccgccgcccccgcttccgtcgccgcccgcgctgtcccggagcttttcggggaacgggatggtcgccgtggcggacgacgaggcggtgacggaggttttcctgatcagccacggcgagtgcgagctgaatctggcgccggatttggttg

SEQ ID NO: 24314 - DNA, 370 bp, Glycine max
  Clone ID: PAT_MRT3847_121958C.1
ggttatacacatcacccattcacaagtactctaggggagacaaagccaccttctgccaatctctaactggagcagccccgctaaatgcgacaagaccaaagaaacgcctatcaaatgcaaagttactcccacccttcgtcgcaatatgccaaaacctttttcgaaaaccgtccagaaaaaagttttcccaggctagcacctgggtctaaaaaagtcatttgaacatggaccacggcaagctccgggtcctcctgaaagggggtaatcgttgaagaagcgaaaggacatatggtaacaaatggaatctttgtgacgtaaaataatgcaatacataaaagaaaaagccttttctaatgcctgaaaagacatg

SEQ ID NO: 24315 - DNA, 687 bp, Glycine max
  Clone ID: PAT_MRT3847_121959C.1
gtaaatgaagtgcataaaatatgcatttcaacaaattaattttacttacattaacgtatgatacataaatcacaaagagagaatcagtttaaatttcatatattgagggacagatcaacaaatacatgatacagcattacaggaagccataaattttctatgcattccatgtcgtgattttccacaacttcatttctcattcaggaactgttggagcgtacatatccggcatgacccagacatactgccccaaagcacctgctgtgaggggacagcgggggttatgctagtcttcagaattataaccatgtaaggtgagcaaatttgattctgttctgtcttcatgaaagaatgtgcttgataatttaactatgattttagtgtctgcttcatgtatctaagagcagaccgcagcattgctctagcttttcgatcaggagtgcacccagatgcgaccatttcttcatacacagctggaacgttttctttcatatactgcagcacagcaaaggcttcagcatcccttctgtcttcaccgaatgcattgatcaatgaattgagagctaagagactaggtgtcagaccctcagttgtcatcaacctgaatgcatttactgctagttcagacaaacccctttgcgcataggcattgatcagagcattatacatgggttgaagttgggcttg

SEQ ID NO: 24316 - DNA, 493 bp, Glycine max
  unsure (1)..(493): unsure at all n locations
  Clone ID: PAT_MRT3847_12195C.1
aaaaaaaaatggtggggagcggccgcccttggaagagggcgtttttttttacggtgtttattgcccgtggggcctgatttatttatttaggtggagcggcctagctttatgagtgtgagtatcataggcattgtcactgccttcttagcgggtctcacacgcattcgtatcatagttaacaccatgagggttggcgggtacccaacttcttttttcttgcntagtactgcgtatataagatccttattggggttaggaggaggccgccggggcttcggaggattggaaagcatagcctcttaatcctcccatccccatgagcctgcgggggtctcgggtcattggaccagcgcctgttggggaggggaccttagttattttttgcgtagtatgttacggattttcttcctgggtcattcgcgggggggggaaaattcaagggtcctgatcgtggggcttggtggcggcattgcgctgctttctgccctcgccc

SEQ ID NO: 24317 - DNA, 674 bp, Glycine max
  Clone ID: PAT_MRT3847_121960C.1
tattcatgggttgcttaaggtcaatcaacttcattgcaccaactatggtgcattgtttggctctcaattcattaattaatgcattcggtgaagacagaagggatgctgaagcctttgctgtgctgcagtatatgaaagaaaacttgaacctgatgtagttacttataccaccccttatgaaagctttgattcgtgttgaaaagttccaaaaggttccagccgtgtatgaagaaatggtcacatctggatgcactcctgatcgaaaagctagagcaatgctgcggtctgctcttagatacatgaagcagacactaaaatcatagttaaattatgatgcacattctttcataaagacagaacagaatcaaatttgctccccttacttggttaaaattttgaaggttaatgtaataataaaatcaggattcctgttgtagactagcataaccccttcacgacaggtgctttggggcagtatgtctgtgtcatgccggatatgtacgctccaacagtgcctgaatgaagctgtggaaatcacgacatggaacgcatagaaaattaatggcatcctgtaatgctgtaccgtgtatatcaatctttggtatttatgtatcatacgttcgtgtaagtaaaattaatttgttgaaatgcatattttatgcacttcatttaaa

SEQ ID NO: 24318 - DNA, 2580 bp, Glycine max
  Clone ID: PAT_MRT3847_121961C.1
tcggtccggattccgggtcgaccacgcgtccgagctttcctcttgtgggagcaaagcaaagcaacggccatctcttgatgataaccaataacataacatgttccttttaccaccacaactaacaacagccccattcccttccccatccacgtcactcacttccacttccccaccacccaccaccgccacaaccacaaccatgttctcccgccgccgcaatccaccgcaaaccccataaccgccaaaccaatcatcctcgaagaaggccccgacgacatcctctccttccacaaccgccgctacgacttcacccccctcctcagcttcctctccaccacttccaactcaacccctcccacctcactcggctcaaccgagttccaactcgccgagtcctaccgcgccgtcccggccccactctggcacgccctcctcaagtccctctgcgcctcctcctcctcctcctcctccatcgccctcgcatacgccgtcgtctcatggctccagaaacacaacctctgcttctcctacgagctcctctactccatcctcatcaacgccctcggccgctccgaaaagctctacgaagccttcttactctcccagcgtcacgtccgcactcccctcacctacaacgcgctcatcggcgcgtgcgcccgaaacggcgacgtcgagaatgccctaatcctaatgtccaaaatgcgccgcgacgattaccagccggacttcgtcaactacagctccatcattcagtacctgacgcgctccaacaaaatcgactctccaattctccagaaactctacgccgaaatcgagaccgataaaatcgaaatcgacggccacctcatgaacgacatcattgtaggattctccaaagccggcgatccgactcgcgcgatgcggtttctagctatggctcagagcaacggactgaaccctaagccctcgacgcttgttgaggttatcttggcgcttgggaataaaagaagatcaaatgaggctgaagcgttgtttgaggagattagagagaacgtctaataatcaaatcaggattcctgttgtactctagcataaccccttcacgacaggtgctttggggcagtatgtctgtgtcatgccggatatgtacgctccgctggggtcaagcctgatgagcaaacttatagtttgttgattgacgtgtatgcgcacgcggggaggtgggagagtgcgaggattgtgttgaaggagatggaagcgagcaatgtgcaacctaattcttatgtttttagtagaatcttggcgaattatcgcgacaaaggggagtggcagaaatcgtttcaggttctgaaggatatgaagagcagtggtgtgcagcctgataggcatttttacaatgtgatgattgatacgtttgggaagtataactgccttgatcacgccatggccacgtttgagaggatgttgtccgaggggattccgccggatatcgttacttggaacacgctgatcgattgtcattgtaagtcgggacgccacgatatggccgaggaattgttcagtgaaatgcagcagaggggatactcgccttgcatcactacttataacattatgattaactctatgggggagcagcagaggtgggagcaagtgactgcgtttttgagcaagatgcagagtcaggggttgcagcctaattcaattacttacacaactctggtcgatgtgtatgggaagtccggaagatttagcgacgctattgagtgcttggaggtcttgaaatctactgggttcaagccaacttcaaccatgtataatgctctgatcaatgcctatgcgcaaaggggtttgtctgaactagcagtaaatgcattcaggttgatgacaactgagggtctgacacctagtctcttagctctcaattcattgatcaatgcattcggtgaagacagaagggatgctgaagcctttgctgtgctgcagtatatgaaagaaaacaacattgaacctgatgtagttacttataccacactaatgaaagctttgattcgtgttgaaaagttccaaaaggttccagctgtgtatgaagaaatggtcgcatctgggtgcactcctgatcgaaaagctagagcaatgctgcggtctgctcttagatacatgaagcagacactaaaatcatagttaaattatcaagcacattctttcatgaagacagaacagaatcaaatttgctcaccttacatggttataattctgaaggttaatgtaataataaaatcacgattccttgtagactagcataacccccgctgtcccctcacagcaggtgctttggggcagtatgtctgggtcatgccggatatgtacgctccaacagttcctgaatgagaaatgaagctgtggaaaatcacgacatggaatgcatagaaaatttatggcttcctgtaatgctgtatcatgtatttgttgatctgtccctcaatatatgaaatttaaactgattctctctttgtgatttatgtatcatacgttaatgtaagtaaaattaatttgttgaaatgcatattttatgcacttcattttaaaaaaaatacccaaccc

SEQ ID NO: 24319 - DNA, 103 bp, Glycine max
  unsure (1)..(103): unsure at all n locations
  Clone ID: PAT_MRT3847_121962C.1
gaaaacataagtagattttgggttgataagtggagccattttatgtgctgactgctgatttgtgaactagttctacataattatatgctgtaattttgtcana

SEQ ID NO: 24320 - DNA, 260 bp, Glycine max
  unsure (1)..(260): unsure at all n locations
  Clone ID: PAT_MRT3847_121963C.1
aattaagatatncggttgtcttgcatcaagcttttgagccggatctttgccaagatcgtgttgcggattgtcatgantgctgcgtatgctactgataaggcgactatcttatacatgctcgaggttgtagacattgatgtgatcagtcgtcttaatgaattcactgcgatgagtagantagatcccagaatctatggtgctcaaatgagtaccataagactagaacaattggagattaacatgggaggggtcacagtaga

SEQ ID NO: 24321 - DNA, 808 bp, Glycine max
  Clone ID: PAT_MRT3847_121964C.1
gtggtttttttcgtccttatgcacgctgggtaggattatagtatctgccccaactacttcaactcctcttactacactttcagttcttccaagaaaaggagattcagaaagcaattaagatgattaagttgaggtcaatgaggtttagccgaagcagctccaagcttggaaatggtgggcacaaagcaacaacacccactgaaaaggattgcagaagcattggtgaaatccaatgggaacttaggcctggtggcatgcttgttcagaaaagggagagcaaccaaagcgcaggggagggaatgatcacaattatagtgtcaactgtttcacaatcgcatgaaatttctatcgaggccacatcaacttttggagaattgaaaatgattctgtcactggcaacaagttttgagccccgagagcaaaggcttctcttcaagggtaaagagagagaggatgatgaatatctacatatggttggggttagagacaaggacaaggttcttctgtttgaggatccagctataaaggagaagaaactgcttggcttaagaaaccaacccattaacaatcctagtcgtaccatcagtgtatgactaattaaccgaactcgttaattaattttaattagtattaattaaccacaatgaaagtttgagaaatttaatgtagtgatgaaccttttttctttttgcaatagattaggatcttaattatgtccctatctgttgtttggagccttcgctcaattaaaaatgttgagttgatgaaatgccaagtcattctgcttagtatgattaaaaaaaggaaa

SEQ ID NO: 24322 - DNA, 360 bp, Glycine max
  Clone ID: PAT_MRT3847_121965C.1
gtcaaaatgaatttcgaagagaggcacaaaaatctttctaaagggacatgccatctatcatgagaaatcgatgaccattttgttctgatttcagaagttatatctcctgatgttctgtctattttgacgacactaactataatatataatgtgcttgaataatgaatcacatttgaagatgaagacgatgatgaaattgaattggctgaatcattgcaattcaacttcgacacaataaaagttgcaacaaataacttctctgactctaataaactcggagaaggcgggtttggagctgtttaccagggcaggctctctaatggacaagtgattgctgtcaaaaggttgtcaagcgattct

SEQ ID NO: 24323 - DNA, 751 bp, Glycine max
  unsure (1)..(751): unsure at all n locations
  Clone ID: PAT_MRT3847_121966C.1
cccgcgtccgcgagaataaaaataagaaggacaaaatttcaaatcaaaacttaaaagaggattctaaattgcaattcaccctcaaaagtataaaattagaactccctttgtgaagaactttaaaatttcgaacataatttctctaatacgattcccgtgaatcttaaaattgattaaaagtgcgtttggatagagaattttaactgaggaaagtaatttatcagagaatttaaatttttgtaatttagaattcattgtttggatactttttaagtggtctaatcggataagtttcactactggatcggtcacgcaattaaaccaggatgacctggtcaaacctgaccaattaggtaccagattctaattggatcggcccgacctgatcgattttataacaaaaaaatggaccccctctacgatctcattttgatctatcattattatccattgttattttaaattttggagtatagatgaatttttctactcaaataatgttagttatatatttatataaatagatacatgtataattttaaatatttaatatatatcaaatcataccaattattatttcaccaactaaaccaaactcacttacccattaccttggccgaatcaataaccaaaataggtttcacaattatgcctaaattccttaatcgattgctcaaacatgaacttanagatacatcaaacatattggactgcatanattcactacacgaaaatattcaattctacacat

SEQ ID NO: 24324 - DNA, 191 bp, Glycine max
  Clone ID: PAT_MRT3847_121967C.1
taaggaatcaaagtcctgatgaaaaacaatttagtacctgtagatcgtgcaaatttacgttcccgcacacgctacgttataacaattccttaattccacccaatttcagttcacccaacctgcctttacatacgcgaatctggattaccgaacggtgaacccaactgaactgcctacaattacaaccactg

SEQ ID NO: 24325 - DNA, 428 bp, Glycine max
  Clone ID: PAT_MRT3847_121968C.1
gccgggaattcccggggtcgacccacccgtccgccttcatctacccacccgagtgaggcatagccatctggtgcgagcgcggtcaactttgggaactcaaactcatcatccagtcaaccacccatctaaagctttaactttcaagttttggaaactgcggagacataacacacacagagagagagatgcagaagagcgtgatggagatgggagcgcacgacttggtgaatgcagcatgtttaacacttgcagaagccaatgaactataccacgatctgactgatattctgtctccacctcagcctccctcacacatacgcgaccccattgtgactctctagattgctcaaaccatacttgcgacactctttgcataagctatctatattactcctgcttatcactactgccttcacatcgctcaacat

SEQ ID NO: 24326 - DNA, 509 bp, Glycine max
  Clone ID: PAT_MRT3847_121969C.1
ttgaccatttatggtgaacttacctttagaatacaatgatgctcgagttagtaccaacactcatttttaattgcctcctgggctctgcaacacaaataccattaagtgaaaggtatagtgccttccaaaagtgccatttcttaagtacagctttatacatggccaccagatccttttaaaaacatttttttatcaagctaacgattctcgtgcaaatgagttgaaggtgcagtatgaaatggtgacgaaacattatggaacagagcaggtaccacgctgtgaaactgcattggcatgacattgtgtgatcttggatcagtcagctccatttgttgaaaaccatctttgccactacctacttcgacctgagatacctttcctttatttccttcactgttttcaacacttcctagactcctaccagccataccagacctcacagctttctcttcagtattcggttttggatcagggaccttatttttagatgtaataatagaatgatattc

SEQ ID NO: 24327 - DNA, 144 bp, Glycine max
  unsure (1)..(144): unsure at all n locations
  Clone ID: PAT_MRT3847_12196C.1
aagggtctntcaaccccttnaccaaacgccaaccaancataanacgtntggctcaatgtgccttcgnnactgtccctgctgtcatgngttggcttgccttctngttctctncatntaggctggtnttttgggtctctttcgtcc

SEQ ID NO: 24328 - DNA, 796 bp, Glycine max
  unsure (1)..(796): unsure at all n locations
  Clone ID: PAT_MRT3847_121970C.1
acggctgcgagaagacgacagaaagattcaggaacaatggcttatgctaggcttgctcctgtggctgtcttctagattggggcagtgcaaaactcacaacacatctaaacaaaaaatcaagaacaatggcttatgctaggcttgctcctatggctgtcttcttgcttgccacttccaccataatgttcccaacgaagatagaagcagcagattgtaatggtgcatgttcacctttcgagatgccaccgtgccgctcacgtgattgtcgttgtgtccctataggactagttgctggtttctgcatacatccaactggactttcatctgttgcgaagatgatcgacgaacatcccaacttatgtcaatctgatgatgaatgcatgaagaaaggaagtggcaatttttgcgctcgttaccctaataattatatcgattatggatggtgttttgattctgattctgaagcactgaaaggcttcttggccatgcctagggcaaccaccaagtaatatggtgggtatgccaaagtgggcatgcttgatgcatcttctactacttaaaaataaaagcttatgatgcatctactgctttaaacaaaagagtgctccactacgcaacttttgtttccaacttatagttggttacgttttatgtaaactcaacccatgtatgttttggagcattccagttaataaaaaatgtttctatacaaaaaaaaaaaaaaaaaaaaaaaaaaaaaaaaaaaaaaaaaaaaaaaaaaaaaaaaaaaaaannagcggccgctctagaggatcca

SEQ ID NO: 24329 - DNA, 440 bp, Glycine max
  unsure (1)..(440): unsure at all n locations
  Clone ID: PAT_MRT3847_121971C.1
cggtggagctggatgccagatgagaaagccagcaggagcgttctactgggaaaaggacacttctttggtacctgcttttcacatgggcctcctccggttttgagtttggtggcctcccagtgcaacgtcagcttaaagaagcagaggagccgcagcatccttagctccttcttctgctgcttccgtgattacaatgtggaggcccctccacccagcagccccagtgtgcttccgccactggtggaggagaatggtgggcttcagaaggcccttcagctgcattgttgtgatcttgcgcgtcgttgacatgctcatctcatcgaaagtgtgttctgaaggtgcacctgtgtgcaggggctgtctgcactctcctactagagcagagctgaagactgattgtcactagacggggagagagtgtctgctggcatcntgtgagt

SEQ ID NO: 24330 - DNA, 306 bp, Glycine max
  Clone ID: PAT_MRT3847_121972C.1
aaaaaaaaaaattggggggcgttttcatttttttggggggaaagaattaaaattgccaatcccccattttaattaaaaggaaaaccccggggcaataaaattaaaaaagcaagctttccccgaaacacataattttttttttttgttaaccccctcataaaagtttttaaaataaagggacattttttccgggcgggccaaaaatacccaatccctgaaaatcgaataaaatttgccaaaagctggggccgggcctttttttgaaataaattgggcgccgcgtttttttatgttaaaacccccccc

SEQ ID NO: 24331 - DNA, 267 bp, Glycine max
  Clone ID: PAT_MRT3847_121973C.1
aaagactcttgaactaactaaacctccctatcccaatataacccttaaaaccttcctctcccgaccacggatcccgtaagtcgaattcggcgccccagtctaaatctctattatagttacctaatccggacataggtacaccgatcgcctcagcgtgcacaagaactaagtacaaaccgtcctcgtctccaaaaagtcccccgacgaccgcgcggcgaactccgacgatccacgcactatccctaaatctccacgcctaaactacct

SEQ ID NO: 24332 - DNA, 406 bp, Glycine max
  Clone ID: PAT_MRT3847_121974C.1
tttttggttttttttttttttttattattttggattggggttttacatatttttttttttttttttttttttttttttataaattttttttggggggggggggggaaaatttttatttttttttgggaaaaaaaaaaccgaaaacattttttcgaccaaataaatccccccggggtgaaagaaaaatttttttttctccccgtggggcgtttcccaaattaaaaaaaacaccttttgttaggccaaaaaaaaaaaacttagcgccccccccctcatgggggggctgctttcgcaaaaaagcactccacttaagcccgccttttaaaggtttagctctttgaaaaaaatatgccggtttaaaaaaaggtcttccccagtcaaaaaaaatgtgggttttcccaccttt

SEQ ID NO: 24333 - DNA, 351 bp, Glycine max
  Clone ID: PAT_MRT3847_121975C.1
accggttgcagaaggccaccggagggggcacatgagtgaatgatgaacgaggtaactggatacagaggggcgaaaatggaggtcctttctttctaagctggtacaattcttggaggatgccaatgccatgcgtaccatatgcttcctctccgaatgaacactggctatagtgaccgtactctgcaggtgaattgcgaaggtcggacgctcactctgcatgtacacatcatacctgggtttcatactagtcgtgccacagctgcgatgcccacgccagcgaaatattaattatccgcagtactgatgaggctaaaaaccacttaaacaacacctttaatactatgaaacccc

SEQ ID NO: 24334 - DNA, 241 bp, Glycine max
  Clone ID: PAT_MRT3847_121976C.1
gttattcgtacgaacacgcgtccggttgggtcttaaaatatctcaatctaaaattgcacttcccaaaaacacagaaggaggaaccattctgcgtcgtgatctattggcaacatttttgacagagggcaatattagagtatgtgttggttaccagcgcactcattgaatgaaaggaatgattaaaatggctaccacagaggctatactttagaatacagggatatgattgacctgtgaattg

SEQ ID NO: 24335 - DNA, 140 bp, Glycine max
  Clone ID: PAT_MRT3847_121977C.1
ttgaaagcggagcacacttctccgacttcaagatagagttaggcaagacctacgcctacgcacgccggagcacgtgcaacgcttccgtatgttaaagaacaacttgctccgcgccaagtcacaccagaaattggatccct

SEQ ID NO: 24336 - DNA, 1415 bp, Glycine max
  Clone ID: PAT_MRT3847_121978C.1
attctttttttttttttttttttttttttcaagtggaaaattgttgaaagagagatataagttatgtaataacgaatctaattaagtatcctacaagcataaagaactgcaggaaaatgacagttcatacacacttgcatttcagagcaatgaaataatggaagacaaaagacaaaggtggtacaacacaagcattaataattagttgtttaatttggcaacacgcaggcacatgcgttctctcctaaaaaataatgaatcaacttcagttagtgtgggagacctggccagagtagtaaggaatcctagtgaccctaatccagtcatctccatggaaaaacatggatggcaagaagtttgttattccatctgaatcaagggtcttaactccttcccacttcacacgcttggttttgtctgaaccagggccacggttgttgaactcagcgtagaaacaagtatccattccactaaaaccctccaatgtttgccatggcatgtaaccatcaggtgtgatcaaatcaccaatgtaggagtccatgaagatggtccttgagaaattcttccatggacgtgccaagtaagctttgttgtcgaatctaactgggtagtacgtggggtctgacacaatgcttcctccatggatgactaatcctgatggttggttcctctcttttctgccttgtgcagtcacaatgcattgttggttttccaatggttttcgcaccacgaaagtgcaattttggagaactcagctggtgctgaaaaacatcaagcagtggccttgagggttcaagctgacaggtccatcttttacaaatgtcgaatggatgggtaccaggacacactctacgcacacaccatgcgtcaattctaccgtgattgcatcatttcaggtaccatcgactttgtctttggtgatgcagtggctgttctccaaaattgcactttcgtggtgcgaaaaccattggaaaaccaacaatgcattgtgactgcacaaggcataaaagagaggaaccaaccatcatgattagtcatccatggaggaagcattgtgtcagaccccacgtactacccagttagattcgacaacaaagcttacttggcacgtccatggaagaatttctcaaggaccatcttcatggactcctacattggtgatttgatcacacctgatggttacatgccatggcaaacattggagggttttagtggaatggatacttgtttctacgctgagttcaacaaccgtggccctggttcagacaaaaccaaacgtgtgaagtgggaaggagttaatacccttgattcagaaggaataacaaacttcttgccatccatgtttttccatggagatgactggattagggtcactaggatttcttactactctgggcaggtcttccacactaact

SEQ ID NO: 24337 - DNA, 578 bp, Glycine max
  Clone ID: PAT_MRT3847_121979C.1
agaaccgttgcttattcttggaggcctcgaccacagttcacactttctttgtttcttattgagtttttggcttctcacttctttttttctttcacactctcaacgaagtgatttataacagtgtttaattgaaattccaaacatggattgggttcgaggagacgctgtcggacgaggaagctttgctaccgttagtttagctattccaacgacgaattacaatcagtttccgtctctaaccgtggttaagtccgctgacgctcaaacctcgtgctggctcagaaacgagaaacacgtgctggatcgcctaggttcgtgtccgaggataattcgctgcttcggagatgactgcagtttcgagaacggcgtcgagtactacaatttgttcctcgaatacgccgccggcgggagtctcgccgacgaattgaggaaccacgatggcaggattcccgagcctcaggctcgggaatacacgagggacatcgtggagggtttgagccacgtgcacaaaaacgggtttgttcactgcgatataaagctgcagaacatcctcgtattcgaggacggaaggattaaaa

SEQ ID NO: 24338 - DNA, 361 bp, Glycine max
  unsure (1)..(361): unsure at all n locations
  Clone ID: PAT_MRT3847_121980C.1
gctggggnaaaaaaaacataatatggccacttgccaacaaaaattttttacaacataagggttgcaacacccttgactcattggaacatcattttacaacttttgatctgggggaaaaaaaaactcaaacttttttccattttaaagggttgttccatacaagttaaaaaaactgactttttccacaaaaaatgcctttgtttttaaaacattgccttgtacaaaaacattacaaagcatggcttaatgacattggatgcccccaccaccttatatttaaacatttattccttgcaaagctccactgtttaaaaacttcatcccctttttactcatttggtgaacttttgaaggggataaa

SEQ ID NO: 24339 - DNA, 539 bp, Glycine max
  unsure (1)..(539): unsure at all n locations
  Clone ID: PAT_MRT3847_121981C.1
cccacgcgtncgtacggctgcgagaagacaacagaagggggtgtctcttagattcaacatattttattaaatatgctaacaacttaatgctagctgatcatcaatttagacaaaagcttacaactatgacttaacaaacaattaactatttttacatataatcatataactatacaatattaattgtaagaacgttaaatatattttcttgattttcactataaaagaaaatttataataatctaagtttgggtttcagctaattagctgcccagaaaccatgaaaacctagaggaaaatttaagtggcttggaatttcgattctcgcaacaagggcattatctgctcctatcctttttgggtccaagatgacaaggtaacatctattcattgaaacagcatactcaacaacaagaagatagccatcatcttcttggtaacctttgggaacaaaaataggttcaccaataaatcttctacttccagcagtccaagtttgtgcaacagattcagtagtctctaggtctaattctcgagcc

SEQ ID NO: 24340 - DNA, 445 bp, Glycine max
  Clone ID: PAT_MRT3847_121982C.1
attgtatccaaccaccaaagaatctcgtgtctgaaacattccccgtagcggcggcgctgtctcttttgcagccgctactacgtttcctttttccccgcccaaagcaacaagtttagttatttgtgtctccaatatgatccatcgtgattaaacacatacatccatggataataacaacaacaactactccgggtttgttcccaataatgatactgatgatgactgtacatttctccaaaccttgttggaattggacccccaacatttctatttacccactgaagaatttgtttcactgtccctacaacagcaacaacaaaatgatccttttggcgttgaaaagggtaataatgttcccttcctgcagggaaataataataacgattttcccattggagaaggagtagttcctgatgttgttgatgtggaggaagagggtccaccg

SEQ ID NO: 24341 - DNA, 356 bp, Glycine max
  unsure (1)..(356): unsure at all n locations
  Clone ID: PAT_MRT3847_121983C.1
gtttgnggatgatcaaagcaaacgctaaagcgaagacgtggcattcggtctgaagctgatgctaacctcatgaatcaattgacttggaggcttggacttacaagacgagagacgcagaatgctatgacgtctatggcttacatgaagagcaggtggtgatggttacaaagcccggtactgccgtgcttgttctttatcacacaaccacccaaactgaagaaacgatgttgctgtctgaaaattatgatatagactattacatgagaacatattttatgaagcaaactgggggtcatgcttgaaagacaattgtgctgcttaatgctctatggtacttgacttgtgaagacaagctc

SEQ ID NO: 24342 - DNA, 1676 bp, Glycine max
  unsure (1)..(1676): unsure at all n locations
  Clone ID: PAT_MRT3847_121984C.1
ggggcttttggccaaacgcgcgcactgtaaccgcatctccacctgaagagtgaagaccaagcccaccatggacagcagaaacgtcgtcgtttgcgacaacggaaccggttatgtgaagtgtggttttgctggggagaatttccccacatcggtttttccctgtgtggtggggatgccaaagctagaatcactcaccgagcaggcgcttaaggatattgttgttggagaagggtgtgcagacttgcggcatcagcttgatatatcttatacttaggaccctgtgaatgtgcccaacgggcaaaactgggatgatatgtgtcatgtttgggatcacgcgtttttcaatgaattgaagtttaatccaccagactgtaagattttactcacggatccgcctcttaatccttccaagaatcgcgaagaaatggttgagacaatgtttgagaagtacaattttgctggagtgtttatccaaattcaagctgttctaacattatatgctcaaggtttgctgactggattagttattgactcaggcgatggtgtcactcatgtggttccagttgttgatggctattctttccctcatctaactaaacgaatgaatgttgctggtcgacatataacctcctatcttgttgatttgctttcaaggagggggtatgcattaaataggaatgctgattttgagactgtcagggaaatcaaagagaagctatgctatattagttatgactacaagagggaatatcagttggggcttgagaccactatccttgttaagaattatactcttccagatggaagggtcattaaagtaggcactgaaaggttccaggctcccgaggctcttttcactccggaacttatagatgtagaaggtgatggaatggctgacatggtttttcgctgcattcaggaaatggatattgacaaccggatgatgctatatcaacacatagttttaagtggagggagcaccatgtatcctggattaccaagccgattggaaaaagaaatacttgatcgttatcttgatgttgtcctgaagggtaacagagatggattgaagaaattgcgactaagaatagaggatccaccacgtaggaagcacatggtataccttggaggtgctgtgcttgcaggaataatgaaggatgcaccagagttttggattaacagggaagattatctagaagaaggaattgcttgtctaagcaggtgtggccaggcatgactttgaggtccatgatcgctctgaaaatgggatatcaattttgggaagcaaaagcgcaccagaggctgagtgatgaatattcaaagctgttaaaactgcctcctcctaaaatagcttgcattaattgctgctggccttgtatagctgtccctatggctactagaggctagttgtgattgtatacacacttatgtttttgtgataggtacgacaagagaattcttgtatcttgtttttgtaacaagaattgtggcaactatgtggcataatgttgaataaagagtaaattgtaaatttttctaactgttccatgttcgttttactctgtcgagagagcttgtagtaaggaatactttacacatataagtcggcaatagccaactagtggattatatattcttgctgtgcagctncgatcaagtattcttttccctcactg

SEQ ID NO: 24343 - DNA, 319 bp, Glycine max
  unsure (1)..(319): unsure at all n locations
  Clone ID: PAT_MRT3847_121985C.1
gggtgttctaagaacagctatctcgcttttacatcgtttattcgacaagagacgaaaccacatcggaggcatcgtgtatctgtcttcatagagatggctaggacattttaaggatatatggagcgcttccaacctaagggcaaacgaatgctggtaagttgctcggggggtttgacacgcttttcgtctttggtgccatacttctacanccatgagaggctgttggaggcacctgatgatactgcaggtagcacattgatagagtttgaaagctgacaaagaagcaagaatgaagggtgaatgccannacatgccatca

SEQ ID NO: 24344 - DNA, 424 bp, Glycine max
  Clone ID: PAT_MRT3847_121986C.1
cataaatcgaacaccatgcgtgtgatacaaacgtaaaaggaagtctctttagtcaatccaacagccaaattatagcagctactcttgattgagtcccgacccacagaacctacttcactgctaccacccttgctcctaccttattcaacttgcagggtacctgaattatttaagatgagactggctatggcttacctttaatggtagcaatcatctgtaactgtccaagatgtgtttgcaaaatttgatgatgggcttgaaccatgttgccactaccgtgccatgacatcttagacactcaagaagctgttcacgttcctttgcacgtgcatcacctagacaatcgctgcgtaacctatacttaagagcttgtttatgtcactgtggtgacgattatccaatatctagcgatgtcttaaagagc

SEQ ID NO: 24345 - DNA, 396 bp, Glycine max
  Clone ID: PAT_MRT3847_121987C.1
attatttgaagattaacaattgttcgacctcgttgctgccgcgacaactagagtcgctatctgaactttgtggagctcatatgtatgtaattccctacctgttactgaaatggagttttgaaaaccattcaagtggataaacctcttgcatccaatcgctgggaactgggctccgatcccttcaagtcacgtggtcctgtccctcttgggtgctactggggccccgcctgcctccagcggtctggtggccgaagagataataaagcaacgcgtacaacgctgccacgtggcagatagggttggatgcgtgccaaccacaatctgagtggtgataaaggagaaaataaagcaacgcgtacaacgctgccaagtggcagatagggttggatgcaactt

SEQ ID NO: 24346 - DNA, 520 bp, Glycine max
  Clone ID: PAT_MRT3847_121988C.1
gccgtggagaaaaaagagagaaatcaagaagagcatatggtggtgcctgagtctcagatgaattcccaaaacgaggtagaatcgccgctacaattggaggagcagcaacaacaacaaaacaaaaactcttatttttcacttcctcacaccctcactctctaaatttattttggggtacgcaaggaacgtgtttcgcttaggatcatcatttactagcatttttgggtgaaggtgttgttttcagcaaagagaaaaaagagagaaatcaagaagagcatatggtggtgcctgagtctcagatgaattcccaaaacgaggtagaatcgccgctacaattggaggagcagcaacaacaacaaaacaacaacaacaacaagaaccacccattctcatcactaggaagacaatcttcttcaatatactcgctcaccctcgacgagttccaacacactctatgggagaatggcaagaattttgggtccatgaacatggacgagttcctcagcagcatatggagtgc

SEQ ID NO: 24347 - DNA, 379 bp, Glycine max
  Clone ID: PAT_MRT3847_121989C.1
cttcacaaacaatctggttgattttaatgaaaaaaatcaatcgaaacatttctattcgtacaaaagcctagttacaagtttaaaattaccactcattcccataaaatatattatgcgtgcaattgtgcatatctaataagataaacccttgtctgatcttagggaatcatgaacatttaaaatttgtacattgacctgaatcaatcaacataattacttacaaagatatgttataactcggtaactcaccgtagagcgttcaacgttatagggaaaaagaatttgctgccaaacgatgccacgaaacatttatgcagttatcttcaacggcacaaaaacaaatatgaggcaccagctaggcaagcaaacaggccgatgc

SEQ ID NO: 24348 - DNA, 494 bp, Glycine max
  Clone ID: PAT_MRT3847_12198C.1
taacgatcaagatagacaatatttattagaataattcttaataaaaaactgacaatgacaatatatagaaccataattgcactaaagttgaagatgagaagcagacatggggtggaaaattgggtcatcctgcaatgcagcttccagttctggccacaagatggcagacacagtccatgaaccatcacccttggcacttagcctttggttcatgtaactaactcccaccttttgaatggaagtgtaaactgtccctagcaagggactcccaaatccaaagtcaacttctttgacaggaaacctttgtcctgaggacaccactagggttggcccctcttgacccaacactgcctttgctagcatcaaaccaggcctatgacactcaatccaatcaatcaagtccaagaagtgatcctcattattgacctttgaaattgcctcatgcactgtcttagcaatttctgatatggaggcttccttcagttcttgaatgc

SEQ ID NO: 24349 - DNA, 326 bp, Glycine max
  Clone ID: PAT_MRT3847_121990C.1
cacacaactactacaagtactttcttacaatcaaaaccaacaacaactatggcgagttatcaaaagcactacatgatcagggtccagggttacagtttggcaacgtaaaaaccaaaccgccaaatccggaacccttgttaatcctgttggggcacctaatttaccacccaaacttgttcttgtgggtaccgggatgacatttataagccacatgattcccaccaatgcctacggggtaaaccttggtaaacagcattttatggggggttccaatggggcccttattaaccttcttggaccaccggggggttttatggtgaccccca

SEQ ID NO: 24350 - DNA, 374 bp, Glycine max
  Clone ID: PAT_MRT3847_121991C.1
gtttattttggaggtaatgattccatgggtcctcattcgtctggcttaggccctcatgtgcctcttcatgaatatattgaaaacatgagaaagattctgattcatattcagtggaatttttagtgagctggtaagaacaaatgaattgtgccaaagctactcagaagcttgtattaagctatgcaaggaactggatgtcaaagttgttgatctttttaatgcactgcagaagagagatgactggatgaatgcttgtttcactgatggtatccatttagcagctgagggaagcaaaattgtggttaaggagatattgagagtgcttaaggaagcagaatgggagccatgcctccactggaaatccatgcctactg

SEQ ID NO: 24351 - DNA, 1531 bp, Glycine max
  Clone ID: PAT_MRT3847_121992C.1
tacggctgcgagaagacgacagaagggggatggggagagtggaaggctggaaggtgagatcataaccaaacattttgagatgcgtttcggaaatagaattatcatttaccatctataaccaatccaaactttaaacaaatagcttttattatcacacaaaattcaatcataggctgcatttactccacgagtctatgaacagattcctctgaatcttgtatttttacatccactccctctgcttctctctcttatgctcattcttaagctcgacaactcactcaactaacgttacacagagagagagagagagagattaggagggaaatggctgcacctgcgaggcctctgttcgttctcttcggatcctccattgttcaactcagtttcagccatggtggttggggttctcatctttctgacatctactctcgtaaggccgacatattgttgcgaggatactatggatggaactcgcgacgtgccctccaagtccttaatcaagtttttccaaaggatgctgcaatacagccttctcttgtgatagtttattttggaggtaatgattccatgggtcctcattcgtctggcttaggccctcatgtgcctcttcatgaatatattgaaaacatgagaaagattctgattcatattcagggtctctctgaaaagatacgtatcattgttctcagttgtcctccagtcaatgaggaaaaagtgcgtggaaacactagtggaatttttagtgagctggtaagaacaaatgaattgtgccaaagctactcagaagcttgtattaagctatgcaaggaactggatgtcaaagttgttgatctttttaatgcactgcagaagagagatgactggatgaatgcttgtttcactgatggtatccatttagcagctgagggaagcaaaattgtggttaaggagatattgagagtgcttaaggaagcagaatgggagccatgcctccactggaaatccatgcctactgaatttgcagaagactcaccatatgatcttgttgctgctgatgggaaaactacactgaatccttctgagtggactttttacagagagattcagtgggattaggttgttaggttatcaactttaatcataatcatttgctctggcctccattcaggagccaacctttctgccagatcctgcaggatttagcagtttcatatattatatacgttctgcttagacatgttgagtggttatttggtgatatcattgccctatattttagatagtctttttttattattcatcaggattgttatttcataattcagctgaaagttaccttaatagaatagatccattcttccatagctatctgcaaatttcattagtttcatagaatggtatccaactcctaagaaattattttcatctgtatggaatgtataaggaatgagacataataattcattatttcaaaacttgatgatataagatgagattgaatctgaaaaaaaaaaaaaaaaaaaaaaaaaaaaaaaaaaaaaaaaaaaaa

SEQ ID NO: 24352 - DNA, 588 bp, Glycine max
  unsure (1)..(588): unsure at all n locations
  Clone ID: PAT_MRT3847_121993C.1
gactttctggcactgatgctatggggcaacgaacctgtaacttaaatctagaccaggcgagagtgtgacatgccgacgtcgcgccaggtcgaaaaggattgcttgaaggcagctggctcagtgccctggagtacccctggtcaccttcacccaactaggataatttttggagctcagaggtagttgggctttcgccatcnnttggctcttttccctggcaggatattgcttgccaatccacacgtagatgttaccgctgatcgaggcacggatatacctctcctggggcttcagctgctcctggcggaacggtctgctcaaagcattgaccttcaccttgccggcggtgtcggatacctctgagaggatcactgaattttcctcattcctttcgaactcctgggcatctccccccgcgctatctttcggcacgatgtctctggtaccagatcccaaggctgtgannnatttctgngtgtccatggcgctggaggactgnacgatcatgtcgacgcgcnncctgccnntatnnncctggtctctgatctgattngcccttggcatggccttcagcntctnnannntcct

SEQ ID NO: 24353 - DNA, 478 bp, Glycine max
  unsure (1)..(478): unsure at all n locations
  Clone ID: PAT_MRT3847_121994C.1
tacggctgcgagaagacacagaaggggagacacaatcacaaaccacatcattttcgccactctctctctctctctctgatatccaaataatggtatcaaaggtgaagagaagcccagtgaagtccatcaaggacctccgcaacaacaacaaccgtcgctggcgacggaaaacccccataaaaaatgtggtggcggcttcctccgccgcgctggccaccatccgccgccgtatcacgaaactcttctcgaagatcgcgcgcctcagcaccagcgcccacaagaaaaaagcaacctcctacaaaatcctcaaaaagactacaacaaccgacggagaactcgacaacattcgccgaaccctcgtgttcgacgacaccaccgccaccaccaccaccccgctcctccctccgttgttctccgtccgaaaaacggtgttcctcgacctcgacgaaacgctcgtncactcgcacccctcgccgcc

SEQ ID NO: 24354 - DNA, 358 bp, Glycine max
  Clone ID: PAT_MRT3847_121995C.1
aaacccaaaaattaaacttttttttttttggcctgtggacaaaaaagcaaaaaaatacttggggggttttttatgaacagtaaatttggtttattactcctaaaaacaaaaaagcaacccttttaggggggggcctccctataatctttccttaaaggggattaccattttgaaaagggggttatttaaaggggacaaaattaatacatttgaaacctcttttttttttgccaaaatttttaaacatttcttttaaaaaaaaaaaaaatatttccggggggccctggggggcaattttttttaggcccctgcccggaagggctaaaaattgggttcatgggaaacttttggggcccgt

SEQ ID NO: 24355 - DNA, 289 bp, Glycine max
  Clone ID: PAT_MRT3847_121996C.1
gtcaatccataatgcttaatgacgcatgcacaccggagcaactatcccattgccgatgaaatcacaggaggcctttcttgtacagcgacgggtcgtatctatcgtcagaaggcgggctcacaagtgcaaaaccaactttcttatatcatgccatgctcaacacactgatacccaagcaagatgcgtcaagttaggattttgtctatgtaatgagatacgaatgatgataaggtagcaccagagactgccattaaattttatgctcctgaaatgctgcctaaactaatag

SEQ ID NO: 24356 - DNA, 535 bp, Glycine max
  unsure (1)..(535): unsure at all n locations
  Clone ID: PAT_MRT3847_121997C.1
acaggcccggcatcagcaccgcgcgcgccgactccggcacatccagctggatacgcacggggacccgttggacgatcttggtgaagttgccggtggcgttctgcgccggcaacagcgcgaactgcgaaccggtgccgggcgaaaggctgtcgatatgcccgctcagatcttcactgcccaacgcntcaacgtgcaccgngaccgtctggccgggttgcatatggtgaatctgggtttccttgaagttggccgtcaggtacagcgcctgcaccggcaccacggtcagcaggcgtgtaccgggctgggtgaactggccgacccgtacactggggtcggccacccggccggccagggtgctgatcaccgtggtgtcgtccaggtccagctgcgactggcgggcactggccttggccaccgccagttgcgcctgggcctgctgcaattgtgccttgagcgtgccgatgcgggttttcggccggcgccacgaggctttgagcgcggtcaggccggtgctggcctggccaattgatagttg

SEQ ID NO: 24357 - DNA, 268 bp, Glycine max
  Clone ID: PAT_MRT3847_121998C.1
agctcggaattccccctcttctcggggcggggaaaggccttaaaatgaactttacgaaatatattaggggatgcaacatttgatatttcaagatccaatacccctcacttattcaggagaacaacttcgaatatatcgatatatcggggaataataattgtacatagaaaaaggtaatggtgcatctgaagatatgtatgcatgataatggctttcaatatttctattcacaaaaaaaaaaaaaaagggcactagttctagatcgcga

SEQ ID NO: 24358 - DNA, 429 bp, Glycine max
  Clone ID: PAT_MRT3847_121999C.1
cccacgcgtccgatctaaacttccttgttattcaccatattcagttctcaaatgctattcacagggatgacttggtaagtggtgctggctctaatgctgtagccgttctggctgatgggctcgtagatggactacttgacggaagctccacggacaaggtatccagaatttatctagaaacactgtctttgaacttagctcatggctgcacaagagaaatacaaagctgagatgtcccatgtcatcctgggcaaacattggtgatctgatgaagaattgcacaactgctggagaagacattatactttgctggtgttgctatcgcaatcatggtatgcatcgtcaatggaccaggggagatggctgacgcagactatggctatgctggaggcactctcagtgagattgacctttatgttgggaagactg

SEQ ID NO: 24359 - DNA, 445 bp, Glycine max
  Clone ID: PAT_MRT3847_12199C.1
aaaacccaaaaacctctggtttaggaaccaaaaaggggccatcccttccaggtaccaacaaaaaaaccggccccttctggtcccctaaaaaaaccaaacccgggggtatggaaaccccttttttttttttcccagcttttttaaaaaccgggggaaaacccctcttggggacaaacagcttaaattccccccaaaacctttggcccccctcccccccccatttatttttccgggaaaagccaccttaaaaaaaaggcttccccccaaaaaaccacctttaacatttttacccggttccttacataccccttttggttaaaacatatagcagggccggcccaaaaccggggggcttgggggggcccaaaaccaaaggattccaaggggcaggaaaggcttcccttgggcatctttatctctttgggggaaaaccggggaaccggcc

SEQ ID NO: 24360 - DNA, 270 bp, Glycine max
  unsure (1)..(270): unsure at all n locations
  Clone ID: PAT_MRT3847_1219C.1
gtcgcangcacgcgtacgtaagctcggaattcggctcgaggnnntntcgtagacncactaacgcacntcnnccgggcnntttnagagnatggcntcntatncnncggggggtannggnatagctanncncaaactaaaccgtnantttggganncaattcggnnccntnngnngtcncngnaaggtntntngaatgtactaatatcgcttcatncngatacagaanccngggttntntattgnttcaacacgctctncctncganttagg

SEQ ID NO: 24361 - DNA, 156 bp, Glycine max
  Clone ID: PAT_MRT3847_121C.1
ttttcagctacatggcccaattgtctttgtatctattctttgtttctatcgcgttatgaggaacttgacttggaggaaagagcgtctacttaaaatggcacacaaccttaatattctttgactacctaagaaactttttgttttggggcatatttc

SEQ ID NO: 24362 - DNA, 192 bp, Glycine max
  Clone ID: PAT_MRT3847_122000C.1
cctccgctcgagtgagtgtagtcttaagagaccggccttgtgcagcccaatcgactttcctaagtccaaccctattgagtctgtagttctagagccggaagcccctcacgtgctccatatctatgatagtagaatgcggcgaccacaccacctaggtgcctgcaaagggagaggctggaccgagaaggattc

SEQ ID NO: 24363 - DNA, 435 bp, Glycine max
  Clone ID: PAT_MRT3847_122001C.1
ctaggcgggggccgccctcccattccatttcttctttttattttcaacccaagaaaatactaccgggagggatgacactacaacagacgcataagtggacggaaaagaagattctactgtaatcgcatacaaccaggaaccgaagacgtgtgaattacaaataaaagaacaattcccggaaaactaacaatatcacttgggggtttaaagccattattccataaaaagacaaaacaaaggtttggattgatgactcacaaggcatacatcttatgaatggcaaaaatgggcacagcccaatcaaagatattggcgcagtaagacactgagaaaaagcagatggcactaacaatgttgatgcgactgtgggaatgcactggagagaatgcctatatgggcacgaaaaacaaagttcaacatgctggctctagtgcc

SEQ ID NO: 24364 - DNA, 382 bp, Glycine max
  Clone ID: PAT_MRT3847_122002C.1
atgagaaaatttatcaaaactattaaaaaaagagtagaagaacctaattcaaacaatctaaacaccaccatggccatatatggttggaatgtaatagattctaaggcataaatatatacaaaagagttacagcaaaatctcttaagattgagttatatagattaattcttcaaataaaattcctaagattacgtctagactaaaaacaaattaatttacatgatcagagactaataatatgggatgatataataattgcacataatttcacacagattttgttatcttctgttatctcaacatgatatcattatcccttcaaggtggagcataaattacatattctaacttgcacaacagagaggtgaactgagtgagacca

SEQ ID NO: 24365 - DNA, 215 bp, Glycine max
  Clone ID: PAT_MRT3847_122003C.1
gcgcccgtcttccgtaagctcggattgcgcttagagagatgtgccacacgaacacacgtgatgaaactcctaccttcatgctacgaagtgctcactaaaggcgatcagtgactaccacttttgataggagcaacgtccaggcagagtccgagtattcttgtgaaccatcccccggttgaggtgctcaaacaactcatattccatgcaatgggggg

SEQ ID NO: 24366 - DNA, 331 bp, Glycine max
  Clone ID: PAT_MRT3847_122004C.1
tcccgcccgccgattcgtggcgaagcacgagggggggttgtgatgtgggatatgaacgtgaattaattggggtattgatttccattggaaagcaggggcttttctcttattccagacttgctttcctactttctcacctgatatcttcttcaattactgggctgcccctaaacatcctgaaatttgtgggataactgaagactttgatgaacgtattccacccttattgaatgaactgacattcgtttaggaccagttgggaatcattttatgagaaaaagtggtgagagcacttttgattttattatccgttttacctgccatcccccaa

SEQ ID NO: 24367 - DNA, 268 bp, Glycine max
  unsure (1)..(268): unsure at all n locations
  Clone ID: PAT_MRT3847_122005C.1
aaaccacgnngccccccgcacgtttttcttttcgcgaaacaaacgaagnncaaggggnctggtacaaatggacccggaaccgcgccanaaacaanatatcatgcctaagcacgcgaagccccagctacaactaaactagttaacaggaaaaagcacacgaaatatgggagatcaattaccacacatccacattatacagtcccaaacaacatcagcggtaggagccccatctgagtgtacacaccctacacccgagagagatggacga

SEQ ID NO: 24368 - DNA, 183 bp, Glycine max
  Clone ID: PAT_MRT3847_122006C.1
cattgcacaacatgagcatgtaccaacaacaagggtgagatccaagagagcactcaccggcaacccgtttactagtgagctatagtacgtcaacaacgttttcgacataacgaggctccctactctccaggcccatgttgccagcacaaacctggtgacaagtggaccaccggcctctgtgac

SEQ ID NO: 24369 - DNA, 379 bp, Glycine max
  Clone ID: PAT_MRT3847_122007C.1
cagagggattcatagagtagctagggccttcagtggcatgatcgtggacctcgttgactgcaccgctggaatcacacggggacacataaacccggcggtgacatttgggctgcttttggcgaggaagtagccgttcgccacagggagattatgtacattgagaggcaatgcatgcgtgctatacgagagactgcgcgcagatgggtgtatggggggaaaccaaatacgtgcgttgaattgtggggccaactttgttgccacagataactcaaacggagatcgccatgaggctcagaaagaactctctgtcatgacggactacaccgaagtgtaccgcatcagtgcgcaacgagaggcgagagacacgcgagcaacaatt

SEQ ID NO: 24370 - DNA, 740 bp, Glycine max
  unsure (1)..(740): unsure at all n locations
  Clone ID: PAT_MRT3847_122008C.1
ccacgccgtccgaaacaaataattattatgaaaccaacctaacagaatgtagaaaattttgggggactcaaccgatatgtggcttttccccccgttttattgtttgtatgcttttcatgttattttactcctttaaagcaatgtcctttaaaagaatctcctttccatatgatactatctatttggtaatcactcaattttaaaaattgcaagataacatctcaaagattccctgctattgagtcaagtaactaaccttgtaaagttgattcaaaaatgaaatattacttcaagagttcttttattctttatatcaagtaatgaatacttatgctatctttccttaccaactttattgggtcaagatttggaagaatgaattatttttatcaaattgggatttcatagttatttgcctatatataagtgtaacaacttgcctgttttgttagacgacttaattttgtcatcaaacatgaccaattgaatatgtgattcaaattccatcggaaaaaagttgagaattcatttgtactaaatgagataattaaatcaatagtagtttgatgagagcatttcacaaagagagtggatggcggacatggtacagaactaatcaaaggcagggacaaagaaagagcttcatcatcattntcaacaaatcaatatgattggtggtgatgggatagagaataagccaggaaagtaaatggagcacccatcaagatgcagatgctcat

SEQ ID NO: 24371 - DNA, 213 bp, Glycine max
  Clone ID: PAT_MRT3847_122009C.1
acaaatcctgtttaatgacccttcttgcagcacgcgcacattcggaaaaaggccttgcctagcacgattattgagaacaacaacctatctgtcgagcaccccaaattggatacagaaatgaccgataggctcactttatggtcagaaactccatctagacgatgagccaaaaaattttattgttagccggttcagatcataaaacacacaccc

SEQ ID NO: 24372 - DNA, 228 bp, Glycine max
  Clone ID: PAT_MRT3847_12200C.1
cctaccataaattctagattctctattgctcaaagaaatctatttatgccctcaaactcaattaccacatcgatcttcttccctcttccctcggatctgatgcaaaactgtcaaaaaatggagtcttttcatcgatttagattgtgggtattcgtttttctgtgcttaatgtttcaatcgggaaatgggttttacctccccggtagttaccctcacaagtatggcatt

SEQ ID NO: 24373 - DNA, 647 bp, Glycine max
  unsure (1)..(647): unsure at all n locations
  Clone ID: PAT_MRT3847_122010C.1
gcaaccctcgcgcttccgccgccacactcgtcggagcacactcgccggaaaacactccccggcaaaaaaagaaaacctcaaagactaacccgagtcgttatagtgggttggagtgaacgaaaagaaacaaaggcaatacaaaaagggcaaacacgaatacacgttttcgcaacacgttcttcctcattccccttcttcatctcaaaccctcgcttctgcactctcttccccttcatcgtccaaaacgcgaaccctagtgtgtcgtttcgtgaatcgctcgagcctctttccgaccaccacccgccttcttcggagaaccaaatcgtttgagcaccacgcgcttttcacgcgcagggggagtttgagaagggcttgcagcgctagcttggagcctttctccgacgaagagttcgcgaagaagattgaagatctcgcactcaagtttcagctctctgatgaaaataccaacgcgaacgatttggattcggaggattttcaggagatttctctgtcgncgttgaatttcgctgaggagttcgagccgccggaggagatttttccggcaaacatcgaacggaaagcgaacagcgntgagcttccgntttcgctgaggataatcaagaaaaagctgcagtggaaggaagggt

SEQ ID NO: 24374 - DNA, 213 bp, Glycine max
  unsure (1)..(213): unsure at all n locations
  Clone ID: PAT_MRT3847_122011C.1
cttctgcnccctttctnnatntgaagcgaaaccctagaaattcntcatctttcagaatctggacagttcctcaacngaactnatcttcacanaatctnattatcaanngaacncatcccancaattccgnacgatcctcccaattcccatgcgggttncgggngacgatantgcgatcgctagggnangtggtacgagggagtcncanaacgc

SEQ ID NO: 24375 - DNA, 2794 bp, Glycine max
  Clone ID: PAT_MRT3847_122012C.1
tcagcacgtgacattcacgtgaatggtgaggaagatctaacacgaaacctcggtggcttttagttttccacgtatacgtactagaaggaaagttacacaaggcaataaggcacataacaaacaataaaaaatgagattttttttttttttagctaattgaatcttgtgtagcttgtgatttcaatttaatttacatgtgatagttagttgttgtgtgttattgacatttggtttatggtttgaacttttgaaccccctgggccgaattccgtccgcgggctcgcgcgcaaccctcgcgcttccgccgccacactcgtcggagcacactcgccggaaaacactccccggcaaaaaaagaaaacctcaaagactaacccgagtcgttatagtgggttggagtgaacgaaaagaaacaaaggcaatacaaaaagggcaaacacgaatacacggttttcattctttcaccactcttgtttccttttacgacgtcgttatggaactcaagtttatgcagttttcgcaacacgttcttcctcattccccttcttcatctcaaaccctcgcttctgcactctcttccccttcatcgtccaaaacgcgaaccctagtgtgtcgtttcgtgaatcgctcgagcctctttccgaccaccacccgccttcttcggagaaccaaatcgtttgagcaccacgcgcttttcacgcgcagggggagtttgagaagggcttgcagcgctagcttggagcctttctccgacgaagagttcgcgaagaagattgaagatctcgcactcaagtttcagctctctgatgaaaataccaacgcgaacgatttggattcggaggattttcaggagatttctctgtcgtcgttgaatttcgctgaagagttcgagccgccggaggagattattccggcgaacatcgaacggaaagcgaacagcgttgagcttccgttttcgctgaggataatcaagaagaagctgcagtggaaggaagggttcagagaggcaggggaatccgcgtattgctctgtcaagaaagcgttctcttctatggtttttatcatcagggagcttcacagtttcactatgcagatgagggagtttttgttctacgaagatctgcaagggattctcgaaagggtgcagaacgaaatgcacgcgtccttcgtgtggctgttccagcaagttttctctcacactccgactctgatggtgtatgtgatgattctcctagcgaattttacggttcactcaatggggaacaacgccgccatcgccgccgtggctccgccgccggtaacatcagtcgtggaggctcacgaccaaaggggtcatattcagagtcataacattgattcctcttccatcaagacgttctctgtttcgaacggtaaaaacacagcctacgtcggtggaggaaatggcggcggcgggaaggtccgtccggcggggaatggaaccgatggggacggccggttcgacaggtcgcgacacggtacggtattctccgacggcggtgcttcgtcgcaggtatataaaacaggggataaaacagagtcagtgtcagggcaagaggaggaggaagagttgaatctgtggaacgcgatggtggaagaggcttcgagaatggagggtttggatcgcgatgttatgaaacggttcgtttcgccggtgatggcgagaattgaatccgatgactatgcagagtatctgagaacagagcttgtgtaccaaactgggttgtctcaagaccccagcaacactctcctccttgtcaactatgcccagttcctctacctcgttgttcacgattttgacagagcggaagagttgttcaagagagcgatagaggtggagccaccagacgcagaggcatataataaatacgccaagtttctatggaaagtgaagaacgatttgtgggctgcagaagaaacctatttggaggctatttcagctgatcctgataacgcattctatgctgctgactatgctcattttttatggaacactggtggtgaagacacatgcttccctttatcctccccagacaactccaaagaagtttaatcaacaaaaacaaaatcaaattgtagaaaaaatatagagaagaaaagaaaagaaaagaagaaaattttgtagcttatattttttttttcatgttacattttttcattggggtggatgagatgaagagccacgaagggggggattgggaatgtaatcaatatgattattgtatcacttttgtaattataagtgtacatataagtcttaaaatggcttcttcttagtttaatgggcacatgcatgttcatcttagagtgagtcttgaattagttatgcacagttttaattctaaataaactatgtgaatgaaatagtgttattagaatttgaggtgatgcgaaagaaataaagaatgcttattgcttggcacgttggcaacaaacggcgatgggtttcacttggagtgtgaatctgggaaggaccaaagattttttggtcatgagtcaatatgacgggttaaggaagcaagatttgcttttgcacaattattagtttattaccatccttatctttttctttctttccatagtagaatcacatggtatatgtaattgatctttattgtgaatatgatgccgttatttgctttttgaaaaatttaaaatgctttatgaattggcgactaggggctcattattcacgtgggatatgagcctttaaataatttcctctgttgactttatttattgaaatgatatgatttgcttatgtaagcggttttgt

SEQ ID NO: 24376 - DNA, 133 bp, Glycine max
  Clone ID: PAT_MRT3847_122013C.1
attttaccaaaaatcaaagctattcctcagctccagggctacctgcgatctgtgtttgctctgacgaatggaatttatcctcacaaattggtgttctaaatgtcttaagaacctaattaaatagctgactacc

SEQ ID NO: 24377 - DNA, 391 bp, Glycine max
  Clone ID: PAT_MRT3847_122014C.1
acttaggcttgcactttgattctgaggattcttcaatcatgtgtcccaaggtaacaaaaccttgcatatttgcctgtgaatggagagatgggtgaggggaacttttacagatacattatacatggtgtacaacacgttaaaaaccatatcaatcacccattggacaggttgagaagaaacatcatgcacccgattacaggaggaatttgcccattttacatcacatacatggtacattattgttttctaaccaacatactgcctaaaggggggtgcgaggaagaaaattgtcatcaaccactgctgcactctccgttcttctacttgcaaaaagggttataagaacctatattggactaggagagtgctccggcgttgcttactgaacaag

SEQ ID NO: 24378 - DNA, 749 bp, Glycine max
  unsure (1)..(749): unsure at all n locations
  Clone ID: PAT_MRT3847_122015C.1
gaattcgagctcggtacccggggatcctctagagtcgacctgcagatatatctgcaaaggttcaagttacatttattctaactgtttagatcattatctgagagttaaagtctttaatgagttgtgcattttttttatatgtatgtatattttgacttattaacatatatatatatatatatatataggaaggaagtcaagaaactgtggccacaatgattggcatggcactgggaatgcttgttgctcgccttaccattggacacccactagccatttggttttcttttttatctttgaccgtgtttcatatgtatggtacgtctctaaattgtaatgagattaaatttctattgttacaaagcttgagcttattgatgagattgtaatatattacttcctcaataattgaaaacattatctgttctcctaaaattaatcccattttatttgagaagttagagagctcatattttaatctgaaggtatatgcctgcctttttttaagcatagttcccttcccccaaaatacaccggctaaatagcaccagcattgtataagaaaacctgatnatacaaatgatgtcctttttccatgcagcaaactaccgagctgttcaatgactcacattgaactcattaaaccctgaaaggagctctattctttttcagcatttcatggagactgcccaaggtattgtctgttaatctgtttccattcttcattgcttatatncacaatatatctt

SEQ ID NO: 24379 - DNA, 104 bp, Glycine max
  Clone ID: PAT_MRT3847_122016C.1
ggctcgagctctatggcattttgtgcaacagtcgttcttactcgaaacctgacgggtgctagacacgacatcattcactatcccacttgactggcgaacggact

SEQ ID NO: 24380 - DNA, 245 bp, Glycine max
  Clone ID: PAT_MRT3847_122019C.1
tctctctctcccttgattttggtacaaggcacaaaacaaagtactctttcaccaatcaatgaaaatcaacttaaggctccaagaaacagaaaccccaccttccatgaacaactccccaagaagcaatctgagcaacaacaactgcaccaataataatagcattggcctccaaatccccaccacaccaaaaaccattcccagatctgactccaccaccaatccttaccccaccacctttgttcaag

SEQ ID NO: 24381 - DNA, 525 bp, Glycine max
  Clone ID: PAT_MRT3847_12201C.1
acgcatgtatatgatcgacacatacatcacatgaacaatggaaaacggagggacatatttgcatatgacgaatttattaaaccatacttgcacatcagatggactatagaaatgccgtgcctcaccctggtagtaaaaaaccgtaaaaatgtcgttatctctgcctttccaatgaacttttagtcgataatgcatatggggtcctagagatgtatcgcacatgacattttctggatccgattcaataggatgacccctagctgtataggggcttggaccaaaccattcttagcattagggcgattatgttaaaagaacacctgcggctttatcaagcttacgaagaagcatccctgctgcaatatatcgtgagagctccagctcaatgaaatcctatgtcactccaaaggcttgtgccatggctacgatagacacactcttgtaagatcccaagagtggtgaatagagacccgttctgaccttcctcatggaatataagaagtgaggaagcttattgcggtccaa

SEQ ID NO: 24382 - DNA, 683 bp, Glycine max
  Clone ID: PAT_MRT3847_122020C.1
atcaagtcagtgaaaagatctatcgtctttctcattcatctgatttaaagtgagttatatcattgttcagtaaagaggtgggtaaatggaaaaacgtagttacctataaaaatcagctttctaaatgtaagtgtgagaagaaacaccgaactctacaaacatgactatatgagatattacagcagtttaggtgaattgttccctgctgaaaaagtgttctcctttaaactcttgctcaaccaaatggcagtttccctcggggaagctttccctggcccaaacggttttaataaaactcctagttctccatacctttcctgctgtagtaatcttgcactaaattcaagcaaaccttctaaggcctcagccctttgtcggaatgatgatgtatcaaactgtcggcggcgcaagtctgaagagttgtggcttgatgctccagtagttgcattttgatcagatgagccacttttatcctcatcgtttttcttgaacatgctgcgcttgattccctgccaagcatccgtacatcctggcctaacataggatgtgtcacataccttgattgtgcatttgtctatcaaagttgaatcattgccacaaggagagcctgcggaaccctgtgccgagttttgtgaaaaactattgatgggaaacaaattgatcttcatatgatgctaatggga

SEQ ID NO: 24383 - DNA, 517 bp, Glycine max
  Clone ID: PAT_MRT3847_122021C.1
tctttaacgcttgctatgccggagctttactgaacttcgcattaatggcacgtgaaagcggttgaataaggccccctcgatgtaaaaccaatggaatgggttccacgagaagaaagaaggaaaattccgggagacaccaacctcaaacgacttaaagctccttagcaccctgccaacatatcggggtatcgaccaggagcgtatagatgaggtcaataagctgatggacaacgtagttgtccattggttaaatccgtgaggcgagcattacattgctgttaatacttggggtgacaggggttttccaccatctaatacgctgcacgatatactcccttgcctcctgcaccaatcatgacctgatatctcggaaaacctgcgtaagctagctcgccatatacagaagcatacttttgaatgacccgacggttgatacacagctcatgacgggaatgatgctgacaaagacccggagctggtgccaggccacgatttggagactgccgctgatgaaacc

SEQ ID NO: 24384 - DNA, 1298 bp, Glycine max
  Clone ID: PAT_MRT3847_122022C.1
aagagatatatgataatcatatgatatatatccttgtatcagccgtcacaactggtgaagaaaaatccaataatacattaagagaagaacaaaatttaagagaccaaaaaaaaaaaaaaaaacaggtagaaaatttcaacatcttaacaaacaaaagttgggaagaaattgactgaataatactaatattctttgcatgtatagctgcttttttaaccggattgtacttcaccaggtactgcaatatgtgttgttttctcaaagactgcaacaaacaaaactcattctaattcctcttgtccttctgaagggcattggattaactctaatatgttgactacctcagccatttctggacggtttgatggcacttgtgatgcacaaatcaaccccaattttatcacaggaattgcttcctctgcagcaaagttaccaaggagcctcccatcaacacattgctccaccttgccttcttccaatgcacccctcaccatgtcacaaagaaccaccacatcatcctccatgtactccacaggcctttttcctgtcacgatctccagcaccaggatcccaaaaccatacacgtcgcatttcttggttatcttgactgtgcggcaagcaaactcgggtgccatgtatccgagcgcactttggattttgctgctcaaaacacaatggtctagcatcggcaagagtttcaccaagccaaagtctccgaccttcggctcgccagaacaatcaatcagcacattggttgatttgagattgtagtggattatgttcatttggtgcaaatgagccaacccttttgccatgccaagaataaccttgaacctttgtggccatgagaatacatttttgctgttatcatcatgtagaagtttatgcaaactcccactggataggtactcataaataaggagctgcaaggatgaagtccaataataaccttcaagtgccacgagattcgggtgcttgacattcccaagttttttaatttctctatcaaagtcttcttgggacttgatcaaactggagactgtgagcttcttgattgcaaccgcatgcccatcacgaaggaaagttcgataaacaactccaaatccaccacggcctatttcactttctttattgagaagattatgagctccatcagcaaagtctgcatcaccagaaaacatgacaagcttgccatagtttggatcatttgccggtgagcagctatagtcctcaccaccagaaaatgcaaaaggagcagctgaatgttccattgaggaacgaacgtggacggacgcgtg

SEQ ID NO: 24385 - DNA, 542 bp, Glycine max
  Clone ID: PAT_MRT3847_122023C.1
gaacagcttgagaaggtctcttatagcatgcgcgtagtggttgcactgtctccaatatactgattaatatcaccagaacggtattccgcaaggctcatcattacgtgacccataacttaaacttcctgcggctatctactggttcgaagaatctcacacccctacttatttaacatcgtgtctatgcctatttcctcgaccactctcgagcacacactcacttcaagcagttacaaaggaacatgaaccgtctaacttctccacttgcagaacaggggcctctatgaacacgaaaatgctagtatatttttccgtcctgcacttgctacgggggatctatatgattcaacaagactttcctcctatggcctccatcctaacttaaaggattgtgactgcctaattcctcttcacgttaattcaaatgaaggtgtatacttcatggcagctgtgcctataaaaagccgattctaacgtaggtactcgagacagatgcagatatacgcacattgatgatactcggatggatggtaacaagaatc

SEQ ID NO: 24386 - DNA, 309 bp, Glycine max
  Clone ID: PAT_MRT3847_122024C.1
tcttcttctccggctaggattctaaaagacacgagggagatttttctcaaacatgagcgagtgtgagcgctagcgagagctagagagcgccagcgagtgatgggaacagctccatgttgcgacaaggcacgtgaaaagagaggtccatggtcaccacaagacgacacacaggtggaggagtacatagagaaacctggatctggagggaactggattgctctctcctcagaaagcttgacttaagagatgttgaaactgttgtagattgagatggctcaaatatgctcatgccttacattaagcatggag

SEQ ID NO: 24387 - DNA, 291 bp, Glycine max
  Clone ID: PAT_MRT3847_122025C.1
ttttggggttttttgtggtttttttttttttggaaaaagcaaggaacattaagtggggttcggatcacaagaaattccattatctgaagggcttgccagacacaaagctaaaaactgtaaaagggcatttcggtctttgaggctcactttccggggacgaggggggggggataggcccagggcgtggtggttgacaggggcagcaaggggagtcggggaggggtctccaatggaccctttcccgggacaatgggctgaacaaaaaacccaaacatagagaacgtggggcaa

SEQ ID NO: 24388 - DNA, 268 bp, Glycine max
  Clone ID: PAT_MRT3847_122026C.1
aaattagcctcgagcaaaaatttcccaatcccttcatcaccttgccctaatcactttttttattctcacaaccacctcccaccaaagaaggcatttaaaccagcctatacggtacatcacattacacctttctaataactctccctctcacccttctaaccaaaactaaagaacctcagtttcaacccttgattactatcacttccactctcttcatctcactacaactatttcccatactctccatttctatctattttcaacaaac

SEQ ID NO: 24389 - DNA, 415 bp, Glycine max
  Clone ID: PAT_MRT3847_122027C.1
ctcgcggacgcgcgggcggacgcgtgggaccgacagctagaatggaatagcgacgctgaggcatctgtttgaccatgctgtgctctcttgctctcgcaggagagagccatggccatgcatcgctacctgaggaagatgatggagaagatgactggccaaacactgccagtcccactgcactgcgagagcgaataaaggctctgcgtggaggtgctgaaagcgacgaactgcctaagcgaagcgacgagacacagaacccaaagacattcttgtatacagaagaccttcattcaggcctgacactgaaagtacaatgcaccaagcgtgcctatgcacaaccttatggtgtatatacatggtgaacggatattaaagacacctgtaaagaaggatatagttaggaagagatatgcat

SEQ ID NO: 24390 - DNA, 172 bp, Glycine max
  unsure (1)..(172): unsure at all n locations
  Clone ID: PAT_MRT3847_122028C.1
accagatnntcgacaaagttgtggttcnaacggagggacagtgtttgtactttggananaggaagcgacgccatgcgacactttcagtcggtcgggttngcgccgncttttccgatgaatccggctgattttctgcncgatctcgctaacggtgtntgccatgtcgatggtc

SEQ ID NO: 24391 - DNA, 297 bp, Glycine max
  Clone ID: PAT_MRT3847_122029C.1
ggaaaacaggttctgaaccatccctagacatattttatgcacctagactgtcttatagttttcataactacagggtttatcaagttcctccaaaactttttacctatcgcatagatggaaactgcaaacttccatgatttcatgctagacctttggcccaaaatactttaaagctccaatatgattctaacacattgcaaacattactgaggcaacatgggcctttctttcatcaaaccgattgtttatctttgtaagcacactctcataggtatgtaactgaacgtccatcttggt

SEQ ID NO: 24392 - DNA, 331 bp, Glycine max
  Clone ID: PAT_MRT3847_12202C.1
gccctctatctttttttcccttttatttttattttcttttttagggtaaatatgactcactatttacttcggggaagatctttacatgggtccaagccccaaccttttaatttcatatctacactctattgagtttacatatttaaataaaaacattggttggcttctataatccataccgataacaaaccccaccctttttcaccaaaatccacccctcatttatacaattaattttccactcctgccttcaaccaagtgaagactctcctcaaaatgttcaaacagtgatcatcgtttcctttccaataaccacactattggttgattt

SEQ ID NO: 24393 - DNA, 277 bp, Glycine max
  unsure (1)..(277): unsure at all n locations
  Clone ID: PAT_MRT3847_122030C.1
acacaagannacagagagagtgttagtntaggaaatngcgaagtnattcattccattgctatnaagttccttcaatctctaattgctcaatcccgttatgtaancgcgtaccagggccactgaatcgggtctcggggntcngattcttctnggtttncacggaagagtattcnnagnaaccntatggaanacanngttgtctgngtanancactgtttggggttctcttcactgcnacaaagaaggantntcnttncnggggggtttcnnnnatnna

SEQ ID NO: 24394 - DNA, 244 bp, Glycine max
  Clone ID: PAT_MRT3847_122031C.1
acccattcgtacggccactcatacgtactgttgcgagattttttttaaagggcccataacatctcctgcgagggaataaaacccaatggatcttaattcctctccttccaacaacacattcctcttgaatggaacaatccccgtttctttcacgttcgcaatctccacccagcacaaaaataacccttcgtcgtctttcatctacgactactcctatcccatcaacctatccacatgcatccac

SEQ ID NO: 24395 - DNA, 690 bp, Glycine max
  unsure (1)..(690): unsure at all n locations
  Clone ID: PAT_MRT3847_122032C.1
cccatcagcagcaggtgcatctgctacattagcaatagtgcttcagaagaatgagatgagaactgtctaccatcaccacccctaccacgccccctacacggtggtgnattgaatcggccacgaccatagcctctaaatgatctaccgcccctgcgacctgcacctctgtattgagatgtcccaatcagttccctgggcaccccgtcaaggttccccacaagctgcgccagagctccggctacaaccgccaccgccgccgggttgatggaaccgggaaccgtcgcagcctgtagcgggtccggcgcgtgggcttgcgagggttcagcagaatgagactgttctggggctattggggtcgagttagggtcttgttggaattggggttggggttggttatcttgtgcgtaattatagggataataaggttgtgatgattgatcatacgatggagtttgagtttgagatgggtcgtagccatgttgttgttcttgttgatattcgtagcctgaagaattcatggctgcaaaaagagagagatgttgttgttgtacagtgaaaaaaaaaatggctaagatctggtggtcacagacgcggctgctaacatctctgttttcttgtcaccgccccctcctaggtatttcactgtgcgcaacagtgggtcggacgcgtgggtcgacccgggaattccgg

SEQ ID NO: 24396 - DNA, 290 bp, Glycine max
  Clone ID: PAT_MRT3847_122033C.1
gtgatggagaaaattgtgtataaagacgacgagggcgcaggaactgaggtttgtttttatatccaaattgcagaacctgtaataaatcatttaaagccattggtcctttattattcattctttgttcaatacttttaccacgtcttgattgtgagtatcgaggattattcatgatcacaaagcatatgccaaactcagatgaaagagttatcaaattgagcatttgccaaactgaaatgcaagtgttatcaaattactatacttgtgatgatactctgcggtaatgtatg

SEQ ID NO: 24397 - DNA, 178 bp, Glycine max
  Clone ID: PAT_MRT3847_122034C.1
atggggggaaaggaaactttattattattgtcttttaaaagataaaaataattcttatatgtataaattagaatcccagtgtcatacgattattataggcacatccaaagcaactaggaatatatataatcattactcacattgacataaatataacgaccggctttggacaacccca

SEQ ID NO: 24398 - DNA, 467 bp, Glycine max
  Clone ID: PAT_MRT3847_122035C.1
tacggctgcgaaagacgacagaaggggtagcgtctacccagacttatcttccttcaccggaagtggcgtctacccagacttatcttccttcaccggaagtggcgtctacccggacttatcttccttcaccggaagtggcgtctaccctgacttatcttccttcaccggaagtggcgtcatccaaatatccgtagcctgtatcaagcgatccgccccgtaaggttcacatcatctggtatcagagcttcagctcttgatacaggttctatcctatcctattattttctttttaatttgtccaggttcgtgttttgtccttgttctgttatttgcgtttttgtttatatcttgtttcgttcttgtttgcgtcttgtgttctgttatttgcgttcttgtttacatcttgtttcgttcttgttcttggcacgttcttgttcttggttcttgggtctttcacactttggacc

SEQ ID NO: 24399 - DNA, 366 bp, Glycine max
  Clone ID: PAT_MRT3847_122036C.1
cgctggttttttataagatacagaagggggactgaaaggaagtttcttcacaagcgagaagtgaaagagagtatatgtaccggcgacaacctcgccatcagtagagtgggccagttacaacctattgagaaagcccatagaacgtcgtctatccatatatgagtaaggttatgagatagctaagatcggccacatgactctaataactactaataaacgcacagatgcttactcttaatctgcctaggtagttatgtatcgtttgactatgtttacacatgttggtagataccccactttatatttctgtctgagttggccactctgtacatatgcacctgctacattgaacgacgtggttaaagt

SEQ ID NO: 24400 - DNA, 1223 bp, Glycine max
  Clone ID: PAT_MRT3847_122037C.1
cgcttttcggtttctttaagtcaatcttaagcagtcatcttaatattatctctacacttcagaaccaacacaacaacatcaatctctttctatagatatatgttctgagtctttggttttacgcaaccttctagtgtcactcaaaacaaagagagaaaaactattctcactttaagtgattgattgtgtccatattcattgtttcagcatcaacaatgaggcgctacttgtcaaaattcattcattacccaattggctttaatccatcaaactcctttccgttgaattgtgagatggggtcctactgtgctgccagaagtactaaccgtcaagcttcattcagtggcaacatgcatgaatatgccacaagagcttttgcaacaacatcttgtgcttcattgtctgaagatcaaccaaaggataactctgtctctgatatgttagtagattcatttggaaggcttcacacttacttgagaatatctttaacagagaggtgcaatttaaggtgtcagtattgtatgccagcagatggtgtggaactcactcctagtcctcaacttttaacaaagactgagattctgcgatgcgcaaatctgtttgtaagctctggagtaaacaaaatacgtttgaccggtggggaaccaactattagaaaagatattgaagacatatgtttggaactgtcgaccttgaagggactgaagacattgtcaatgactaccaatggtattgccctggcaagaaaacttccaaagctgaaagaatgtgggcttaattctgtaaacattagtttagacactctagtaccagcaaagtttgagtttatgacaagacgcaaagggcatgaaaaagtaatggattcaattaatgcttccatagaccttggatttaatccagttaaggtcaattgtgttgtaatgcgtggatttaatgatgatgaaatctgtgactgtgttgagttgacgcgtgaaaagccaattgatattcggtttatagagttcatgctctgtgatggaaatgtatggaatgtcaagagacttgtaccctactcagagatgttggataaagtgatgaaacggtttacaagcttagaaagagttcatgatcactctacagatacagctaagaatgtcacaatagatgggcatgaaagtaggagttcatttatcacatcgatgactgagcatgttagtgctggatgcgatagattgcgactacta

SEQ ID NO: 24401 - DNA, 350 bp, Glycine max
  Clone ID: PAT_MRT3847_122038C.1
agttgaaaatatcttttatctcggaataatagaaaacaaaagcttacgtgatatgcacaaagggaggttactacatatcatactggtacagatggcatggcactctaaaatgcatgcaacagggaacactatcacttggtcacatacaggcccccatggagaaccataggaatcaattctggtatggaagaaggaactgtataaagggactacggctcttggtgctaatgcttagaacttgaagctaacagtcatgcaagataacttcccttcataattccaaggaactttgaaggtatcactaagggcaaatgcttaaaccatcgttgagccatgacaccaataaatgg

SEQ ID NO: 24402 - DNA, 2192 bp, Glycine max
  Clone ID: PAT_MRT3847_122039C.1
gtcttgttgagaggttgaagaggcgggagtaaggttcgcaggttgtgtggtcaaaggaagcaacgttttcgatccatcctccgttaccgcaatcgcacgttccctccatttcttctcctcttcttattctatccacattcacattcacactctcttcccaacccaataacaaacaatggcttcttttcttcttcgccgcaaccgcaacctattcgctcgctctctactcggaaataaggagccttttcgtccatactttcagttaaagtttctaagtttaggtggtgctgcaaacaaggtgcacccatatagcagcagcaatggtcccatcagaaatgattttactgatttgacttgccctcatacatggtatccacaggcccgaaggaaacatcgcagggttatcctgcatgttggtccaacaaatagtggtaaaacacatcatgctttgaagcaacttgagtcaagtgcttctggtgtatattgtggtcctttaagattgttggcatgggagatagcaaaacggttgaacaaggcacaagttccttgtgatctcattacaggtcaggaaagaggggaagttgacggtgccaatcataaggctgtcacagttgaaatggctgatctatcagctgattatcaatgtgctgttattgatgaaattcagagatagggtgtactacaaggggatattcatttacacgtgctttattaggaattgctgctgatgaacttcacctttgtggtgatccagctgctgttccccttattcaggagataatgaaaattactggtgacgaaattgaggttcaattttatgagagactgtcacctttagtcccactgaaggttcctcttggatctttctctaatgtaagaaatggtgactgcattgtaaccttttcacgtcaggagatatacaaattgaacaaaagaattgagaaagaaggaaagcatctttgttcagtagtttatggatcactgccaccagagactcgaacaagacagaatttgccgagtttaaagtctcgtttgctccgctggcaagcatgttcaatgatgcaagtagcgagtttgatgttcttgtggccagtgatgccattggaatgggtcttaatctaaagccaatggctagaaggttggcttccctgaagatgtccggccccctcgtggcccgacacctgacggtacccctgatcaaacatattgcagggagagctggtagatatgggtcaaattttcctgtaggagaagtaacatgcatggatgaagaggatctacccttgctccattcatctttgaattctccatcacccattttagagcgtgctggcatacttcctacctttgatctgatgtatatgtattcacgattacatccaagaaatggtttctatcaaatactggcgcgggtgttttttgtttatgcttgtgcctggttcttgaaagtggctgctgtaattgacgagcttccccttggattacatgagaaataccttttctgtatcagcccagctgacatggatgatgaaatttcatctcaaggcctagcacagtttgcagagaattatgcaaagaaaggtcttgtccggcttcgagaaatatttacaccagggtcactcaaagtgcccaagacgccagctgctctgaaggagttggaatctatccacaaggtgttggatctgtacgtttggttgagctttcggttggaagaatctttcccagaccatgagctggccgcatcccaaaaggctatttgcagcatgttgattgaggaattcctagaaagactcgggtggcaaaagccaatggctagaaggttgccttctcataaaatgtcaagttctctattatcccaacacatgaggaaacacctttaagtgtatgtttggataaccgattgcttctacgtctttcttgaatttggcgtgaaaataacaaaggaggtgagctgggaaggtgtgttaaaaaacactaaaagttattcccgtgccaatgccacaacccacaaccccgtgttcagcattatacaagtttcactaacaagattaaatgttgtacatttttaggttattttctaccttttctacgtcttaagaggtttttatcaggatatgtttatacacattctataatgcttcatctaaatgattattgattaatttttttccccgaaaaaaaaaaagggcggc

SEQ ID NO: 24403 - DNA, 356 bp, Glycine max
  unsure (1)..(356): unsure at all n locations
  Clone ID: PAT_MRT3847_12203C.1
attttaagcgtgtgatatggcgtatcaagtagtaaaggggagacgcataatcaatcaccacctgcgttaccactttgatttcttcatggatcaagcaagtcacaaaggactcaatttgtttgatttttgtttaattttttttaaaattaaaattgagttctggtcattgagattttttttttgtgttccataaaagaagctccttttcatccttttttgttaatgcccaggtggagtctaatgatggttcagctatagtagtcacacctggtgaatctatgacagaggctctgaaaacaaattgngagatgtgtctgattttaattgcaataattcctatgacacatgagttttac

SEQ ID NO: 24404 - DNA, 900 bp, Glycine max
  Clone ID: PAT_MRT3847_122040C.1
cggctgagaaaattgcgacgcggaaacacgcgcatcttcacgatcctggaatccaccgcggcgtatccagcgattccgatctccgacgagtctgcgcaggcgaagaatcgcgaggccagccgccggtgaagaatcgcgcgatttgtctggaaatcgcgattcagccacgattcatccccgatactgagactcaaccacgattcaggaagaaaaacgagacaacctccgattcgtatcggtagcagttggaatcatatcgaatcgggcgatacatatcgtgaatcgtacggtgtgtcctaaaaatggcactggttgtaatgtgtgggcaaccatgcagtggaaagtccaaagctgcagtctgtctcgccgggcctctcaaagaatcagaatcaaaacttcaagtgagaatcatagacgaagcttgttttcatcttaatcgtaaccaaagcttcgcgaatatgccttcggagaagaatttaagaggggtgcttaggtcagaagtagataggtccctgtctaaagatagcatcatcatagtagattctttgaataacatcaagggttaccgatacgagctatggtgcttggctcgagcagcagggatcagatattgtgtggttttctgtgatgttgaagaaaccatttgcaggaaatggaatgaagaacgcagggagaaaggagaagccaattatgatgattcgatatttgaagatttggcaagaaggtttgagaaaccagatagaagaaaccggtgggattctccattgtttgaattatggccacacagagaagcaacagagaaatcttcccctgctgttgtagatgctgtctcctacttaaccaagaaagtggactccaaaaccagggatgttaagatactacaaccaactattgcaactc

SEQ ID NO: 24405 - DNA, 477 bp, Glycine max
  Clone ID: PAT_MRT3847_122041C.1
ttttttttttttttttttttttttttttttttttttttttttttttttttttcccaaaaaaaaaaatagggaattagaaccccaagccccccggggaaacccacaggttttaaaggaaaaaaacttaaaaaaaaggccaactacctcgattaaaaagggtttttgggcaaaaaaaaaaacagtttcttggggaaacccaaactcgggggtttttttcccggcggaaccattggctcaaaatggacaaaggcctagggcctttcttgggttccaaaaaatttttggcaaaccaaagggggacccggcctaaaggctaactttaccgtggcccgaaggggggaaaaccctttttttggtttcatcggacggccaaaaaaaaggtccccagttaacaaaagaaacaactttaacagtttttctttctttctttaaacccccaggggggggggggggattttccatctaaaaaccggttcc

SEQ ID NO: 24406 - DNA, 432 bp, Glycine max
  Clone ID: PAT_MRT3847_122042C.1
cgagtgcaagttccgagttcttgcactccttggaccaattcctcgttttgacattcattcccagaaaacttttccacacaccaaattccaaatataccaaaattccaattttcgcttcacaaagaacacaacacaaacatgaagactcgcacctctgccaaaatctctgcaacatggattccaattttctctgtcttttccttcattattggtatgctcgtcacaagcaggtctcttcctttccctctcttctctgatatcttaacttttcaaattttgtatttttttatctgtgaagttggaaacttgggtttatgggttttgatttgaaaagaatttaaaacattgtttttggtccgatcctggaaatttttctttggggtgcaagatgtgggacccaccagaatcaaacgggttgcttcttgcgcagca

SEQ ID NO: 24407 - DNA, 346 bp, Glycine max
  Clone ID: PAT_MRT3847_122043C.1
aggggaatttcccaaggggcttaataccccccccaacttgtgccaacccttaggtcaaagtataaccatccattccaaccttccccccttccccctcaacccaaacccaaacccccaacccggttccccccccgtaccgttcataaaaggaggaaatccaaaaaccgaatctagaaaacccgttccaaaacttgcggtaattaaaaaggaagccgcaacaaaggctaggaaacccgccggaaagggaaaggcaccgaaggaccctataagcccaaaaaggctccaaattgcttcctccgttttcatggaggatttcaggaaggtattcacaaaagagaatcctgaa

SEQ ID NO: 24408 - DNA, 118 bp, Glycine max
  Clone ID: PAT_MRT3847_122044C.1
cacatttgtagcagacaacataggttaaaatgtggagcagcattaaataacaattacgctatctattatcgttatcatgtaataaaaacggattttggcttatgccagcttggatttt

SEQ ID NO: 24409 - DNA, 246 bp, Glycine max
  Clone ID: PAT_MRT3847_122045C.1
tttttcacaaccgccgacgcaacggggaaagggggggactaaaaaaggaaaggggggggtacaaacccacaaagccgcgagggggcaggaccaacaagcagagagggcaaaggagacagccccgcggggcaaaccgaggcgacgacgaggcctgacagaaaaaggcacgcccgagaggaaagccagccacatggagcaaccaaaacgacgagggagcgaggcaacggagggaaccacacggaagaa

SEQ ID NO: 24410 - DNA, 318 bp, Glycine max
  Clone ID: PAT_MRT3847_122046C.1
ggctcgaggttcacttctagctcctcatggtagccctacgcttcacgcttacatgtactcaagaagaacagcttcactttaagacagacctcgattgatggacattgctcacttccaaacaatgaggacacgtattgggcgttgcaagaattcgacgcctacatagatggcgcggcttctcttgaagagctccagggtggtgcgcgggccctgcatggggccattggggaagctgaaccagggactgcgttctgggtcatggacactgacgatgacggtttgattgagctgaaagagttgacgaagatgctcaatgaa

SEQ ID NO: 24411 - DNA, 289 bp, Glycine max
  Clone ID: PAT_MRT3847_122047C.1
ctgcacgtctactctagatgatcctcgctaattcattcccattctcagaataaggcggcaaaaatgttcatatatgaatcgcaattatttgtttgcttattaggcctatcctgaagccaaaggaaatgagatcggaattcctcggggaattccaatttcacattttcaagaaattagggggccaaaatggtcattttttaattggaattatttggtttcttattaagccctttctgaaacccaaagaaatgaaaaccggattccttgggggatcccaacttcaaattcc

SEQ ID NO: 24412 - DNA, 251 bp, Glycine max
  Clone ID: PAT_MRT3847_122048C.1
gttcttcaaccacaaagcacaaacccaaaaaatgtaaagctaacccaagcctccaattgaatttggcacacaccccccctttctttttaaatgtaaaaacctcaaaccgtctcccaaagatatatcgccattcttaacctattcatatggcaaaaaaagcaccactctttcccccatgaaccgataaaaaaaattgcaacttttactccgtggaaccctcaaccttaattaacaacctaacccctttttaa

SEQ ID NO: 24413 - DNA, 294 bp, Glycine max
  unsure (1)..(294): unsure at all n locations
  Clone ID: PAT_MRT3847_122049C.1
aactttttctnttntctntgcagtggtggtgttaattaaattccantggcttnagcaagnggagnggngacattnnctacgtnccgncgtngccgttgccgcctccgccgcnggcgcaaatccacacntcgcngangaagctgagccaccancatcacaataacaacancancancnacaacaaacatcgactccangagcaaggctatcggcgccatacacggaggaagngcggctncacnccgtctntgagcagtacggngagtcgggacgncctntggactactnccaatc

SEQ ID NO: 24414 - DNA, 406 bp, Glycine max
  unsure (1)..(406): unsure at all n locations
  Clone ID: PAT_MRT3847_12204C.1
tacaacttcactgtcaacaacaatctctcttttttccattctcatgcgtcttgggttcttgggacacacccttttctcttttctctctaactcccctccaagagattctgagagagtanaatanaaaaaagggggagtggggttttnagtgttnaganaatanctncgtggggagaggtnngtnagattcttnagcaangggggcangagtgcgncgaagggtcactctaatgncgcccaaacaggcggtgantgctaccaccctccatccctctccnagaaccacnggcaccactaccaggggggggcgaacacaancangnggctantcaaanaggggttgnggnggaggagccttnacctaattctttattctggttgagagaaccatatttnggtatttttt

SEQ ID NO: 24415 - DNA, 157 bp, Glycine max
  Clone ID: PAT_MRT3847_122050C.1
gttcttcatctgcaccacgaagacggagtggctcgacggaaagcacgtcgagttcctacaggtcgtcgatgggatggacgtcgtcaaggacatagagaaggtctaatccagctccggcaggaccgcctagcctgtcttcatctacgactgtggtcaa

SEQ ID NO: 24416 - DNA, 444 bp, Glycine max
  Clone ID: PAT_MRT3847_122051C.1
gtggaattaattctcttctatcacttctaaatgtttgtcaatacaactctcttcttttaattagggataatttattctgtaaaggatattattgacttattcttataaaatagaagaaacactattttttatttggatcttataaataggaataggtagtacaaaccaattgactcttagtaacaaataaaataaaagtcatatgaatagtgtgctttttgattggttgatagtgttggaagattgtcttaattgtgatcaccttttgttgtggtctctttggaggctgctggaattggggccactagagtggtggtttagttctacatctactagaaatatgatcaaaataaaatatataagtgagtgtcaattcctattttagaagcagtttttgaatattgagttaaatcttaatccaaattttaagagataatgtaagtt

SEQ ID NO: 24417 - DNA, 250 bp, Glycine max
  Clone ID: PAT_MRT3847_122052C.1
ccgacgagcaaagaatgctatccgcaggaatatttcacaggctgtgatgacaaagtgaagcccaaaaggagggaagcccgattgagacaaatgtataaagcctcaatacatgcaggaaacaggctcagatggaaacaaataggattaaatagtctgtcgatgatcgacgaaacttctaaaggttccatgccagaagcttgaaacttctcaatctgaaataggacataccagaaacgcagttggaggaacc

SEQ ID NO: 24418 - DNA, 465 bp, Glycine max
  Clone ID: PAT_MRT3847_122053C.1
cttagcagctgtccggcagacaggcccatattgttcatcttatgacaatgacccatggtggttggaatctcacccacaagctcattctgtgtgaggtgaaggaagtccaactctttcaaccttccaatagtgatgggaatttccccactgaaatggttcccaaagaaatcaaccatttgcaagctagaacagttaccaatctccataggaatagcccctgacaattgattatcataaagatacaaaatttccaacttaccaagcattccaatctctcttggcagagaaccctccaaattgttgtgaaacaaagcaagtgtctgcaagccactgaggttacctatgaagggagagatggcaccaaccaaagtgttattgttcagcaaaaggtcagttaacccgagcagcccataaagctcaagaggtatggacccattgagtgcattgcttgacaaatcaagttgc

SEQ ID NO: 24419 - DNA, 400 bp, Glycine max
  Clone ID: PAT_MRT3847_122054C.1
tacggctgcgagaagacgacagaagggtttattttgatttttcttagtttcactggcaattgacaccataccataaaactatactaccgtatggttgtttcaagtgacagtgaacttggattcttaagggttcggagcaaattttattaatgaaaaaaaaatgtaattcaaaagagagattttactataaataactaatttttttactgaaaataaattaaccacaaagttgttaaatacactagtatcattcataaaaaaaacaatttaccctaaagtaggatttgacttttttttagttaatattgtttggccctcctattgtttagagctttaattcctgatatggtatggaagcagacaatggtaaaagccctttcctttttgcaaccacttcatt

SEQ ID NO: 24420 - DNA, 267 bp, Glycine max
  unsure (1)..(267): unsure at all n locations
  Clone ID: PAT_MRT3847_122055C.1
aacnatttgcatatatgtataccattccctttttctcctagtgcttaggctacggactgcttctcatctgtgttgtggcaactgagccatccaaagatgcgacacaagcataagaaccaaagacactgtcagatgcctggagaagttgtggaagtggatgacatggtataagttatttacatggatcaagctgtagacacagtatatgctgtagacatataatatgctttttacattgcattttacattatttaatgattcaaaatc

SEQ ID NO: 24421 - DNA, 638 bp, Glycine max
  unsure (1)..(638): unsure at all n locations
  Clone ID: PAT_MRT3847_122056C.1
gcgtggnngnnnagatttacggacggaaaaggggnnattngagcgcaacgcggtcaatgtgagagagaccccccaatagcgcgcgcgagctctctagttcacgcccccggcccgtattctgtctgtaattgtgaggggcnnngngtgtgtgacagtntnnnnctatcnntctcactcccacaagctcgctatacaccctcaccaaacgcgccagaagctgtcactccaccgagatcgcgaccgctctagcgctagcggatccccgggggttcgggatttcgtcgcgagacagagagagagagagagagagagagagagagagagagagagagagagagagagccaagaaattatcaagggtctatttagatatagctagatgagtttctgaaaaatttctcttatgaacatataaaatttcatcaacggggaagctcttaaaagctcttttagctttgtatccggacagactctcaatagtacaagattatcacatgtccatgactctgaccaagagagagaagaatattgtagtatctgttatctctgtgtaattcactgacacaatcttgtgtgttagctgtgactcaaaaactaaaaaaaaaaactaatcacttttaaaaaaaaaaaaaaaaaaa

SEQ ID NO: 24422 - DNA, 388 bp, Glycine max
  Clone ID: PAT_MRT3847_122057C.1
gtattttgtcatgctgattcgattagatatgagaatatgggtcgctctttagtcacagtctagtttggtaaaaacagctagctagtaattttagggtgatgatatgtgatgccaacagaagaaattctcgctgaactttttaatatgcatttattataaactttattaaattaataatgggtttaataagctttaagtttttttatttttgatgagtctatgtcacgtatagtactcatttagtaaaataatataaatatattgaaaatatgttattagcatttcaaacatgaaacggatttaattatcatacaaaatattggatggtttaatataaaataaattctaaaaacctttaattggaaaaaataaattacttgagtaactt

SEQ ID NO: 24423 - DNA, 152 bp, Glycine max
  unsure (1)..(152): unsure at all n locations
  Clone ID: PAT_MRT3847_122058C.1
gggaaagttnttgaaaagcattacattttctgattttatgtttgggctggctggtttgaacaagttggttaggaatatgcacttaaagaatatgcaaccttgtatttgtacttgaatttattcataatgataagactttagtgttttgattt

SEQ ID NO: 24424 - DNA, 427 bp, Glycine max
  Clone ID: PAT_MRT3847_122059C.1
gacagattataaacaacgctcaacattttttctttgaaacttcctattcatttttttcgataacaaaacttcccattcattgtgaaaacataaactataactaactaattatcttttagacgttgatgaatgcaatgagaaaacccacaactgtacagagggatcaatatgcagcaacagtccagggatctacagttgttcttgtccaaaaggatatgaaggagatggaaaaaataatggaacaggatgtcgtcccaaagtcagcagtagccgcataatcataattgctttgagtgagtatattattgtctgttagaattacaaaacattctattctagattcattcatacaagattaaccacagatttactattacaataaatatcgttaaaaggcatttaatttgtataaagaatatataatata

SEQ ID NO: 24425 - DNA, 272 bp, Glycine max
  unsure (1)..(272): unsure at all n locations
  Clone ID: PAT_MRT3847_12205C.1
ctttctctgagtaccccccacttggtcgctttgctgtcagggatatgcgtnnaactgttgctgtgggagtcatcaagaacgtggagaagaaggatcctactggagccagggtcacaaggnngccnagaagaggaagtgatcgtgcggtttggttcatcaggggatgtcgtttcttatggttacaataaatgttggtttcttgcccttgtgtcttcgtttcnaggtagcttgtttttcggacatagtttgaagtctccaccatcatctcgcaa

SEQ ID NO: 24426 - DNA, 331 bp, Glycine max
  Clone ID: PAT_MRT3847_122060C.1
attacacttacgaaaactctttctttttttcacattcttaatctcataccctaaccggggggtaatcactgggggcgaacggtttaaatatatgaagatcatatatcacttcaataattaacagaattaattcaacattatttcttatttctataacaacattttctcattccaccactgacataacaactctatgagtttctacaacaatccttttaaactcatctagctcaattttcaaaattaaatacacatccttttattagttattaacacttatcactcttttattttatttttcacaaactctagaaactaaattttaaaatac

SEQ ID NO: 24427 - DNA, 546 bp, Glycine max
  unsure (1)..(546): unsure at all n locations
  Clone ID: PAT_MRT3847_122061C.1
nagggcctaaagtacggatgagtacnctgcccggaaaattcccggggagacacgcgcactattcgggggccgcgctctttttttttttttgacaaatattttttcatatgcttaaagaaatatataaatttgggggggtgaatgggggttgactgtatcacacccaactacatcactgtatactgtcaacatgccgttatattctccactctatagcataaaagcagagctggacgaatatttttggagagacaaaatgggcttttacactctgcttatgggagaatatatcgaaaaaaagattattgtggccaagatatgtgacggttcaactagagcaatggaaggataaatgcgttcaacatttttacttatcaccaaaccttcaacgattggagagtttacaacaatgatctatgctggaagttaaagctttctgaacatcttgacccaatcttccacaaataacagtgtgcacactcctcctatgaaggaagatacgttgattatgaagagcgcttccatcggcaccaggaacatgttagt

SEQ ID NO: 24428 - DNA, 296 bp, Glycine max
  Clone ID: PAT_MRT3847_122062C.1
gttggaagtagattatactaagcgcatgatattaatgatggaatctgttgaagtgaggaggagatggaccctttagtgagctactgagcgtatatacgagcgcaggcaaggatatcatacattaagataccatggcgtatacactcatgagatgtccatagacagtttacatgtacatggagtgaacgtgatcctaaagactcaacccactatacactggacgctccagggatgattcgcaatgagtacactatagactaacatcttgcagatgcagaatacattgatgagacagt

SEQ ID NO: 24429 - DNA, 1218 bp, Glycine max
  Clone ID: PAT_MRT3847_122063C.1
gaacgctaaaaattcagcaaatttttctaaaatctctttgcctccaccatcaagaacatctacccagatacaggactttccacctccaaaatcagcttcaggaccacaataaatgctgaagcatgttatctccccatgatctacaggagtttcttgtttgacatctatcttggctacctcagtatcacatgcataaataagatgccggtactttgttgtaagcatcttagaaacttcctctgcaagaggaatattatcaacaaccagaatatcatcatatatactacaaagcctatcccggagctttgattggtcggtaccacatgcctgtttagtaagtgttgcattagttgaatcctttgcagtttcatccaaaccatgatcaccattgactacaatgactttctctttaccaatccccaaagaagatccgttatactggtgaatcaccttttcagaatctgttaacacctttgaattgtttaatacagaatagttaacagaagatggggcatgtgtaccaggatcctgcagtacaataatgctatccccgttcctaggaacagcctggttctgagcaatggaagcaattccattagatgcagaaaaactgccattttccctctcaaatttatttgagccattcatttcctttttattttcagttaacttatcttttgccatagtccagcctctataatcaccaccggacaatttttttcctaaagtggttgtggaaaattcattgttgcaagcagccatgcccactgtcctaacttgcatttcacacggacgcaaagagttcagctcttcctcctccgtcatttcctccagcgtgccagttgatgcatttgaaattttcatagatgaaatgcaaactggactcttgcacagaaaattacgcttatacctcgcgccattgtatttatttaaccccacagatgtgcccttcagacagcatgagaaatctgctctagattgtacaaaatttctaagaacagtgctgttacggaggccattgtacgaaatttggaatgactgcatttttcttcgttggagaggctgagaaggtaaaagggaaggaagagagaagggacttgagaagcagcggcggcataaagggcagtgtggccttaaagcagagacctccattgagcccgaaatcacccactagtgctcccgcaccctccccccttctgtcgtcttctccagccgtaa

SEQ ID NO: 24430 - DNA, 454 bp, Glycine max
  Clone ID: PAT_MRT3847_122064C.1
aaaatactaaaatctataaatttttttcacaatttacgatgattgatgatgtccttggaatcatggtcatccttttttgtttccgaggtttttctgtttcagttgttctttttttttttggaaaaatttcttccatggtcaggtaatttcaaatctgttgactctattttaatttttatttatcctttttgaaatggaatttgtattttctacggattttctcgggaataaaagggtggtcaaatattgcttgtttttcaacagtgagatttttattttaattttaaaattatttttcgcactgaaagcaacctgttccgtggacataggtgttggtccccttccaccactgcaccacacctttgcctccttccaaaatagtgaaatgtacattaattaatttttaaataattaattaaagtctttttatttttattatagtaagattctggaa

SEQ ID NO: 24431 - DNA, 304 bp, Glycine max
  Clone ID: PAT_MRT3847_122065C.1
cccatactatgaaaaacatggatatggggtgcaggaatttaatgaaaccttatatgatgaatgggataacaatggcgacgcaccggcattgccaaagactcttaaaacttacaacaagctgttgtctcttggctccaagattgtattttttgtctgaacatatcttgacaaaatgggcgtaacagaatcaaacctaaaaaaggctggcttccacacatgggaacacttaattctcaaggatccacatcttatcactccacatgcacttccatacccatcaccaatgagacacaatctgttgaga

SEQ ID NO: 24432 - DNA, 358 bp, Glycine max
  Clone ID: PAT_MRT3847_122066C.1
gggttgttggtgatggcataacgacaaccaatacaaaagtaagagagtttctttgtgaaatggcacgtcgtcgcgtggcggaaacaagtggtgctgataggctagacacagcgagcagagcacgtacgcctgaatggctttggatcacttttccgagcccaatcttcaagctcgttctatcactcaagcccaccgccctccgcgtgggcttgccggcctgtgtatgcggaccgctgaatcttgctattgagatccgatttgagaaaatgccgcagagtcctcaaaccgcaaacacttgcttaacaatccggaatattgacacgaagggggagggacctaaaatgtcttggagctggat

SEQ ID NO: 24433 - DNA, 269 bp, Glycine max
  Clone ID: PAT_MRT3847_122067C.1
acttagatgacttctgcggcctcggaacggctgctggaaaggctggaagttccaggatgtgggagcctctaaagcattcatctaagatgtctcgaagagataggagccttggaaaatcatctgtaaggtcctacacggatgaaactatggaacaacaaagctggataagattggctgatgatctatttgatcctgtgattgcacgacttcccattgccacatgtttctgcttgcgatctgtatgccaacgatggaactccttgctgact

SEQ ID NO: 24434 - DNA, 425 bp, Glycine max
  Clone ID: PAT_MRT3847_122068C.1
actgtacccaggtacctgtacacacagcaagggcaagtgcacgagcgccaggccgcaaaagcacacgtaaggtaactagcgcccacaccagcggcaagtgcaatagctggtatgtacggtgaggcggcataagcagcagcgaaagctgcaacatagtaggattccacgggtgccctaataccaaaagcatgtagcgatagtggggcaactagtagggagccagctgcagacagtgggctagcgtatgattgtaatgcaggtgatgaggccgtaacagcaacaaagcagcaagaataggaacctgcaaaagcgccacggaaagctgcagaggctagcgagcacgaagcctggctttgtaactatgatgcccgccagcttggggtaccagacgtaaaggagcggactgcagaagccggagttagtag

SEQ ID NO: 24435 - DNA, 421 bp, Glycine max
  unsure (1)..(421): unsure at all n locations
  Clone ID: PAT_MRT3847_122069C.1
gggaagcttttttttttttttttttttttttttttttttttttttttgaggaaacagcactactgacatatcccctttttttcaacataaaaaaaaaaggtaccataccaagctccaatataaaaaacatccaataattcggctcctcgatcaaagaggtttnccccaaacaaagggtttttggaatccaaactcaacaacaaaacagtcccttgattccttccacaaagcaaacatgggaacttgattaaccaatcccaaatttccaagcccgggggggcccaagggggcattttcattggccccaacaacaaattttgggccatcaagggggaagaagccctgtccataatgtggtccactggctccaaactcattgggggtttgagggggcaaagcatccttggtggtgcttggggaa

SEQ ID NO: 24436 - DNA, 451 bp, Glycine max
  Clone ID: PAT_MRT3847_12206C.1
gggcgcaccgccccaaccaaactatagcgctattttctttaaacacgggactcttttctctttttttaaaaaaaagaatattatatcttttagatatattcaaaccatatctcacacccaacctataatatttattgtttaaaaactatataacaccttctcttcctctgactctttataaccccaacccacatattatatagtttttatgaaaaaaacaccacatagttttcaaactctttcttacacgtctgtactctctactctaatactctttatattttatactcacatataaacactcgcaaaacttttcatcacaatttacacacactcttgttttatatagaacacatacactctcatctatataactcatattgcccacaaaacaactttctttacactctaaataatattttttttttcaactttagttatattcttttat

SEQ ID NO: 24437 - DNA, 1020 bp, Glycine max
  Clone ID: PAT_MRT3847_122070C.1
taaatatttgcttcattccttcaccgccgcactatcgtttccgagaaccatcactttttctcgctgctcttcaaagcaatcgcaacgcgcgttttgcttctcttttcatcgcagatcctctgcgtcgccaccagattcactcacgtttcgtgattcgaacgcggcgtcgtttagactcaagcttgcgggagaagagaaaaccctaatcagacatggggaagaagaagccgacggcgagggacgaagagaacgcggtacagcaaggcggcggcggtaaatcgaagaagaaggcagtgttaatcgacgacgacgagtattccatcggaacggagctctccgaggagccggcgccggcttccgaggagaaacccgtcgtggcgggaaagaagaaaggtaagaaaggtaatgctaaagccaagagtaatgatgatgatgttgatgaggatgaagatgatcctgaaattgtgtttgctgggaagaagaaggggaagaataagaaaggtggtgggagcagtgcgttcactgcttctggctttgatttgctcggtgatgagagggatgatgatgaagagaaatccgggttaaccggtgaggttgatggtgaggaagaggatgaacctgtggttagttttacggggaagaagaaggcatcgaagaaagaaggtggtagtttgttcagtgcatctgcttttgatgctattgatgatggtgaggaggaggatgggccagtgattagttttaaaggcaagtacggctcccctcagggggcgaagaaaggcggtggcagtttgttctctgcctcggcttttgatgctattgatgacgatgcggatggtgaggtggtggatgataagaatgacgatgttgatgatgatgagcctgttattgctttcactgggaagaagaagtcttccaaaggaggtaagaagggtggttcagtgttttcagctgctgttcttggtgagattgatgatggagaggagaataaggatgatggtggtggtgatgatgatgatgacg

SEQ ID NO: 24438 - DNA, 226 bp, Glycine max
  Clone ID: PAT_MRT3847_122071C.1
atgatactggatctactggtgagcatttgatatggtgggattacacggagcaggtctatgcttatcaaactagattgctttcaatgataagcttgtgctggctaacacacatgaatcctccgttggacattttccagtggattctagagtcccaattttagagaattgtctttatcctggcaggcaagtaccttcacaagctgtcggtggaaatgaaacatgtggc

SEQ ID NO: 24439 - DNA, 592 bp, Glycine max
  Clone ID: PAT_MRT3847_122072C.1
ttccggactgtgatgatgccatgtactctactcattcattcagctcctactctagcatgtactttcttactacttccagcactcatgtaatgcaccggatcagctccaggctcacttgctcgtagtcgcggctgatcctacactgacacctgcacatcccatgtgccggattgagtttgatgtgtttgacaggcgtttacatgtccgtgtcgtgtccgatgtccatgtcagcgtcgatgcttcatatcacagcaattcaaatgctaggagagcatatctagcatatgtttaataacgaatgctggaatcacatgactgcatatcaatcatgaaatatcttataaataatggatatttgcttaattcacctgctacaacagcagctgtttttcagcaccttatgaatgctgaatgtcttgagtacctccgatctgatattataaaagtttgataatgcatgtatgattccagtcttatgtctctcttactttaattttactgactattttctgcacattaattggcctgttttgttatggaaactaatatcacttctgatattaaatatccagaatatctaccctaggatcta

SEQ ID NO: 24440 - DNA, 811 bp, Glycine max
  unsure (1)..(811): unsure at all n locations
  Clone ID: PAT_MRT3847_122073C.1
ggagaaccgagagacttaatcttccaaatggaaactattatcagaagagtaatttgcagcacccggtggatttttaacagatacaggaataacatgcattatttctgatataaaaaaacaaaaataaagaaaaattgttctttccacgtaatgatggaacttttcaaagaaatcatgacatggatgaatcgcacataaagctcaaggagtaaagaatagataggtcctattttatttaattttttttcagacacaattttccaccactactagctaaatgggtatatttcacatttcgcttttcacagacatagactggccgaaactgtagcatgtgacaaggaaattttgctatggttgtttctgtatgctttctttttcttcaggagactataaaccaattaattcaggtttttgaataataaggactcaagttagtaagatagtagtaatttctgatcaggcaactttgtcagcatatagtaaaaccatttctgccattaatttttctaattatcaattttttatcttcagttacaagcatttttttttctccttacaatgttttcgcttgattataatatcagcaacggtgtcccatcattcctgcaagagacatcaatgctcacaccttcgaaaagacatggtacactgtttcaagtttcaatcccattttttcacctagccaaaaaaaacctttcttcttttcaattcggattcagttaaatagtacgtataaatattatgattttttttacactatctttcatttttattnttacggattaaaaaaactctgaacttatacaac

SEQ ID NO: 24441 - DNA, 160 bp, Glycine max
  Clone ID: PAT_MRT3847_122074C.1
gtcatgtcatatcccttaacacctgttgagttagattcaccgtgggtatccaatttatatactgcataaaacatcgagtgaatgtgtagatagtttactttcaagcaagtgaagtgggtggacgtttgactattcaacacactaatttcggaattacatc

SEQ ID NO: 24442 - DNA, 114 bp, Glycine max
  Clone ID: PAT_MRT3847_122075C.1
gctttctctgccttatttattgattagcttttatacataattgcatgtctacattctcactgcaataatcgctataataaccattacaataaccgctataataaccactacaat

SEQ ID NO: 24443 - DNA, 422 bp, Glycine max
  Clone ID: PAT_MRT3847_122076C.1
gaattaccgggccgaccgacgcgtccgggcagtcatgcgctgactcagcagatttttttcaaggccgggctctatttccagcaggcagggttgtttctgaagcgtggggaccaagactacatacactgtcatatagacggactgttaatccaactatgaagtccaaacaaacaaagtgatcacctgaagacacatcatatgttaacaaacatccacaaagtgctcaactccagacactacatctattacaacaagagacaatccttcacacgatacacacacactcaatgatgacatatagattcacatgagccaagaactgtatgctacctaaagcggatctctatgtttgtacttaaattcatgtgacacatattcatttcctactatggatattcttattaatgcactcatatcataat

SEQ ID NO: 24444 - DNA, 1097 bp, Glycine max
  unsure (1)..(1097): unsure at all n locations
  Clone ID: PAT_MRT3847_122077C.1
ccacgcgtccggtttttgctgtcggagcagcaatcgccgttggtggattggcattaggggcggggttatccaacgtgaggtacttttcggaggcgggtgcggcagcggagcgtataaaggaagtgataaagagggttcccaagatagattctgacaacaaggaaggggaaatcctggaaaacatttacggggaagtggaatttgaccgagtggaattcgcatacccgtcgagacccgaaagcgcgattctgaagggactgaacctgagggtgccagcagggaagagagtggcgttggtgggagagagtgggtcaggaaaatctacggtgatagctttattacagagattttatgacccttgtgggggagaggtgcgtgtggatggggtggggatccagaagctgcagctgaagtggctgaggtcgtgtatggggctggttagccaggaacctgctctgttcgcgaccagcattaaagacaacatacttttcggcaaagaggatgccacccaggaccaggtggttgaggctgcaaaagctgcccatgctcataatttcatttcgcttctgcctcacggttaccatacacaggtgggagagagggggattcagatgtcagggggacaaaaacagaggatagcaattgcgagggcaataattaagaaaccacgaattctccttctggacgaagcaacaagcgcgctggactcagagtcagagagactcgtccaagaagcgttggacaatgcagcagtgggttgcaccaccatcatcatagcgcaccgcttgtccaccatccaaaacgcggacctcattgccgtcgtcggaggcggaaaaatcatcgagatgggctcgcacgacgagctcatcaaaaacgacaccggcgcttacgcctncgcgtttcgccttcagcaacaaatgggcaaagacaaggtagaaggaaagcacggaaaaaaccgntattccagggactgttttatccacaaccganaccccagacatgggacttacttctgtangccccacataatccgggggttgtgatgataacatgggcgacagcgccatcatttttggagactgatgggcgctgagcta

SEQ ID NO: 24445 - DNA, 443 bp, Glycine max
  Clone ID: PAT_MRT3847_122078C.1
aaaacaactcacactaatcagcttcattcttgcaagcacaaaatactcaagggggcacaaacctcacggaacttaacgctttatgaagcacaattactcaactgtgttgtctgcaaagaaacacgccgttaactatattttaaaacgcaaattgtgaccctttacacacggaaaaatctcacaggtatagcgctccactgtggggacccgttgacaatgcccagaaactggttgcttgcacagcgacccattgaaggtgccctcaaccacagacaatatgctttctgtcaatgaccatgagacctttcaaacaggggtgaagaacctggttagaaccctgccttgccgctgatcccccgctttcgccgcgggccataagatcactttaccggtctgcgatgcgctggcaatggtggacttaaggagccctaaattgagggccc

SEQ ID NO: 24446 - DNA, 474 bp, Glycine max
  Clone ID: PAT_MRT3847_122079C.1
cccaaaaggggtagcacgaatcgaaggggacaaaatacaactttaggaatagtatatttgtaagtagatgtagactgtagtggcccatataagaaggatcgagaatagaaaacgtgtttcacaatctgaatagaaatcaatgcgatgacgtatagtgattaggtgaattgcacatgtcgttgatatgaaagaaatttccgcgctggaaatgaattcacctcactaagaatgcaatgattaagttgttatatttattataacttattataatatttataagatttaatgtgactttttatttttgtatgttttacggttattttgtatattaaaatttaaaatttcactataatcctttaagtatctaaaatattccattttagttatttcatttgattttcgtcataaacattttggatctgttaagaaatagttaatttaatagccccatggctaaaaacagtagttatcttt

SEQ ID NO: 24447 - DNA, 451 bp, Glycine max
  unsure (1)..(451): unsure at all n locations
  Clone ID: PAT_MRT3847_12207C.1
catcccatcaaattattttttttccaatgtacaacatacaaaagaaccctatatctatatgatacaagaaaaaaaaaaaaaaaaagggatctgtcattttgtacaggaggtcaggtagctacccatcaatatagaattttacaaaaaaggggaaaactcacctgacctccacagaggaggtcaaaactgacccttctccattccatatccaattaaagatgattttgaatacataaagtggaagcaagatgagtgttggattggttttgttattgtagaatgaatcgaagtgatatccaaattccaaactgaactcaactnaagcgatgggtgttcccacggagaagctgaaccaaacacgaggaattccttctgaccggaacattatcatcctccaccaacccttgacatatttccaaaaccccgtttttaaagccttgacacagttttt

SEQ ID NO: 24448 - DNA, 1870 bp, Glycine max
  Clone ID: PAT_MRT3847_122080C.1
acggctgcgagaagacgacagaagggccataccatacaattaatatactttacacccactaccattaacctgaagggttgtctccaccacacattatgtgagtctctaaaacataaaagcaatgtacgacaacaatataattatgcattcgaatttgtcaaactaaccgagctaacaaaactaattttgataatgatgctcatgatttaaacttgattttgttaaaactgttcatatagccctatataaggtggaatgttatatgataagtacatatcggctgcgagaagaccacagaagggggcagcgcatcggcatatggcaatggagaagctcgcttcttcttctactgcaactgttgttcccactcaacacttcctttttcaatttcaccaacattctcttttcttcttccccaaaactgcgttttccaccttccaccggaaccgcaccgaaccgctctcactgccatgttgcaaaagcagacaccgtcgcctagaagcattatccagcaaacaggatcaactctgggtcagcgaagaagaattggagctagaattggaagaaggagaagattcgtatttggacggtgatgatgacgacgacgactcgtcgtttttgtcgctcagcgacaagcccgacaggaacatggccatgctcgacgattacgagggcgaggagctcgactttgattacggtcccgaccaccgaagcgggtatgtggcgttacttgggaagccaaatgttgggaagagtacactggcgaaccaaatgctagggcaaaagttgtcaatagttacagataaacctcaaacgacgaggcatcggattctgtgtatatgttctggcacggattatcagatgatactttatgacacacctggtgttctacagaaggaaatgcacttgttagactcaatgatgatgaaaaacgttcgcagtgctgcagttaatgctgactgtgtcgtggttcttgtcgatgctcgtaaagctcctgaaaaaattgatggactgttggaagaaggcataggagacctcaaagataagcctcccactctactgattctaaacaagaaggaccttgttaaacctggtgaacttgcaaagaaacttgagtggtatgagaaatttactgaagttgatgaggttatacctgttagtgccaaatatggtcagggggttgaagatgtcaaggactggatactgtcaaagcttcccaatggaccagcttattatccaaaggatattgtcagtgagcatccagagagattttttgtagctgaaattgttagagaaaagatttttatgcagtatcgaaatgaaattccatatgcatgtcaggtaaatgttgtaaactataaagctcggccaaatgcaaaagaatacatacaagtagagattttggttgagaaaaacactcagaagattatccttattggaagagaaggaaaggctttgaaactgcttgcaacagctgcccgccttgatgttgaagattttttacagaagaaagtttatcttgagattgaagtgaaggttagagcaaattggcgacaagatgaagggcttcttaatcactatggttatgggggccaaatacgtgttatataatgtgaagatggcaaacaaaaaacaaatattatcagcctcctggtttatttggccgcctccggggttacctggccgggccgtgccgccggggtgggttcctccccttgccccaccgccgccgccgggcctggggcccttccctgggccccggggttttgctgcttctggattcgatactaaacagacattgtataacaaggaagtagcagagaagcggaaaaatcaaccatctgaatcccccttttctaatccaattgtt

SEQ ID NO: 24449 - DNA, 339 bp, Glycine max
  Clone ID: PAT_MRT3847_122081C.1
tcttgtacctttttctaaagaacacgagatttctacttcttcgggttagttttcaaatttgaatctttcatcaggttctctgaaatgtatatagatttcatggctctcaactcaaaataacctcttgctgtggtcaatgacgacattcacctttattgcttcaaacactcttgcttcacataggatcgaattgcacaatggccattctccaacaaagtatcttcccttccacatttgatatctttcaatgcttctcatgatgatatgactaacaatattacatctgatcccttaacatctgcattgtatatgtctatcttaattcattaagcatttgac

SEQ ID NO: 24450 - DNA, 415 bp, Glycine max
  Clone ID: PAT_MRT3847_122082C.1
aagacagctattgcttcacatgaatgggggcaagggagaaaggagttatgcacaccacagctcgctacaaaaaaaactaatgcttaaagccacacccatactcgaagaaactataatgaaactgtatcatgattcttctccaagctgcatgaaagtggcagatttaggttgctctgtaggaccaaattcacttcttgtgatatcaaatattattaacattgtcgataccacatgcaccatcttgaattgtgaaccacccacattcccattttatctcaatgatttattgggaaacgatttcaataccatcttccagtcacttcctgattcccatacaagattgggagaagattaaggacacaagttggggttatgctttattaatgcaacccctggatcctgctatgggaaggtc

SEQ ID NO: 24451 - DNA, 440 bp, Glycine max
  unsure (1)..(440): unsure at all n locations
  Clone ID: PAT_MRT3847_122083C.1
cgttagcttggatcctcttgagggggcggccctnntttttttttttttttttttttttttttttttttttttgttttttttttttgttggggttgggggaaaaacttttttccttaaaataaagggggcctcagggcaaccaaattgcaaatacacccgggggctcaaagacttatccattaagtttaacttatgggcttatccattatcctgggctttttaatggaaaaaaaaataattgggtggctttatttgggggtccggcagctttaaaggggtggccaaaataggggggggtttatttttttttctgccactcgaaattaataccttttgggggtcaggacatacattttacaagcttgtgaattttgttcagcggatttttttcttgaaaccgaggtttgcgtggagggctcccataaatcttttgcatcaac

SEQ ID NO: 24452 - DNA, 629 bp, Glycine max
  Clone ID: PAT_MRT3847_122084C.1
ctgaaatctgctgcttactaaaaggaaatgagatggccacaggcagcactagttaccgctggaagctctagctttacattctgactctgacctatccattctttgacagtctctctgaagagaccacctactatggagggaagagcccatgggtgctatgccgcatcgcaaaaggagtgaaggaaaagcgggtgccttcaagcacacaccttgaaaatgggctggggatcctgatgacgaaggtccttagacctatgatgacgccaagcataatgccatatgtgcaaacataccccagctaagcacaggacagaaccctgctgctggagtttctattcagggatgagcagcgacatatgagatgtcggtagtgcggtctacgatcagaacattcatttagtgggctatgaacagatctcaagaatgatgcgaggtgataccccttataggcttgaggcatcgcaccatatatctgggaggaacgaacaaacaagctgcatcctatcctatcataccaggggcccaattacccccttagatactatctgaagtgtgaagccgataaatagactcatttatatgcatctattctaaggcctgacgccgcatatagtatccaaggggataat

SEQ ID NO: 24453 - DNA, 552 bp, Glycine max
  Clone ID: PAT_MRT3847_122085C.1
gcacgagggggaagcccttgcatgcagatggctatgccattgataatggggctgtcaatcatcaaatatacaaacagctgcctgatgcaagcagtcagatgaaatcaaagctaactgagcatgtgagtcctgagttgaagcaggtatcattggacaatggaggacgcaaagatttgttaaataaggataatgttgttgggttggaaacagaaatttatagtataaataactataacaaacccctgattgatgagacaaaaaccagcaaaccagacttgcctattttgcaccaggtctcttctgataagcaccttgatgatccagcatccattcttccagaagttgattggggtgatacctctgtgaaggagtctaatgaggatattaatgttcaagccttacctgtttccataaatgggaatacaactacagatgaagattctgaagaatttccttcaaatgttgtttccaaacaagcgcaaggtgacatccttattgatattaatgatcggttcccacgtgaatttttcactgatatgttctctaaagcag

SEQ ID NO: 24454 - DNA, 284 bp, Glycine max
  Clone ID: PAT_MRT3847_122086C.1
cccacgcgtccggatggtagaagggtgcttgtgttttttgagcgtgggaggactgaatcagagtgggataccttggcggctaggtggtggactaactactactaaaatctggattgcagaagtttatgagatacatagtgggtggattctacagtcaattctcgcaccttaaatactattgtgcacgtaccaacacatctttaaaaacagcgcattatcaactttaagagctccacacaagtacacagatcccgaacgatcatgtcaacatcctaattaaagcg

SEQ ID NO: 24455 - DNA, 408 bp, Glycine max
  Clone ID: PAT_MRT3847_122087C.1
ggctcgagatgtgtttgcctcttgttctatgctgtcgagtacggcacaaaggcaactaggggggagtgttcaagaatttgttcattgcaaccgtgagaaatcaaccccctacacatgtatggatctagctagccaatttattaataaggcacatattgggaagcccaaaatgcaatatgtcactcggatttaggttccacccaaccgatgaggagctgattcttcactaccttattgaagaggtagcattcatacccttgagcgataccattattggtgaggatgatatctacaacgttgatccatgggacttaccacctaaggccacctttggggagaaagaaaggtatcttttcagacctagagaccgacagtacccagatggtgcaaggatcaacagggcatttt

SEQ ID NO: 24456 - DNA, 982 bp, Glycine max
  Clone ID: PAT_MRT3847_122088C.1
taactatgacttaatattgacaaggaccaaggcgagcacagtgaagttcggcgcgagttggaagcagcataaataggccaccaatgcacatttttcttcctccatgactgctaccatgtctggccctattcctaatgatcactggctccatttctatcaacaaaaccaattcccctcttccgtttccgacgccacaaccgtgacaaccaccgccgcgccggccaagctaagcccagaaggcggagtctcaaagcccattagacggcgttcacgggcctcaaggagaactcccaccactctgctgaacacggacaccagcaatttccgggccatggtgcaacagttcactggagctccttctgcgcctgatatgtttgggagcccagtccctgtcaacccaaatggcctcatgttggccccttctcagtccctttatcaccaacaaaaccacttagcatacagagatggtggagacaagggtttttttcagagactgagcaacccaacagcaacagctccaaataatgatcgagctgatgaggttttggtggaccatggcgggcgtttcttcccaacaacttcttcttgaatcttgtttgtctctccaataggaaggagcttttaagtttcttccatacataaattcagcagataattaggtgctaacttgttgaccaaccctatgtgaaatggaactatatatatttccacctgcacctgcaccacactttcagctctatcttattttttgcccttccttgcttcaaatcgaatccagctatgttctttttttcattatgctgtgtcgtcgttggctttccttttctatttaaatttgtgtatttgttttttatcttaatcttgattgggacccttctctttagagagtcctagcccgattatagtttaattattttggatatggtcactcggttaggctatgccaatacttttacgtgtgttgacttgcttccttctttgt

SEQ ID NO: 24457 - DNA, 479 bp, Glycine max
  Clone ID: PAT_MRT3847_122089C.1
tctgtgctattcacactctgttacctcaaaccctctcaatatgcattaccttcgtttaagaccagcaattcactgcgaaacttttttttattttcatttttcctctttcatttctcaattttgaatctttctctaatttatgttttacattcaaatttacacggggtagggttttgggcttgtttgcttcggattttcccgtaatgaactgttcttataattatgtttgcgttagaaacttgagtcttgtgaaaaaaaatcatctttgcagtggaaggcaacccattttttttcttctttttttgctgtattttttcgaattcaggataaagaagtggcttctgtcttttctctagctatgatattcaattatgcagctacagcaaaaccgtttagtggaaagatcttgttgaagacaaaagacctttgcttctgacactgaagctgtgaaaagcacatgcactgtgatttcaagagca

SEQ ID NO: 24458 - DNA, 211 bp, Glycine max
  Clone ID: PAT_MRT3847_12208C.1
cacaagaaaacacttttttacttaatttacaggggatagtgaagaaattataagaacttttcttgaatgtacataaaaagccataaacacatattagacaaacaccggcttctaaaatgtcacaagatcccaacctgaattttaaaaacatatatgctttaaataggcccggttccctaccagctgtctgaaaacccctgtttaaacctaa

SEQ ID NO: 24459 - DNA, 230 bp, Glycine max
  Clone ID: PAT_MRT3847_122090C.1
tagtctttccacaccatctttgaattgtcgtcatgcctgcaggcagtgtgctgtctgcatgagattccacgtcgaactcgcattgccatcttcagatggcgaggttgttacactttggtcatctcaggcacgtcctgcaacggctctgttgcctgataccggcacatatctggacgcctcagtgcatgattggtcagggtctacacgactcggtgactttggcacatgct

SEQ ID NO: 24460 - DNA, 854 bp, Glycine max
  Clone ID: PAT_MRT3847_122091C.1
catatatagcagggtcaatcaatgaatagagtttacaataaaaaggtatcatcaggcttgtcaggaaatacatgaaaaggaaagcacaatacaaaattacgaataactacccaattaaaattatgatattggtatgtacgtaaatgtgtacgtctaatgtttatataataccaagaatataacaaacacaatagattgttagactgctgaaataccaaaggccctaaaggaaagtcatcaatattcaattatgttcagtaagtggtatccttaggatgtacaacaatggcgttttcagccaatagagcagtaatttatccctgctatatggagatcatttttttcttccctgagtttcttttgtcccatatatcagctatctgcgtgacaaaaattatagcagatggagcaaagagatgcagaaaacatgctcattttgatttagatctattgcaataaactcaacttaaaccagcaattgttataaacctcatagcagtgcacatcctgaaagaaagaaatatcacatagagggagatgagacccattcctaatattctgttaggatgcatgttgttccgaggtaaaacaataagtgcccataacagtcctgtgatcagaaatcccatggtgtaaaataagctagtgtcttcaggcaccacatacaaagagggtttctttgaccaagccccaagcagcaacgagatccccaagccaataagtgtgttgaacataggacctgcatagcatccagataaggcaatctgaactccatcccatgctaatacggttaaccccaagatggatgggttgattccgaaaataacaccaaacgctaccaaaagagccacaag

SEQ ID NO: 24461 - DNA, 780 bp, Glycine max
  Clone ID: PAT_MRT3847_122092C.1
ggtatgtaaatgtgtacgtctaatattttatatataccaagaatagaacaaacacaacagattgtaagagtgctgaaataccaaatgccctaaaggaaagtcaccacaatattaaattatgttcagtaagtggaatccttaggtgtgttcatttttcaacaaatgtaaagagactacctattgtcaattcgattgacaagtacatgatgtttggatatacaacaatggcgttttcagctggagcagcaatttatcccggctatatggagaccaattttttctttcccgagtttcttttgtcccatatataggctatctgcgtgacaaaaattataccagatggagcaaagagatgcagaaaacatgctcattttgatttagatctattgcaacagactcaacttaaacttaaaccagcaattgttataaatcccatagcagtgcacatcctgaaagaaagaaatatcaaataaagggcaatgagacccattcctaatattctgttaggatgcatgttgttccgaggtaaaacaacaagtgcccataacagtcctgtgatcagaaatcccatggtgtaaaataagctactgtcttcaggcaccacatacaaagagggtttgtttgaccaagccccaagcagtaacgagatccccaagccaataagtgtgttgaacataggacctgcttagcatccagataaggcaatctgaactccatcttctccattcaatgccaatgaaatatttgacatcaaatctcccatttgaatttccccatgct

SEQ ID NO: 24462 - DNA, 108 bp, Glycine max
  Clone ID: PAT_MRT3847_122093C.1
tatagggattgaacaactgtctgtaataaacggtcttgagcaaaggtatctggccaaacgtatacctaacactaggcataggttgctgataatttccgctatcaccgt

SEQ ID NO: 24463 - DNA, 373 bp, Glycine max
  Clone ID: PAT_MRT3847_122094C.1
gcccaaaatgtgaactgtattgcggctgtttcacttggaactctgcttcattcgggggaatcttcgaagatggaggggagagcaagaaaacgcgcttctatacctgtacaaggtcctgcttgtaatgctacggataaattggacgtgccacatactttcaatacgttgcaacatacggcgaggacagcggttcatattgattacagggcgcctgtgctgcccataaagctcgagtgttctcacctactgctgaattccaagttcttttggaaggatgttgatgagtcagccccagagggttcaagatcttgataaatatgatggggttgatgaaaagatagagacttccttgtacttgctcaagagcacctct

SEQ ID NO: 24464 - DNA, 567 bp, Glycine max
  Clone ID: PAT_MRT3847_122095C.1
ctctctcacaacggccaaatcatcaactcagttttcttttcctgaagcattgttacgttcggatgtgaaagtcaatcccaggcttgttcgattttaatagatgttttgtattccaaatcaggtgaaatatcgtggtgcctgtggattgtgaatagatacaattactgaagttgccctttctacgttttagtgtgagatttgggagaactagggtgattggattttgatctcagttcttccatggagttcaacaaggacgaggctgtgagggctaggcaagttgcagaagctagaatgcaaagaggtgaatttgtggaggcactcaagtttgctaccaaggccaaaaaattgtgtgctgacgttgtaaacattacccatgttattacaatttgtgaggttcacaatgctgcaaagaaaaaactctctgccactgatttggactggtatgcaattcttcagattgaagggttggctgatgaagcagccataaagaaacagtacaggaggcttgcactgctacttcatcctgataagaacaagtttgctggtgcagaagctgctttcaag

SEQ ID NO: 24465 - DNA, 437 bp, Glycine max
  Clone ID: PAT_MRT3847_122096C.1
gttttactccaaaccaccgccttaacggcctcttcctctgcccacctccttccatcgttgatgcatgccaactatttgatgatacatgctgggtagcagatgcgacgtatgtgcgcacctttaacaagagacttaagcacaatgatgttgaacttacatttgggagtctcagcccagtggctctttcactgttactatggacctaacattcatcaaggtggctattgattcaagatatgttttagcagttgcacatgtttcgtaccttaaatctcttcgatacgttggcattgctctccgcagcctatgctgagtctcaggcagaggctgagtcatctctttctatatctgacaaaaccccttctcaaacgagttacccttttccatcctcactttctcatatagcggaggacgaggccctggacccacttttgcac

SEQ ID NO: 24466 - DNA, 587 bp, Glycine max
  Clone ID: PAT_MRT3847_122097C.1
tataactaaataaaatatggatatattttataatatatatgtagacatcaaaatgaataaactgtatgattttcacagataaaaaaaaaaaagattaatccttgagtgttctgagtccgtagactacctttgcctaactaccaaaaaaaataactaaaataaagttcacaatactattactatttagaacaattacaaatggtagccaaattacatggaaagagaagggaggggctgaagctcttaaatatgcgaattttcagttttctaaattgtcgaggatggtgtcacaacaagaaggtttcaaggttttgttttggtcttgcccatatgctgcaattagtaaagcctctgcccttccatgatcttttttcctacttagcatggaagtcattgaaggaaataatgtagatgcaattctcctgctatcatcctttgtagtcccgtttccagagagttcaaattttgctttccaagtaaacgatggcactggaataacagaaaatcctgaggcaactaagatgccaatccacagcccatacccaaatcctccactccaccagccctgcttcccatcttgcggataa

SEQ ID NO: 24467 - DNA, 527 bp, Glycine max
  Clone ID: PAT_MRT3847_122098C.1
cgccctctcccctttgagtgcactgcttgtccgtcgaccttgccattccccttctgggctcaccaccaccaacctcgtctcgacacatcctccctactttcatatcgacttgacgtggtcgctggctaccatcatgcagttcaagtcctccatccttctcatgggcctggccgctgcaggcctcgcctcggctgcccccgccgttgccgacgctgccgcacctgcagtcgagcgatccgagcccgttgctaccaccaacaacgttcagcgcgacaccaccgacgccgctccttcggctgactacggcatcggccctcccatggaccagtggagctacaagcgtgatggccagcccgccggtgactttggtgttggccgtgccgacaggtggagctataagaagcgccagggcgagcccgctggcgactttggtgttggccgcgctgacaggtggagctacaagcgcgacggcgagcctgctggcgactttggtgttggccgcgctgacaggtggagctacaagcgcg

SEQ ID NO: 24468 - DNA, 420 bp, Glycine max
  Clone ID: PAT_MRT3847_122099C.1
gatttttataggagggagtttgtatggagaaccacctggttttgtttttgggagtttagattagtttggattggtgtgcagactctgtaactctgacttaaaacagctcccttgagcttggtttggccacttgatcactgttgttcaagacttagacttatactgaagctgatcattctgtcttttattggtgttccatcctccaattgttgcatttgtcttatattatttttcttatcgtaacagggaataatcaagttacaattgaacaattaaagcagtatttattcaagcctctctagtattgttttccagtactgcatatatttttttctccacacaaatacagtttcaattgaattacctcattgcccgcaatatttttgtttcttactgcaaagaaagggggcgatgtttaaa

SEQ ID NO: 24469 - DNA, 662 bp, Glycine max
  Clone ID: PAT_MRT3847_12209C.1
atttactatcgatccctttgtggagaaacaatatgtggctggtgcaaatctcaaacccatttctgaacggtcatggtcatgcctccaatcttctctggaaaccagtgcggcggcgactcagacccactgggccccgccgagatcgctgcctccaatcaatgatatgaaaacgatgcacgcaaaagcgccgtgctccacgaacgacaagaccttgacagtggaagagacgccgatggcccctcacccagagaccataggcgcgtgacggaaaagaacaaataccacgcccacgatcccgataaccaattctgtgactgctgacttcgtccagctccagaagaccaattccatcaacaagaccaaagcctgtctcgcactccccggtcccaataagtcctccaacagggcctagccccattccgatgagatgtgcattgccttccagtcccaacaccatgcctacattccagagtgacacctcaatttcactctctcctacggctactttttatccaaatccttcttgtgcattcgcttttatgcatatgtgtggtaatatggatgctgcttgtgcttgcgagcttcactatatgagcaattcttatcattctagctgactgctatcatatataatcgtctttttatttcaaaaaaaaaaagaa

SEQ ID NO: 24470 - DNA, 381 bp, Glycine max
  Clone ID: PAT_MRT3847_1220C.1
ctcgagcccaaacaattcatgctcctaactattcgtctctaaacggcacgtcatcaagcgacgagtttaacaaaagcggcgatgatccatctgccatgaaccatcgggttcgcgatttgcttccaaattccacattccagtgcccaaggtccaaacactctctttcagagtttgacgatcaacattcttgctaaagagactatcgatgatatcgcgcagagcatcgtgatcaacaatcagactcatgatgtcattcttcccagcattcccattaacaaataccgtaagcaccagattatgcacgacgctatcaagtgcatacaccataccaagagaaccacttagacggcagatgatgtcatggctccactcaagttgacc

SEQ ID NO: 24471 - DNA, 571 bp, Glycine max
  Clone ID: PAT_MRT3847_122100C.1
gtgaacacaaataaaaaacaccttatccttcaccttgtatccccacatggatcttaattaaaaggcaatttttgattatcgcaaaataatcaagttctaaccaaaaaaggtaaatttttgtgcggcccattgggggtcctccaagaaggagggagcggaacccaacccttgaggaagccaactcaaattggaggagggggttctccaactggggggccccactggggatggaagaaatgggtgaaaaataaccccccccaaacccaactaaggcccaactggggtcggagccagcttccccaaaacccaaccgaataacatgctttgtatcccccatcgaattcccaccaaggaggcgcccccccacttgattccgcagcactaaatttgggtcgggcgcagcagggcccatccttggaaactgaatgtctttggttgcaaaagaggtcccaaagggagccgcaggtgcaactgaaggggctgctattgttgtcacagaggcctacaacccagtttgggaaattggggtccccaagaccgtgtttggataaccagcactagtttttacccc

SEQ ID NO: 24472 - DNA, 420 bp, Glycine max
  Clone ID: PAT_MRT3847_122101C.1
gtgggctgtattcggtctctcctaatgggatgcagactgtaattgtcttgattgttatctttgtatcttcagtacacctagtactgaatttcatatataatatattgatttttgctgtgcaaaaaaaaaaatgatagcactgcgaaggtgctattaataaatatggtttggctataatgaatattgtgacattccaactcagcttgttagctcaaattatactaaggagctaaattggtacaaatgagccaatgtgaaccaatttagctcctggacagtttattttgatcagcttcattaaattaattttgttcaaatacattcatccactaataacactgcacagcaatatcactatcactgtgatccaccattattttagctcaaatacttgaattattttgtggttaaaacttggtt

SEQ ID NO: 24473 - DNA, 313 bp, Glycine max
  Clone ID: PAT_MRT3847_122102C.1
cacgagacaccacagacttagttcggagggatcaagcgctaaatcagctacaggcggagcgagggcgaatctgtatggacgcaagggggcggagaagaacgccccaacttgggctgagcctggaatgttagtggggcaggtaccaagggcgatgaccccaaccgatctgtcgccagaagatgaccccaaaacggccaagacgggaagacccaaggcactgaaaaggccattgaacaaggaccaaagggttaaaccctccacgccgaccacttcctcagaataccacaaccaggatcagggagccgatttagga

SEQ ID NO: 24474 - DNA, 615 bp, Glycine max
  Clone ID: PAT_MRT3847_122103C.1
ttttggacaacacaattggtagttcagtaaattatattcccttcaaattgtttccattaacattgttacattttccacatgcatacaatccatccagagtaaaattttaatctttaaatgaaaggagaagtcgcaaaaacttagagctttgctgaaatattcccttagcaccttagaaaaactatcagcagaggcacgagctcgattggccttgccaagataatgtagatcagctttgtcaagcttcccatccatcaaaactaatcctccctctccaattgaaaaccgtagaagacatcctgaatgcaaacctgactgttgtataaagcttccatctaaacagccaaataccataggaggatcatccgaggtagtcagttttccatcgtcttgaagctccaaaaccacctgctgttggtttggaacctgtcctttactgtctgtgtccaaaacatattgactacagttctcatccttccaaactaatgctaacggcgtaattcctgcctgatagtgagcatgcctgtacttgtgataatgcgagggaggttcaaaggcatcagtttctgcaagcttcgaggtcaaccagaagaacctaaactccggggtgcaatc

SEQ ID NO: 24475 - DNA, 1741 bp, Glycine max
  Clone ID: PAT_MRT3847_122104C.1
cgctgaattcatggatgagttactgtaaatttttgtattgaatttctgctaaccaaatcaaacgaggcgctgaactgagccatggcaccgcatgatctccgccgtccgttcaagcgaccagcgatctccgatcaagagcggcgcagggaacagtctctgctccgccaggcacagagtcgccaagacgcccagcgccacgcgcgcttcttggcctccgccgcactctctctcccacccaaaacccccgaaccagaatccgaacccaaacccgaacccgaattcgaactcgcggaaaccgaagccagttcggattccggctacgagagcctcgacatcattggagcgtcgacgctttcagctgcggaagctcgcaagtggttcgcgaagcagctcatgcacccggagtggatgatcgacatccccaacaacctcgcccaagactggttcgtcttcgctcgcccttccgggaaacggtgcttcgtcgtttcgtgcaacggaacgacgataagtcgtttgcggaacggtgccattctgcatcggtttccctccgccttgcctagcggggcaaggaagaaggacccctcctactctatactggactgcatctttcacgaggtggatcagacttattacgttattgacatggtttgttggcgggattaccctctgtctgattgcactgcggagtttaggttcttctggttgacctcgaagcttgcagagactggtgcctttgaccctccctcgtattatcacaagtataggttcagtttggttcccgtgtatagttgtgactcgagtggtctctatgctgcgtattcagcaccagtgccttatgtcaaagacggtcttcttttttataacaagcattctcactaccaagcaggaattacgccgttagcattagtttggaaggacgagaactgtagtcaatatgttttggacacagacagtaaaggacaggttccaaaccaacagcaggtggttttggagcttcaagaagatggaaaactgactacctcagatgatcctcctgtggtgtttggctgtttagatggaagctttatacaacagtcagggctgcattcaggatgtcttctacggttttcaattggagagggaggatttgttttgatggatgggaagcttgagaaagccgatctacattatcttggcaaggccaatcgagctcgtgcctctgctgatagtttttctaaggttatgttccaacacagtgttcgacactctcccctcagaattgaaggtctgctggaatctgtcggtttaccagttgatcaagaaagcaaagcttgtgatattgagatggatggttgacaggaatgcattatgagttgcatctgtttttttatcctgagcgcaatgttaagatttttcaccttaaatttttggttcactaggatgcttatttctgtgaaggctttcataatttatattggggattcagaagattgataactaccacacttgctgaggcagagacttgaaatagtcatacctattgactattgtgatttgtaaacgaaatttcttcaacccagatgggagcaggtgcacatatgcatgttatccttctattgtctggttcatttgatgcctggtagtctaatcgttgtatttgattgagttttattatttcgagccatgtagtgtgtatggtgtagcatatcaattgtacagtctattaaaattttaaagttgaaatcactacatatatgaagtt

SEQ ID NO: 24476 - DNA, 461 bp, Glycine max
  Clone ID: PAT_MRT3847_122105C.1
tttttaagaaaagacatgcattttatcgtattttaatcagaaaaagttgaaatgcccatttgctgccaacatatttaaaacgggatagcagaaaaatcaagtatttgactagtcatacccttttttacaatcactagtaagcatctcttctatgttgctacaattatagcaacagttcggatctcacccccatgttaagcaactttaccttcgtattgggtggaattcttctacttcattatcaattacgccataccaattttgtttctgacgggtgtaacaaaataaaaacaattatctaattttcgaagactaccagtacagatatgtgagaaattctagccctaggctcggcggcggcaactaaatcagaaagactttagttctttagtaggggatatatggagccccaataggcatctatgaaaaaaaaatccttttaaaaggaaaacaattggaga

SEQ ID NO: 24477 - DNA, 683 bp, Glycine max
  Clone ID: PAT_MRT3847_122106C.1
ggctcgagacactatttgcaaattggagtcctgtatatttatctgcttctaaagatgagtcggaatccaaagacacagagccagccttttggactggtggtcaggtaacagaagaaggcctaaagtggttactggataaaggatataaaactattatagatctcagagcagagactgtaaaagataacttctgtcaagcggctctgcaagatgctatttcatctggaagaattgaattggtaaaaatcccggttgaagttaggactgcacctacaatggaacaggttgtgaagtttgcatcttatgtttcagattgcagcaaaaggcctatctatcttcacagcaaggaaggagttttgcgaacatcttccatggtctcccggtggaggcagtacatgactcgatcttcatcacagattgtttctaatccaccagttacaccctatgacatgttatctcgtaatacaaatggttctgcaaaacctcaggactcttcaatgactgcagagagatcctccctggaaaaggatatcaattcattgcaagagagtttgaactcaactcataattctgttggaacatttgacaggagtacctctcaaaagaagtataatggtaaaccacaaggtactacagccatgagtaaagtttctactgataacggggaatcatcagaagccact

SEQ ID NO: 24478 - DNA, 215 bp, Glycine max
  Clone ID: PAT_MRT3847_122107C.1
gttaattgcaattctccatatcaaaatagcctttatggcgctggaattcttcggaatccaaacccgggaaaccatgattgtgccagctggcattaaaagaatacggccaaacccgcggggaagaaggcggctttgagtatttgtgccgcccagggtgggctttttcttttttcacccaggggagaacgggcccacaagctggatgtggccccttt

SEQ ID NO: 24479 - DNA, 1299 bp, Glycine max
  Clone ID: PAT_MRT3847_122108C.1
cctaataatatatacctgttaactttaccatctttatcttggagaggttcccagatgatacattatagagataagcataatggtttaatacaaacacaattcttattcacaacagagtagcacgattcctttcaccaattatcaacaatacactgaaaaatctactcactcattttcgtgaatggattgtgagggaagaaaaagtcgtgtttatcttctctaacacaattactttgatggggtggtagcaaacttccaagtatattgcgataaagaaccaaggcctggtgcttccccagcaacttcataaacaggaactgcatcagaaatttcactcaactctgcatttgtaagtttcacagccacagatccaacgttgttttcaaggttcttgattttagtagtcccagggatagggactatgtcatttccctgatggagaaaccatgctaaggctaactgagaaggagtgcatgaatgtttagaagccaaatcagcaattcgattatagaaaagcttgttcttttccaaattttctccactgaacctggcatcttcagccagtgcgctctgactaggcaaagtctctaccgctgccttccctgcgaaaaagccatgacctgcatccctgcgaaaaagccatgaccaagagggctatatgccactatcccaatcccaagttccctgcatagtggaataatctcttcttcaatgtcacgggtccataaagaatattccatttgcaaagcagaaataggatgaacagcatgtgctctctttatagtgtcaggactagcttgagacaagccaatatactttatctttccttcgtttaccagctttttgagctcccccatggtgtcttcaattggcactgaagtgtcaactcgatgttgatagtataggtcaatgtactcaacatcaaggcgcttaagactagcttcacagcactgccgcacatattcaggagtaccttttaccccagcaaacaccccatcagatctaacaagaccaaattttgtagccaactggactttttcccgaggaagttcttttaaagcctttccaatcataatttcattatcatgattaagtccataaaaatctgatgtgtcaaagaaggtaacacccatattgaatgcttctttaataattgaacatccagcttcgtgcgagaggggagcattataaagtccagatagtcctacacatccaaagcccaaccttgatatcatgaagccttgacttccaagcttaactctcgggacatgcagctgcaacttctccattttcaacgct

SEQ ID NO: 24480 - DNA, 260 bp, Glycine max
  Clone ID: PAT_MRT3847_122109C.1
cactcactgagttgctggaacgaggggagaggctgccacggcccgacaaatgtccctgtgaggtctatcatctcatgaagaactgctgggagacagaggcgtcctttcgcccaaccttcgagaacctcatacccattctgaagacagtccatgagaagtaccaaggccaggccccttcagtgttcagcgtgtgctgaggcacaatggcagccctgcctgggaggactggaccaggcagtggctgcagagggagcctcctg

SEQ ID NO: 24481 - DNA, 160 bp, Glycine max
  unsure (1)..(160): unsure at all n locations
  Clone ID: PAT_MRT3847_12210C.1
cgacacactaagaacaaagaggngagctgcctcattcgatcaggctgtttcaatatcgcggagctccatggacaactgagatatcaacacactacgagagtgtgtgcatccagcaaacctctgtaaattgctaggatttcatgcacgtgatggttctgaa

SEQ ID NO: 24482 - DNA, 136 bp, Glycine max
  Clone ID: PAT_MRT3847_122110C.1
accggtacttaattcccgactcgacgccatctcgtccttacggatacaacaaaaggatacgggttcttatatacctcttaacgacacattctggttgataactccccatgttctcgccttattcaaacactcctaa

SEQ ID NO: 24483 - DNA, 239 bp, Glycine max
  Clone ID: PAT_MRT3847_122111C.1
gccaattggcctcttatccatgtacctgacctcacttactcaaataaaattttattgttgttgtttgtagtagtggaactctgaattccatgctgaggttcctaaggcttttaataatttcccacctacctgttggtttggccattttggttaacaattttccatttgcacctgaaaagtcttattactccttccttaagttttccgtttttttggcccacctttccggattggttgtt

SEQ ID NO: 24484 - DNA, 1091 bp, Glycine max
  Clone ID: PAT_MRT3847_122112C.1
gagaaacaacgaaaaatcctttcaataatacccttcatcaaacccaaatggttaaagtgggaacacaatcaggaggcttcaaaagtaaatgactccaatgacaaaatgtaagcaaccaaaaattccaaagaagagaaagaggaaccaccttgtttcaagcaaatctttgccacttccttcaacttccacgctctacctctaatctccttccgttcaacattggcatccatcaatcttctaatggtcctctctatttcccctctgtccactcccttctctagctgcaatccaaccctccaaacatggctcacatacctagcattcactttttgatcagtgaaacaaggcatgcatatcataggaaccccttcacaaatactctccaaggttgaattccaaccattatgagtccaaaatgcacctattgttgaatgagccaacacttctagctgaggggcccatttcactattaggcctctcccttccaaattctccatgaacccacttggcaatggttcaagccattccgagcccttgattaggcccggtcgaaccacccacaaaaatgggtgcttattattgactaaaccccaagctatctctatgaactcagtctcagttattgcagcaacattgtgaaaagggcctattgggaacattggtatggaaaattcttggctcagagttgtgagtgcagatgattccaactcttcaaaggagttccaaatcactcttaaggagcccttagtctctttgacgaacatgcgtaatagttcatagtatttttctggctcctctgtcttaatcataggtaagtctttcactctgagtggtggtagctcttccactggctcctccaatttgcattcttgtatgggtacgtaacctttttctctaagtaatggaaaagcggtgaaagcaacaaaggaagaaactccaccagttctcaacacaatcctcggcagctgaaggctgtcggcaaccgcttgagtgaagtaacacaaagcatctgagatcaaacatgaaacaagttcttccttaagaacgagaatctcaggatgaccaataacatttattttatccctaagcat

SEQ ID NO: 24485 - DNA, 398 bp, Glycine max
  Clone ID: PAT_MRT3847_122113C.1
ttgttgataccttaattagtgctcatgaagaggggcttctttacttcagtgggggttaaccgaaacgctttctagctggtcataatatcaccatctctgatggtattgacaaaactagtgcgactttgcaatttataaagttagcagatagagattttctcaatagaaactttaagcagatgtctaatgttttgtggctggctcctgaggacaaggcgagtttatggtcacaacttcattacgtttcgtgtaataatctggaaatgcaagaagcttatcttgtcaatctcgcaaatgtgttacgagaattgtatctgcacagtgcttagacagctcgcctagccaccttgaaagctctctctcgtattgaatggctgcaaacagctgatccgcctacc

SEQ ID NO: 24486 - DNA, 302 bp, Glycine max
  Clone ID: PAT_MRT3847_122114C.1
gaacccattcgcttacgaacaaccatactctctaaaaaattgatggtctcaccgacgagcgagtggcataatcgaaggccatgatcggcggtacaaacatgttcatcttcagatccatcctcgacacaccactcaagcaactcatcggtgatcacatttctgagctcactcgcgaatactgtctcagattcctcaagaaaccagggatgctcaggccatcctgcaagatatcgcatgtcatccaacatgtcatttcactgaaaacgctactgaggaacttctgataatgatactcctcttcc

SEQ ID NO: 24487 - DNA, 1002 bp, Glycine max
  Clone ID: PAT_MRT3847_122115C.1
cgagaagatctgcgaggagaatgaggagctgaagcgtcgcgtggaggcgcagagcttcaacgcgagggacgtggagaggatgaagagggagttgcaggcggtggagagggacactgcggaggctgaacttgcaaggaatgcgttggaggagcaggcgtgggatctcgacaccactctctcacacaaaatcaaagacctcgaggctctcggcatggagtgcaaccaagcccttaagaggttgaagattggtaatggaattcaatatctgctgaatgccaagggtactactcctgctgagataatgggaatcgatcacaaacttgtgctgaagcctgcacttagatccttttctgatgaaatcaagaaaagttctatggaaaaactggaggagtccatttcttatcagcagaagtctggtgaaaatgctgttaggcttgaggggaaaagaaatcagcttgcggcagtgcaatcacgtattgatgaaatggaagctcaactgaacaggataaagaaggaaacacatgaatacacaagtagagcttctgctgaagctaagaaaatgttggaggatgtccagctggcagatcatgaaattgacattatggaaagagaggcagctgaggttctcaagacatccgaattgaagttgcaggaagtgattaaacaaagtgaagaagaaattcaaatgcatgccagggaactctttcagctggttgattccgtctcaaaattcaaagaacatgtgggttccaaaatttcagagattgggagggatctatctgaaactgccgctgctgtctcagatacatataggggagcttgtgtagatatagatattgagaggaaaaaaatgagagagagaaaataatttaatatatttacttcgctttagagttatgtagtttaggttggtgaatttattaaaggagaaccttacaattgtaacttccattttctaacctttaatctatagtgttgttactctatgttaaaaaaaaacac

SEQ ID NO: 24488 - DNA, 423 bp, Glycine max
  Clone ID: PAT_MRT3847_122116C.1
ttctccttctcaatcttataattctatttccttcaccataatacttctcaatcttaagtcagtttcattcaaaagacaatcctaacacatttcccgttcacctcaacatctataatctcaccccaatcaacttctatacctatttacttatccttcaactctaccattctactgttcaacttcatctattttaatattcttttatatctcactatcactacacaactttcattttctaaatccaacccaaacactacccttttttcactttcacaaattcaattttcattctaacaacatatctatctcctatatatcttctatcattcatttataactttctcattatttactccttaacacctattatctcattttcaacaaattcaaccattttttctaaccatatttttttcaaattta

SEQ ID NO: 24489 - DNA, 417 bp, Glycine max
  Clone ID: PAT_MRT3847_122117C.1
cttacgtttgatttgtcgcatgggtaatattaatattaaattgcctgggggggttggtgttcaagatccagacctcttccaaaggaatagctcatacttcctgctgatcacccccctaatgaccaccgtttttggcgggcaatccagaaccttaagatcaccgctccaaataaaggcactgcgtgccatcctacaccatcaataatgggccctctgacaacgctagttgaacctaccgcttctctgacctccccttatgagacccatgtgaatcaaatgacaagacagatgccctcggggatgtgctgtatgtagaccgcctcgatcatcgcgccatacatgcttgtgtttcagcccgacacgacgccactctccgtgagctccaggatgctgttcaccatggacttagcgcggatc

SEQ ID NO: 24490 - DNA, 278 bp, Glycine max
  unsure (1)..(278): unsure at all n locations
  Clone ID: PAT_MRT3847_122118C.1
ttccaatatattccattctctctgtgtatntccctanctctcccttcaagatgcagatnttcgtcaagaccctcaanggcaagatcatcannnttgaggtggaaagctctganaccatcgacaacgtcaaggccaagatccangacaaggaangaatcaccncggaccagcaacgtctnattttcgccgggaagcaacntgaggacggtcgtnacccttggtgactagaanattcagaagganantaatcttnactangtgntgcgtntccgtggtgg

SEQ ID NO: 24491 - DNA, 280 bp, Glycine max
  Clone ID: PAT_MRT3847_122119C.1
tagggacccagaagaatgagtgagagtcggtgaccaatgggctacagctgaaagacaagctccttcgatctacaatctatatctattacgctctcaatttccgagagtgctctatctctttctctcacacatagtcagcgcgatttgcacgcatatttccatcatgatgtctgctactaaactcaaatctgtcgagttgtacaggtaaatgctgagagatacgactgaggcgtcgccatcagggacgggatcatggatagtggcagttctcggtatgatg

SEQ ID NO: 24492 - DNA, 607 bp, Glycine max
  unsure (1)..(607): unsure at all n locations
  Clone ID: PAT_MRT3847_12211C.1
aggtgggggaaaaaaggaagcatttaaaaaatgtgcaccactaccactaatctgtctttagtgttataaacgtaatactagaaatattcaaagttcaagactaaaatagaatttgaaacacatagtttggccatggtcaccggtaaatttcctactcccttagagttgagagccatgtttcaaagttcccacccacatttgccatgtaaaatggcccaggattgagaatgatggacaagtttggagaggctgtctgaaatgatagcaaacatccagttcagcggcatgaatccatgagcaatcatcaacaaaccaaattgtaatcttcttcattacttcaccatttgttattacatatttaaggaattccacctcagttttttttcctgcaaatcccattatgctaagggtctttagttgttgatcgatgcactcacatggctcctttctacggtagtattccattgcatcatcctcatcatgttgatcatagnaatccactgcgtttgcattaatctcgctattaaattcaagattttgcaactttgggcatgccttaagagctgaaaagagggtatggcatttttactgtttcaaatcaaaatca

SEQ ID NO: 24493 - DNA, 249 bp, Glycine max
  Clone ID: PAT_MRT3847_122120C.1
attctccctctcgagctgtcagctactcacaccaatgaatgatccagagatgacgtttgcaacaaacacgaggtgtccgacttctgcgccggcgatgaagacgacctctgagacgactgcgaccaccgtgtcgaccatgccaactaactcgactcagagacaccaacgcttctctcttctccgaccttctcataaacaacaccctctctgtgatatttggcaggcaaatcaatcaaccactttcacttg

SEQ ID NO: 24494 - DNA, 451 bp, Glycine max
  Clone ID: PAT_MRT3847_122121C.1
gaccgaaggcacaatcctcgtcatcaatgttctctgctgcatcgcccacacttgcagcgcctccaaatggcagcaccagcaagatagctgctcgaagcaggtccagggggtgaacctgatgcactgcgataatcacgtcatggagaagatccaaggccgcggcgatgacgataatgatgatgacgacgacatgccgttctcacgaccatgcagggaagaatcactacataatggagacaaagacaagactgaggactaataagaagacgactcatgccgaagggctgcgcagaatgagcgagcgggaagcgacagatgccaggcaaagcgcgtgcagaagataatggagaaccagagcgagaaactggtggacatgcgtaacaagaagatgggaaaggagctcattaactctgctactataagcaggtagagacccatgatccagtgcgac

SEQ ID NO: 24495 - DNA, 484 bp, Glycine max
  unsure (1)..(484): unsure at all n locations
  Clone ID: PAT_MRT3847_122122C.1
tccacgcgtccggtcccaggacgaggagcaggtccgtgaccactacgaccgcggcgacgacttctacggctggttcctcggcccgcgcatgatctacacgtctggcatcatctcggacatcaacagcgaggagtcgctcgagcagctccaggacaacaagctgggcgtcgtctgcgagaagattggtctgcaaaagggcgagaggatgctcgacattggctgcggatggggcaccctcgcccgctttgcttccaagcactacggcgccaacgtcaccggcgtcactctcggccgcaaccagactgcctggggcaacaacgggctccgcaaggagggcatcaccgaggaccagtccagattctgtgcatggattaccgcgagattcccgtgccccagggcggctaccacanaatcacctgtctcgaaatgggcgacacgtcggtgtccgccacttggcggtttctgcgccaggtgcacgacatgc

SEQ ID NO: 24496 - DNA, 216 bp, Glycine max
  Clone ID: PAT_MRT3847_122123C.1
tacgtaaactcgaatgcgctcagagaatacataaatcctcaaaaacctctcattaaactctatgttcccctcccctcctctctcacaatgcaaattggttaaattcacgaggggacggcgtccatcatttttttctgacccaattgataaccatcctctcccaataaccttctaactttgtatactacattacaaccagcactcctttttcaatac

SEQ ID NO: 24497 - DNA, 495 bp, Glycine max
  Clone ID: PAT_MRT3847_122124C.1
ccactcttagtttatttgctgaacactctcctatttgatataggacttcgtgtcagatttaaacttcttctgtctctttctcagttctctgtttaatttcaagttcaagctggtgaaatcttggattagtactcccactctcctatctggtataggatttcgtgggtagacttttctatttctttcctttctttcactctcttcttctcactgatccgcattgccgttcaaagatggcttatttgaaaaacacttgggcgttggtgcaaatgtttgcttcgctaattttctctggagacaacaggctcactgagaaaacagtttttacttgcatagatttggacatctaggttgtgtattacccagtagcaactcaagttagaacattcctaccgcattacattgagaggcatctgtatacctagcagatctacattctgccatcttttctcactggtgaaattaaatatcagctgaattggagtgacattcata

SEQ ID NO: 24498 - DNA, 1649 bp, Glycine max
  Clone ID: PAT_MRT3847_122125C.1
gaaaaaaaatgtgctgctaccttacaaaggagaatgtgcgagagggagagaaaaaggtagcggagaagatgatataatgtaatttgattttagaaagaaaagaaaaagggagtggatataggcatagaaatagcttccttcgataaacaaagcccaagcgggaaacaagcccaagtagggttttaaagaatacgtcggtacggctgcgagaagcgacagaagggtagggtttcgagagttgttacagccgcagcttgaaacagagcagagcgaccttgaagagctatggctgtcggaaagaataagaggatttccaagggaaagaagggtggcaagaagaaagccgctgatccctttgccaagaaagactggtacgatatcaaggccccttccctcttccaggtcaagaatattggcaaaaccctcgtctcctcgtacccagggaaccaagattgcttctgaaggactcaaacatagagtgtttgaggtctcattggctgatctccaaggagatgaagaccatgccttcaagaagattcgtttgagagctgaggatgttcaagggaaaaatgttctgacaaacttctggggaatggatttcacaactgataagttgaggtccttggtgcggaaatggcaaactttaattgaagctcatgtggatgtcaagaccactgataattatacgttgaggatgttctgcattggctttaccaagaggcgtagtaatcaggtgaagaggacctgttatgcacaatcaagccaagtcagacagattcgcaggaagatgagagagataatggtaaaccaggcagctgcatgtgatttgaaagaattggtgcgcaagttcatccccgaaatgattggaaaggagattgagaaggcaacatctagcatctatcctctacagaatgtgttcattcgtaaagttaagatccttaaagctccaaagtttgatcttggaaaactgatggaggttcatggggattactctgaagatgttggtgccaaggtggacagacctgccgatgaaacattggctgaggaagccactgaagtagttggggcttgatctggctcataatgcatttttgttattttagaattcctgtttctcttacaaatattaattttcagttttgttttaatatttagaaacacatttgttgcaaatctaaatctggatttttgttttgtcaaggttttttggtacaacccaataactaaacacggtatgaagacgagtaattttcttattgtgctttttttttggtccaattcttgctctttatctcaaatttccttgaccgcagtttcttatgttctaatgaatgttacaatgagctcattatttttctatcctaatgaaaaaggtcaatcattgcagaattctattgacttgtactgtttatttggttggggcaaaaaactatcataaaaaatgcttaggatccactctttccccctttcattattttgtctgtcgatatgttgaccattcttaaattaacgagtcatttggattagaagcatttcttcaagaattatcttacaattcttttttggggggcaagcatgcatgtttaaacttttgttcagtggtgtggtatgactcctattgttatcgatccctgtaggctcatggtgat

SEQ ID NO: 24499 - DNA, 1032 bp, Glycine max
  Clone ID: PAT_MRT3847_122126C.1
gacagccgcagcttgaaacagagcagagcgaccttgaagagctatggctgtcggaaagaataagaggatttccaagggaaagaagggtggcaagaagaaagccgctgatccctttgccaagaaagactggtacgatatcaaggccccttccctcttccaggtcaagaatattggcaaaaccctcgtctctcgtacccagggaaccaagattgcatccgaaggactcaaacatcgggtttttgaggtctcattggctgatctccaaggggatgaagaccactccttcaagaagattcgtttgagagctgaggacgttcaagggaagaatgttctgacaaacttctggggaatggatttcacaactgacaagttgaggtctttggtgcgaaaatggcaaactttaattgaagctcatgtggatgttaagaccactgataattatacattgaggatgttctgcattggctttactaagaggcgtaggaaccaggtgaagaggacctgcacaatcgagcccaattcagacagattcgcaggaggatgagatagttaatggccacccaagcaccagcatgtgatttgaaagaattggtgcgcaagttcatccccgaaatgattggaaaggagattgagaaggcaacatttagcatctatcctctacagaatgtgttcattcgtaaagttaagatccttaaagctccaaagtttgatcttggaaaactgatggaggttcatggggattactctgaagatgttggtgccaaggtggacagccctgccgatgaaccattggctgaggaaccccctgaagtagttggggcttgatctggctcataatgcatttttgttattttagaattcctgtttctcttacaaatattaattttcagttttgttttaatatttagaaacccatttgttgcaaaaaaaaaaaaaaaaaaaaaaaaaaaaaagccccgctcgaatcggacgcgtgggcggacgcgtggggaagacgacagaaggggggatagaagtattcaggtcagaggc

SEQ ID NO: 24500 - DNA, 866 bp, Glycine max
  unsure (1)..(866): unsure at all n locations
  Clone ID: PAT_MRT3847_122127C.1
gccgcaccttgattcataagcagagcgaccttgaagagctatggctgtcggaaagaataagaggatttccaagggaaagaagggtggcaagaagaaagcgttagtgcccattctcttcactttttttttttttttttttatttctattggcgtattctccattttaactctganttgtttcttcttcttcttccgngaatccacagcgctgatccctttgccaagaaggactggtacgatatcaagggccccttccgtctttcaggtcaagaatgttggcaaaaccctcgtctgccgcaccttgattcagagcagagcgaccttgaagagctatggctgtcggaaagaataagaggatttccaagggaaagaagggtggcaagaagaaagcgttagtgcccattctcttcactttttttttttttttttttatttctattgccgtattctccattttaactctgatttgtttcttcttcttcttccgtgaatccacagcgctgatccctttgccaagaaggactggtacgatatcaaggccccttccgtctttcaggtcaagaatgttggcaaaaccctcgtctctcgtacccagggaaccaagattgcttctgaaggactcaaacatagagtgtttgaggtctcattggctgatctccaaggagatgaagaccatgccttcaagaagattcgtttgagagctgaggatgttcaagggaaaaatgttctgacaaacttttggggaatggatttcacaactgataagttgaggtccttggtgcggaaatggcaaacttttattgaagctcatttggatgtcaagaccactgataattatacgttgaggatggtctgcattggcttta

SEQ ID NO: 24501 - DNA, 448 bp, Glycine max
  Clone ID: PAT_MRT3847_122128C.1
gctggcacaccccctgcttaaacttctatgaacacttctccttgattagatatcggatactagctactttatataaatttctcaataaatatttacagaaaaagataataaaaagaatcaaaagaggtaattttgccttatgacttcattattttcttctttttatgaatatttattgagagaattatccgaattagttttatatcgtgtacaacttatttacttttgttacaagttcagatatatacgtatatatgctatgatatagatagctaaacataggatggatatgacattgttgctgtattagtaattttactaataaatatgaggatatggacatcttagagctttaatcttgtaaatttctgttacttttgtagtttgtatcgttgaattgttctggaaatgctcacttataattgtgatttgattaaaaaaaaaaaaa

SEQ ID NO: 24502 - DNA, 197 bp, Glycine max
  Clone ID: PAT_MRT3847_122129C.1
atgccattgaggaccacaaaaggcatgcttccagaaaatgctttgccaatgttgcagatgcagatgtgtcttatctttctgggtcgtctaggagtccccagattcacttccatgggcgtcgacacatttttatgccacatccatttcccctacgactttgtcaatttcaaattatggcattggcaactcttacctga

SEQ ID NO: 24503 - DNA, 474 bp, Glycine max
  Clone ID: PAT_MRT3847_12212C.1
gcaaataagggttttcctattttgccatcttttataaggcggctaaccaaacaagtttttaaagcggacggaacaccctaaaacaaaggccggttttcccaaaaacaacaactaatatgctgaccccaaaatgcaaactataaaaaaaggctttttcatctcgcctaaaaaaaaacaaacccctaaagacataaaggggagacctttttccaatgctaaaaaaaacaggaaattggggccgctatgcacattctttaatggtttggggagggcataaaatcctttcaatttttggaaccaattagggcatcaccaggggaacctcaattattggacttggggggggcaaatagaaaaatgtccaaactaaaaaaagactcctttttgggtgatacaaagctgattccctatggccaaggtttccacaataaaaacaggcccctccatggcccccatatgggacggatgattaaa

SEQ ID NO: 24504 - DNA, 1235 bp, Glycine max
  Clone ID: PAT_MRT3847_122130C.1
aagcatgccacagtgtcttgtcttaagaactgatcaacccaatcattagattttagcaaacgtgggcgatttcgattttgactagacaaaaaacagatagaaatttggtttgtttgtaccataaaattgtatgtactataaactgagggtttattaagtttatctctgttaaagttggtttgttgattcaacagcgatgtctctgtttggtgcttactctatctgtgaagttggcaaggatgcggctggagttgctgggaacatctttgcttttggtttgtttgtgtcccccataccgacatttaggagaatcatccgaaatgggtcaacagaaatgttctccgggttgccatatatttattctctcttgaactgcatgatctgcttgtggtatggcacaccccttatatcacctgataatctcttggtgacaactgttaattctattggagcagcctttcagcttgtgtacataatcctcttcttgatgtatgctgagaacccacgcgtccggagaatggttggattactgctagcagttttgggcatatttgtgatcatactagttgggagcttgcaaattgatgacagtgcaatgcgccggatgtttgtcggattcttgagttgtgcttctctcatttcaatgtttgcctctccattgtttataattaaattagtgattcggacaaaaagtattgagtttatgccgttttatctttcactttccaccttcctgatgagcttctccttctttctttatggattgctcagtgatgatgccttcatttatgtaccaaatgggataggaactgttttaggaataatacaattggtattatatttctattataaaggttcatccagtgaagagtgcagagaacccttgatagtgtcgtacgaatgatctgtgctgtgctgctgaatgatggcaaagtgaaggtataaccaaatgcacaatatgtgatcaagatttatggtcttcacatcagtgtgaggtggttctctgaaattagtaagcgggcattcttcttgtatgaaatagtttccatgagttgaatgagtgaattgtatggttttgattatgaattttttccattcaattcatgtaaatgtttgaattgaaaccttttcacaatattttaattccatgtctggaattgtcttttgtcagcattttatcgttactatgtaagaatggatgtttttcatgaaatgaaaggatgaaacctttgcaa

SEQ ID NO: 24505 - DNA, 402 bp, Glycine max
  Clone ID: PAT_MRT3847_122131C.1
cttaattaggcagctgaataaagacatggagaagcttaagttgtacggaaggaaaaaaagttgccaagctgatgatgttgaggactacctgtctaaaatgcttgaacatgatatttatgatagacatccagacatgaactgcatgtgggatttaggttggaatgatgagacagttgcatttatcgagaaatatgatgttataagggatacagaaaagcatatccttagtcttcttctggatgagatcaccgtagatttttgcatgtgaagaagggggacacggagccaagtttaatttttcatgcatgtgtaatttataaaggtaaggatttgataactgcaagttttcatttagaaattcattctgttttttcggatcaatttagtgtggttcacaaaatc

SEQ ID NO: 24506 - DNA, 378 bp, Glycine max
  unsure (1)..(378): unsure at all n locations
  Clone ID: PAT_MRT3847_122132C.1
accacgcgtccgcaaacattcgtgttctggtgggccatattctacagagaatcctatgtcattaagagcaaatcttgatgtatagagagcagtcaaataccttacattttgcgtataacatgatgatgaccttgatgacatttagagagcatacgcagaagggcggatgccaggtgcagcggtaatgcaacggtcatgtcaggtcttgacagacctcctcgagatgcacctcagagcccgggcttccgtgactgacgacatggtggacgcattcatggctatcagatcacttccccagatgtntcgactgaactcatcataccttcatcatcccaattaatgcgctgatattactggatatctggattcatcttgctt

SEQ ID NO: 24507 - DNA, 491 bp, Glycine max
  Clone ID: PAT_MRT3847_122133C.1
aggctcgacattaagggacactctattagcatggaagcaacctgttttgcaaaaggacagagggctaattgaggagaatttcggaaggatgtcgtacgctgctcataacgtcaatcacacccaagagaaagacatgttgctgggaaaaattgacttcgataataaatctcactctcaattggagaaagtctcctctacaaaagcacaattggttagtggaaaaacctccaaatctgatataatgggtgctggttcacatgcttcacaagatttgcctgaaaaggaagatcaagaaatacccaaatagattgatgcccgattgtgacaaagactacatcctcaatacaatgaggttcacgctcagatggaaacaaatttgtctaaattgcctcttgatgatgttgaaactcctaaaggctccatgtaggatcttaaaatttctcaatgtaaaattgcacttcccaagaacacagttggaggaaccattctac

SEQ ID NO: 24508 - DNA, 563 bp, Glycine max
  Clone ID: PAT_MRT3847_122134C.1
ggcccagatgtctagaaaattcagtaaaaatttcagctcataatttgcagtaaccaattcccagtaatttatacaagttcgtatgttcaagctgctaacaccagcgatttcaacctagaatgattcctgctgctgaagtaaaggtcttagtggtttaaattcttttcctccatcaatttgaatagattaaagcggtgtttgaaactgtttttctgccatagctttaaaaagctgaaaattgttagaaacatcaaatttatgattaagcagataaatctaggtgaatctggaataggcatcaacacaagttaggaaatataagaatccataagatgactctactgaagagggcccccaaacatcaaagaatactaattcaagaggtgcagtataaacagtggaagagggagaagagggtagtttgtgagatttggctatagagcaagaattacaaaaatccctgttagttttattgataaagggtatattacatttatttagtacaatttctagtgcatccttgttaggatggcctagtctttgatgccaaagtttaaaagaac

SEQ ID NO: 24509 - DNA, 449 bp, Glycine max
  unsure (1)..(449): unsure at all n locations
  Clone ID: PAT_MRT3847_122135C.1
aaccacccccccccccccaaacaaaaacccgggcacgaaagaacacactagcattaagattagaacggagaaagtttgtatcacaaaaccatagttgctcattacaatttttcatgttggaccagacttttcggaggatgtaaaaaacttacccccacnacaagaggatatagaaaaccaaatgaattacatacactgaaagggaaccaaaaaccaagatttaaacgatagcgacttgttttaattttataatgcagaccatggcttttttaaaaatatttttttgcactgcaatactcaaccgacataatacattatttcctggcccacaacctgtatcgatacctagtccaaaggctttaagattgacagccttaacattatagccttctacctttatttgcttatgagaattttcaggacttcgtatactttccaaagaaattttc

SEQ ID NO: 24510 - DNA, 305 bp, Glycine max
  Clone ID: PAT_MRT3847_122136C.1
ttgactaggcagtctcagacctatattaattgtctagggcaagggaaatcaacacttgtgaaacccacatccataggttaaggctgcctaaaaattgaaaccaatattggtcatccaacctttcctttgaggggaaatagactttctttcggggccttttcaaaataagattgagtctgtggcccaagcactcagggcaacacgcaagcttacttgcacttggatgaagcccccaaactggcaggttatcttattgaggaaaccgtggcactatgggggtcccctcacttttgcaaacgccgaag

SEQ ID NO: 24511 - DNA, 243 bp, Glycine max
  unsure (1)..(243): unsure at all n locations
  Clone ID: PAT_MRT3847_122137C.1
gaaataatgtgcgggatcatccacaagattgaagagagcctccgtgtnngaaggcacaagaaagaggagcacaaaggagaacaccatggtgagcacaaaggtgaacacaaaggagaacaccatggtgagcacaaaggtgaacacaaaggagaacaacaccatggggagcacaaagagggacttgtggantagatcaaggacangatccatggtgatggccatgacaagggtgagaaaaagaag

SEQ ID NO: 24512 - DNA, 501 bp, Glycine max
  unsure (1)..(501): unsure at all n locations
  Clone ID: PAT_MRT3847_122138C.1
agaaggagcaaggctaatttcttcaggataatgaaagttctaagtggtttgtagcatttggaaggtggtttgatcagatatgcaattggaaaaaccccatcaccaccatactaattcatgtccttttcataatattggttctctaccctgagctaatactccccacaatcttcttgtacctgttcttgattggaatttggaacttcagatggaggcctagacaccctccacacatggacactanactgtctcatgctgatgctgctcatcctgatgaactggatgaagagttcgacacattcccaacttcgcggtcatcggatatcgttaggatgagatacgatcgtttgagaagcattgcagggagagtccaaagtgttgtaggtgacttaggtacacaaggagaaaggttccaaagtctgctaagttggagagatccaagggctaccacactcttcgtcacattctgtttcgttgctgctatagttctctatgttactc

SEQ ID NO: 24513 - DNA, 421 bp, Glycine max
  Clone ID: PAT_MRT3847_122139C.1
ggttaatgctttggctctaagcagcgacgagaatgttgtatattctggtgcatgcgatagggctattttggtttgggagaagaaagagggtgatgatgggaaaatgggggtggtgggtgctttaaggggacacaccaagtccattttgtgtttatctgttgtggcggatttggtgtgtagtggctctgcggatacaacgattaggatttggagaggttgtgttgattcgcatgaatactcttgtttagcggttttggaagggcacagggcttcgattaagtgcataagcgcagtggttgactgcaacaacaacaacaacaacacatcgcagtccgaagcattattatcttttctagtctatagtggcggtttggactgcgacattaaggtgtggcagattttacttccggctagctaaatt

SEQ ID NO: 24514 - DNA, 259 bp, Glycine max
  Clone ID: PAT_MRT3847_12213C.1
cttgggattgtattaataattctttgaaatcagcatatatagcattcttggcagatgctatgcattgattataatgcaagaagctagagacttgatcttcattgcatgaaacaaccgtatcacagatcttatttctcttgtaaatactattcgttcaagatagcttctgatacagtcggccaaaacctattgtagggaccttgttatcaggttttaaacctggctgcctttcttagtttatattttcggaggcagtgta

SEQ ID NO: 24515 - DNA, 343 bp, Glycine max
  Clone ID: PAT_MRT3847_122140C.1
aaaaaaaaataaaaaaaagccgccccctcatgactaggccccccacctattgttggcccggccgaaattttaaaattttaaaagctttctttcccgggaaaagaaaaggataaaaaaacccatttttgtttttttttttgggccccacccacctttttgactttgaaaacccccccggggaccctgaaaagggttgaaaaaaccccccttttttttaaaattaaaaaaaaggtttccgggggaaaacttcaatatttgctcatataaaaacccttcctgccaaaaagagaacctccaattggtccccaaacccagacgggggggtcaaccaaaaaggccccac

SEQ ID NO: 24516 - DNA, 306 bp, Glycine max
  Clone ID: PAT_MRT3847_122141C.1
aattgcttgtctgttctttttctttttttaatggttgacaaacaaaatttataaaaacctctccaaatggcaacaaatcccggggccgtggtttttaagggcccaaaaaaaaacacccaacttgggccccccttacacccggggaataggaacaaaacccgatgacccaacagaaaacccccggttctttttgggggggaaaaaaccccgggagaaggagggccccatccagaccccggggaaaaacttgggaaggggggccccctcccgaaaacacctgcgggggcgaaataaaacaacaccccg

SEQ ID NO: 24517 - DNA, 3013 bp, Glycine max
  Clone ID: PAT_MRT3847_122142C.1
ccccacgcgtccggcgaaatccccaattaacaccgaaacctctgctacgcaaacactccctccaatcgaactccaaatccctatgcatgcggtggcgtgaatctctgatccgccaaaaatgactggaagtggaagaagtaccgttcggagcagagcgagatccgatgccgacgccgacgccgattctcgacgacaaaagaggcctccgttcaatcgacaaagagagagaagcagatacggaagctccattccgatatacaacaatgccaatctcaaagtgctgctcggtatctgcttcgtcgcattcttcatcatctggtttatgatccaccacctctccaattccgtaacggaaccgaagcttcctcgcgccgtcacgccatttcccgcgccaaagataatggaccttcctcagtttgaaggtgagcacaaggagagtttgtattggggaacttatcgtcctcacgtgtatctcggaattcgcgccaggactccaaaatctttgatggctggattaatgtggattggtgtgaaggatggcaaataccacttgcggcatttttgccgacatgaggatgacctaagtacttatggttggacaaggcacaatggacgtgattttggacatcaagtgctggttgaccatggcatgaccttgactactgggtttttaaaatcaaaagaggaaggcagtggttatggtggagattgggcagttcgaattaatgtgcaaattgataagtccaagtggaatgaggaatttgggattggtgcccagctctttttctatttggctgatgaagctggtaatgccctagatgtaagtagagaaaacttgaacattcatgaggattctttgcttgcatctggctctggagcagatattggagattggcaactacatttgaaatcaaaggatgatttgcagctgcattatgctggatttcgcacacctcactttcacaatttgtctgatctcgtagaggaaaatcttgcatcacaaatacaaaagcatgctcgactgcagctatctgactcattagatgattctccaaatgtattagtttttcagattattggtggatttcctttcacaacagatattgtactaatctctggaactgatttggaaacttctagagaagaagagcgtgtcagtatgcttacaggtagctgcttctggagtcctggggcgggtccgtgggctgtctggttcctcactgtccaataaactgaaatatatagaacaagaatttgatgagaagtttgagaagattttcaatttggccgagaaggtggattccgacgccttacctcttggtatggccgccgttggttccttttttgggcggtccgccttcttctacggccagtcataggctgcgcgttcgtgtcccctgcagcttagagaacatgtcagttatatgtcgtattggtctgctgagctttacacagctgtaccaagtcgatcttcctttccaagaggatttttatgggatgaaggttttcatcaacttataatctggcgttgggatattcatatttcgttggatatcattgggcactggttagatttgatgaatgctgatggatggataccacgtgaacaaattctcggggctgaagcactcagtcgggttccagaggaatatgttcctcagcatccaacaaatggaaatcctccgactctgtttttagcattaaatggtataattaatggattgaagaataatgagtttactgcaacggataaaactgagatctctctgttcctggagcgtgcctttgttcgattagaagcatggttccaatggttcaatacaactcagtcagggaaacagatgagcagctactattggcatggacgaaacaatagaactatatatgaattaagtcccaagacactgtcatctggatttgatgattatccacgtgcttcacacccaagtgcagatgagcgccacgtggatcttagatgttggatgttacttgcaaccgattgtctgcaatacattgaagagttgttggataaggaaactaaacctggcaaagtataaatttgaaaaaattatggttctactgctaaattgctatcagatgtcgagttactgaaccagatgcattttgatgatgcacatggtgcttactttgattttggaaatcatacagaaaagattcaacttaaatggaaagaagtggagataggacacaatcatactgctcgccaacttgtcagggttgttttagagaagcccgtattgagattggttcctcacattggttatgttagtctattcccattcatggggaagatcattccatctggatcatggattctggaaaagcagcttgaactcatttcaaatcacagtctcttttggactggctatggactgcgatcgcttgccacgacaagttccttgtacatgaaattcaactctgagcttgagggtccatattggagaggtcaaatttggataaacatgaattacagaattctttcagcgctccaccattactccaaagagaatggaccatatcaggacagagctaaagctatctacaaagaactgagaagcaatttaattagaaatatagtacgcaattatcaacaaactggatttttgtgggaacagtacgatcagaataacggtaagggaaaagggtcacatccatttaccggctggacatcacttgtagtattaatcatgggggaagaatatgacataatttagaataactacgttacccaagcattggaccttttattcactgtggagtaagcaaaccagcaagatcttcatagcatattacaagatggccatctaatttctcataaggctatcatactgcaacaatgtataataaccctccaactcccttggtgggtgtcaaattgtcaatgataatgtataatgtatgggtcatttcaaattaaaagttctgtcaacaaaaataagtggaggcaaaaagttatcattccaaaagttcctctgtgtgtttaggcgtcact

SEQ ID NO: 24518 - DNA, 358 bp, Glycine max
  Clone ID: PAT_MRT3847_122143C.1
acctattacaactcgtatgttatggacggacgaaaattcacactttgaaatgttattgggaaattgtgacaccaaccctacaccaccaaggactacgaaaacaaatattgagactacgccctcgctgttttgcatcctgccttccctgatctgcacgtggctaggtgccagacagactccaaagaagaaaaggaggctgctgaagaatcaagtgatatacgcattgacggtgaagatgagcaagactacagggatgggacccttccttctgctccacgaattgaaacaataagtgtgtgtgcaaagaatcgagcgagattgatgacagctggagaagagacacagctgcttgttggag

SEQ ID NO: 24519 - DNA, 275 bp, Glycine max
  Clone ID: PAT_MRT3847_122144C.1
ttaacaaacccaaaacatgtttctcctttgatcttgttcttctctagtacgcctcatgcagttccacaactacgtgtacttcgaacataggaaacttgtttgtggagtcgagagttcttacttatctgctgagtcatgggttcagaaggtgatgatagctctcccagtgactatgattggaacactgatgatgagcttgaggtgtttggaatacctccctcggatccaaccatttctagtcaagagagctgtgaagatagtgtgggggagagtat

SEQ ID NO: 24520 - DNA, 493 bp, Glycine max
  Clone ID: PAT_MRT3847_122145C.1
gccagatgccgtacacctggtaggcaccgcggctagggctgctgagggtgggccctggcagtgagcgcccggtggctaagcaacaaaggctgtaactaaggagagagatatgaagccattccactcacgtacacggcccacacttttggatatcatggggattgtgtccgtgcccgtggtgagagtggccaaactaccatacgcggcacctaatgcttcaacgggtaaacatgggtaagcaaaaaaggacaaacgatgcgcatagcatatgtggagtagcgcttgagctgccaatgccaaagcggtgtaaccggtaaaagtgcggcccgtaggcggtataatagtggcagaaaccgcaaatgtattaaccgttgctgcgctggccaaggctgagccgactgagcctgcaacaaggcccatggcacagcctaaggtcagtaggacaatagcggtgataagagccacactacaagaggtcttcactacggttggg

SEQ ID NO: 24521 - DNA, 440 bp, Glycine max
  Clone ID: PAT_MRT3847_122146C.1
tttagtcgtatcgaaattttcacaagaggaattcattgcagctcggtcaacaaaggcgcgtgctgcatcaactctggaggctgttgggtgttcatatttgtttgctatgctgcatgataatgcaatgactacaataccatgtgatggtcacattgttggtaaattggcaaccataaccaacatgtgtgcatatgggctcaatcttctaattaaaagaccatcgcttttgggcaccattcctcaaatcattttacagcagactgtttggaattaataggctacagtgggaacaccattggattagtgctctaacaagccgagctggtgtcaaatttctattgaccttctttgtggaggaatttttatggacaaaacttgctactggatcacactgatacaaaatcatacaattattaacttggagagagttgctgcttgga

SEQ ID NO: 24522 - DNA, 443 bp, Glycine max
  Clone ID: PAT_MRT3847_122147C.1
ggctcgagccctgagtctgcctgtgatcgtgaacacaccgaggtgcagcatatgaccatgaacagcttcacaggaacgaccaaccctgctgaagattaactctcagccactatcagtagcaacgcctggtctatacatcgcaggttaccagtacatgacgtctgacagcgagtaatgtttcgacgaaccgcaactggctgcctgccgtacaggagtatccagacagaatacgacgtgtgattaccatacagcatatgctacacctacagctatgaacgtgtgaactgagggatgaacctgatctgccagcccagactcgtatacggtgatagtatcgacaaggtcatgaacgactcgatctcgatccgagaccgacttattgtccaatcggacccagggcacagcatccagatcatcaaggtgccgaatacagttctcgacct

SEQ ID NO: 24523 - DNA, 390 bp, Glycine max
  Clone ID: PAT_MRT3847_122148C.1
cttacgcgtgttaggacgcgggggccgacgcgggggctcattggtgctgttcccccattggggcttctaaaggccctcgcctatgttttgagaaagagcaatgtgctgcaaagctagggattccgttttcgaatcacgagttcgaagagtgtggacttgtggctgacaggctacaggttgggctagggcaaagctgttggacgaatgtcgaacatatatgaccgcgcgtgcaattcccatgctgtactgcgatgtggatgtgttccagcactggttgctcagggtgatatgacctcgctcttaaattcggtatatatgacatcgaactccatacgtagcctatactggaaaattgttgaatgagaaagtgagatcggcgtctccgagttc

SEQ ID NO: 24524 - DNA, 135 bp, Glycine max
  Clone ID: PAT_MRT3847_122149C.1
gtgcaatgtgtgcaattgtttgtgaccttgcgtgcactacatgggcattggcataatattggaaactacataatgcttaacacccaccctcaaaatctgaaactaagtaaaactatttctcatttgacatttacg

SEQ ID NO: 24525 - DNA, 204 bp, Glycine max
  Clone ID: PAT_MRT3847_12214C.1
tgctatagcagatgaaagtgtgatggtcataggatatggcaccattttgttagcaaggccacctcatgttaaggctgccaccggagaagaagcctcagcagaagatttaggaggtgccactgtgcactgcgagacatccagggtttctgattagattcctcaagacggactccatgcacttgcgcttgggctgactataattaa

SEQ ID NO: 24526 - DNA, 285 bp, Glycine max
  Clone ID: PAT_MRT3847_122150C.1
gtaagtttgtgctgctagagagaggggttccgttctgggatactgtgtacataacaattctgactgtttcaacatgtaatgtgtccgagcttgcaaatgttggcaatcacccttattgagtgtacctagccacatctccacatgatctagacttaacacctattcttatcttctcatcctttctactctgaatccaaaacatgcactgcagcagcagtcacaactcacagacataccagtaggatgcatagactcatcacgcatctaagagaacctcatcctcag

SEQ ID NO: 24527 - DNA, 258 bp, Glycine max
  Clone ID: PAT_MRT3847_122151C.1
gtacgtaatctctaattcaactccatacataatactccagaacggcatatttttatgatattctcacctcttttattctgtgagtgccatatatagaaataaagcggcacattccttctttgaactccatcttccatactttagtctctaaaacatcttacatcattcctttttaactaattacttccttatctaatgctattttaaacttatatatcctcactcattcttgcacttaattttctctctcagcctaac

SEQ ID NO: 24528 - DNA, 355 bp, Glycine max
  Clone ID: PAT_MRT3847_122152C.1
ggctcgagcacacatcttcacatcaactatgaatttctcacccaacacctgtattttactgctgctccattaattctgatcataagaaactgactctttttattatcggggagctaaatattttacttgatctgctggaacttacacggggtgactttgaccaattctgagtctctgacgagaaaatattagtgggatttgggtagaacgagggaaaggctcgaactttgcttatagcagaccccggatctttgggggagaaaatgtgaaccttgcacaatgtgttgatctgatcgccaaagaaaatgaaggacaaacatgctttgcagtttcaggggatccaacttgctcctct

SEQ ID NO: 24529 - DNA, 210 bp, Glycine max
  Clone ID: PAT_MRT3847_122153C.1
ttaactaaatatgggcatgaaaattaaaatgtgagaagaaacatgtaacatcataataataatataattataaccataataacactaacgacgaccataataatcatttccttaacagcggaggacattccaccaacacaaccaaaaccaagacttgggtcctcccaccattatttctaagagagtggccaatctatgagatcccccctt

SEQ ID NO: 24530 - DNA, 168 bp, Glycine max
  Clone ID: PAT_MRT3847_122154C.1
catggaacgcaagtctaagaaatgactttaaaacctcgtgtactgaccaagattcggattgattgggattctggaatgaacgagaccattaaatctcctaattacgtgcagacaggaatggtacctattaattcacctattggcccaatcgtccatatgacaattttg

SEQ ID NO: 24531 - DNA, 491 bp, Glycine max
  Clone ID: PAT_MRT3847_122155C.1
gccactcctccacccctcgccgccccaacggcctcaccgtcctcgtcaccggcgccgctggcttcgtcggcagccgctgctcccttgccctcaaaaaacgcggcgacggcgttctcgggctcgacaacttcaacagctactacgatccctccctgaaacgctcccgtcaggcaatgctctggaaacaccaggttttcatcgtggaaggtgaccttaacgacacccccttgcttgagaagctcttcgacgttgtccccttcacccacatcctccacctcgccgctcaagctggcgtccgctacgccatgcagaacccccaatcctacgtcaccgccaacattgctggcttcgtcaacctcctcgaggctgccaaatccgccaatccccaacccgccatagtctgggcttcatccagctccgtctacggcctcaacacccaaaaccctttctccgagctccaccggaccgaccaacccgccagcctttacgcc

SEQ ID NO: 24532 - DNA, 2043 bp, Glycine max
  Clone ID: PAT_MRT3847_122156C.1
ggaatgaagaaaatattatatggataaaagaaggggagagatcagcaacctttgtggcagaccccacacacagcattattacagatcgatctacattacaattacatacacttgtttctgtttgtttccatgacatttatatatatgcatgtccttcatctataccagatatttatatgatgtataattgctacaccaccacaacaataacaataataataataataatgattcaacaaaaacaagaaaaatgatccatgagcaaggggaaggtttttttgttttttttttcttgccgtaaaaagaacaaaatagaggagagataattatagaaatggtcattcaatattgtgaaggtgattatcctttttcaggcttggctggaggccgtaataaccgaggtaccacttgacgaacttgctgagaccggtggagagatcggtggtgggtttgtaggcgaaatccctgaaggccaagctgacgttggcgtgagatatgatatttatattatgtataattgctacaccaacatgcatttggatccatggacacggaccaccacaataattaagaaaaaataatagtaataattgaagaaaaaacaagaaaaatgatccaaggtaggtatttgaattatttgtttttctttgtttcttgtaaaaacaaaaacaagggcatgtggtgtgaggataattaaggcttgggtacgtacgtaggtgattattcattgtcaaggtgatattccttttttagcctttgctggaggccgtaataaccgaggtaccacttgacgaacttcctgagaccggtggcgagatcggtggtgggattgtaagagaaatccctgtaggccaagctgacattggcgtgtgtgaagggaacgtcgccgtttgatggcatcttaatgacgtgcttcttggccttggtgcttagcagaccttccagaatggacaccaaggtcccaaccggcaccggtgaagtgttccccagattgtatactctgagctgggcggggcccttcttcttgccgccgctcccggtgctcttctgggcggtgtccagggctcccaggcagcctttaacgatgtcgtcgatgtaggtgaagtcacgggccacctgcttcccctcctgcatctggtacacgtcgatggttttcccttggaggatgtccttggtgaagaaaaagtaagccatgtcgggtctcccccaggggccgtagacggtgaagaagcggagtccggtgagggagaggccgtagatgtggttgtaggtgtgggcgatctcctcgccggctttcttggtggcggcgtagaggctggcgggttggtcggtgcggtggagctcggagaaagggttttgggtgttgaggccgtagacggagctggacgaagcccagacaatggcgggttgggggttggcggatttggcagcctcgagaaggttgacgaagccagcgatgttggcggtgacgtaggattgggggttctgcatggcgtagcggacgccggcctgtgcggccaggtggagaggatgtgggtgaaggggacgaggtcgaagagcttctggagcaagggggtgtcgttgaggtcaccttccacgatgaacacttggtgtttccagagcattgcctgccgggcgcgtttaagggaagggtcgtagtagttgttgaagttgtcaagccccaggacaccgtcgccgcgcttcttcagggccgcagccccagtgacaaggacggtgaggccgttggggcggcggggggaggcggagtggcggacctgcttctcccaggcgccgaaggaggaggaggagaggaagtagtgggagtgggcgtggaggtggcggtgggtggagtcggtggcggagaggggagggtagttgaaggtgaagaggaagacgaggatgagtgcgaccaagagagtggcgcggaagaggagtttggaggaggcgttgaggagcttggtgctgttgagtctccggatgtagctgttgtatcgctctagctttatgctcttcggacgcgtggggtcgacccgggaattccgg

SEQ ID NO: 24533 - DNA, 600 bp, Glycine max
  Clone ID: PAT_MRT3847_122157C.1
ccacgcgtccgggaaaatatataaagaaacgcgttttgtcgtcccattttgagcataactctttgtttcccacttgacccctaaattcgtgcccattcccacaactgcacattcttctttctatatattccaaatcccttttccgatttccaccaaaatctaaaccgaaattcccaattacccttcccaattttcaccaaaacctaatactcccacaccaatcttcgatcatggacgccgattcacaacctcaacaactcgaagagagaacagaggagcaagaactgaagtacctggaattcgtgcaattcgcgaccatacaggctctgatgcgctgcgccatcctctactcatacgccaaggagcgcgcgggtcctctgaagcccggtgtcgacaccgtggaggaggccgtgaagaccgtcgtggctccggtctacgataggttccaccttgtgcccggcgagggcctcaaatactcggatcggaaggttgccgagttagacagccacgttccctccaacgtgaagaaggtctcctcccaagcctgctccgtcgtctctgaagttcgccgcgatggcgtcttcgcctacgccaagaccg

SEQ ID NO: 24534 - DNA, 3073 bp, Glycine max
  Clone ID: PAT_MRT3847_122158C.1
cccacgcgtccgcccacgcgtccgcccacgcgtccgcccacgcgtccgcctaaacctaaacataaactgaatttcccaaatccccttcccaattttcaccaaaacctaatactcccaaaccaatcttcgatcatggccgccgaatcacaacctcaactaatcgtacgttctatccattttatttgctttccatccttattattctattttccatgtgttggtttgaattttcagaatgagactattctatttccgacatgtttgttgttatctacggttttgctttgattggttttttttggaatgagagtattctttatttactagaggatttttgttttttttcaaaacaaaaaaggttccctctacggatgaaaaggaaagataatatatataatttgttgaataacagaacagagaaacaagatgtgaaatgaaaatgaaaacatatggataaaagaaggggagagatctgcaacctttgtggcagaccccaccctgcattattacacctttctttctctttccttacagatctacattacattacattacatacacttccttgctgcttttgctttctgtttgtttccctgacatttatatatgcatatatatccctcatctatatatacccgatatttatattatgtataattgctacaccaacatgcatttggatccatggacacggaccaccacaataattaagaaaaaataatagtaataattgaagaaaaaacaagaaaaatgatccaaggtaggtatttgaattatttgtttttctttgtttcttgtaaaaacaaaaacaagggcatgtggtgtgaggataattaaggcttgggtacgtacgtaggtgattattcattgtcaaggtgatattccttttttagcctttgctggaggccgtaataaccgaggtaccacttgacgaactttctgagaccggtggcgagatcggtggtgggattgtaagagaaatccctgtaggccaagctgacattgcgtgctaaattggaaacagtgagcgtcaaacgaccctctcgtgcctacgttcagcagagttatgaaatacctttcgaggaaaccctttttgtcgcccgtttctgagcgtaactctttgttttcgcacttgacccctaaattcgtgcccattcccacaactgcacattcttctttctatatattccaaatcccttttccgatttccaccaaaacctaaacctaaacataaactgaatttcccaaatccccttcccaattttcaccaaaacctaatactcccaaaccaatcttcgatcatggccgccgaatcacaacctcaactaatcgaagagagaagagaggagcaagaacttaagtacctggaatttgtgcaattcgcgaccatccaggccctgatgcgctgcgccatcctctactcctacgccaaggagcgcgcgggtcctctgaagcccggcgtcaacaccgtcgaggaggccgtgaagaccgtcgtggctccggtctacgacaggttccacctcgtccccggcgaggtcctcaaatacgccgatcgcaaggtcgccgaattggaccgccacgttccctccaacgtgaagaaggttctcctcccaggcccgctccgtcgtcctccgaagtccgccgtgatggtgtctccgccttacgccaaaatcgtttactcgaagtatgagcccacgacggagcagtggccgtctccgctggacgaaacacacgcagtgccgctgttgcccctcttgccccgtggcgacaccgagggggggctcgtgaacgcagtcgtagagcgggcggatgttggctgtgtggagggagctcgtcgtttgatgcttcttattgacgtgcgcgatggccttggtccctagcatcccttgtggtgagtacacggtccacggtaccggggtgttctcgcggagcagtgtgccgtctctgcatggcggaagctcaaccagcttccgctcttccctcagtggccaatgtcgtgttgcccaaggctgcctattgcactgagaagtaaacgaggcggttgtttcctctgctgagaaaggttacagggtttctgcttatcttcctttggtgcctactgagaagatcgccaaagtcttcggtggaaactgatctcgatctattgcggttttgaatttctgatttttcttactttctagaagggtgatgttgctagcaatgttagtggtgacgtaggattggggattctgcatggcgtagcggacgccagcctgagcggcgaggtggaggatgtgggtgtaaggggacaacgtcgaagagcttctcaagcaagggggtgtcgttaaggtcaccttccacgatgaaaacctggtgtttccagagcattgcctgacgggagcgtttcagggagggatcgtagtagctgttgaagttgtcgagcccgagaacgccgtcgccgcgttttttgagggcaagggagcagtggctgccgacgaagccagcggcgccggtgacgaggacggtgaggccgttggggcggcgaggggtggaggagtggcggacctgcttctcccaggaggcgaaggaggaggaggaggagaggaagtgggagtgggagtggaggtggcggtgggaggtgaagtctggggcgaggggagggtagttgaaggtgaagaggaagacgaggatgagtgcgactaagatagtggcacggaagaggagtttggaggaggcgttgaggagtttggtgctgttgagtctcctgatgtagctgttgtatcgctctagctttatgctcttgctagtgtccggaggagaagaagaacccattattatagttttgagtttcaagcccaaaggaaatacacacatatatcaatatataccactttctttttctccttactatcacactctcactcatcttatatattgcatactttattacttgtattatatattatgctacgtaggccttcccaccacgtcctaacatttcaactctttctgttcccttttcactccccattcctattcttctttaacaaaccttttgaatttgattgaaattccagggatgagattctatttg

SEQ ID NO: 24535 - DNA, 150 bp, Glycine max
  unsure (1)..(150): unsure at all n locations
  Clone ID: PAT_MRT3847_122159C.1
tcgagcgggcgtgcgggaccaaccatgtggcctagtttcgtcttctacccgtctagcgacgaagaaatcgaacactctgagcacggagaataaggggaatccnaataataaccagatttatgatcacgaacaggatcagaatcatagtca

SEQ ID NO: 24536 - DNA, 378 bp, Glycine max
  Clone ID: PAT_MRT3847_12215C.1
cagccctgccacaggactgcgttgtggaaaaaaccgacagggtgacgaaatacaacaccaacgccggtggtgaggaccgcgaccggatccaggccatcgccgagggccaggcccggcgcgagacgccggcgcggaaggaaaacccctgcgtcaccggaacggggaagcctacgctgacgcgagcgcggaggagtaataatgaaggtggatggaaggaacgtggttacgaggcgggatcccgggccaggagcgagatgaacgagcaactcatgaattctaacggtcctggcgaagcgcaggcaaggaccaggtgtacggaggaagtatacacccgccacaagctgaaggcgtgggttggaacaaggaggacgaatggag

SEQ ID NO: 24537 - DNA, 290 bp, Glycine max
  Clone ID: PAT_MRT3847_122160C.1
ttttgttttttctttaacaacatacctttttttaaccttatgaattttgttttttgggttcttttgcccattatttcttttggaaaattttaacaagaaatcctcattaaaatatcacaaaataaactcgaagaagacctacccaaacacaaaactgatccaacaaatgaaaaccacaaccgagcttgcaaaactcacgccaccagaaactataaagaccaaacaaaatatccgaacttaactgttggagccagacagaacatcaaacagcccacagcacctcaaccagg

SEQ ID NO: 24538 - DNA, 403 bp, Glycine max
  Clone ID: PAT_MRT3847_122161C.1
aaggggaaggtcaaaaatgatttaaaaaaaagggtagggtttaaaaataatctccaatgaaggacaatttttaaaaccgggggtttttttttttttttttccgggggatgggtggatgaaaaacttccaaaagcccaagattttaatgccgtttttacaatgttttttttacacccttgaataacctttttcgttttcgttttgctccatgaattcatctttgaactttttgaaactttccataatttcgggcttgttttcctcagctggaaaaatagttgccctcaaagggaacacccttttttttttaccaaattctgaaccaaaaacaggggttttccccggggtttccaaaagcttgggggaggagaaaacatttggaacctttcccccctttttaaca

SEQ ID NO: 24539 - DNA, 205 bp, Glycine max
  Clone ID: PAT_MRT3847_122162C.1
tttttttttttttttttttatctggggtggtttttttttgactggaagtctctcaacaacaaaaccctagcaagttcgtagaccaacaaaaaattaccggaacgaggttcaatgggaaagaacattgacagaagactatgcaaaaaactctattattgactgaaaaacaccccaccaccagtcctcattacacaagaacattgtg

SEQ ID NO: 24540 - DNA, 459 bp, Glycine max
  Clone ID: PAT_MRT3847_122163C.1
tttgagcattggttgccgcaccttagaaccggaaacagaagcaatcgttgctacattacaagaattgctcaattgcttcctacttctttgtgtgcgacctcttaagggaaagcaaatcactctctgtgctggtcacagacttcacgaatcattttcttttccactcttagtttattcgctgaacactctcctatttgagataggactgcgtgtcagattcaaacttattctgcctctatctcagatctctgatgcaaagcaagtccatgctggcgaaattatggattagtgcgtccactctcctatctggtataggacttctggggtagactttcctatttctctcctttctttcactctcttattatcactgatccgcattgccgtgcaaagaggtcttatttgaaaaacacttgagagttggtgcaagagaatgcttcgcttattttctatggagac

SEQ ID NO: 24541 - DNA, 485 bp, Glycine max
  Clone ID: PAT_MRT3847_122164C.1
cttcatttttttttttttttttttattttttttttttggagggaaacttcaaaatatattgggtatgggaagatactcacagccaagtgaaatattggaaaatatttttccccactatttggggtccagaactgacgaaaactaaaacacactttggggagatgatctttccgaaaggtaaagtggatttgtcttacccgcgtgctgataggagatcactcttatgtttgtctacgggcactggtcaaaaacaattaccctatcactgctgctgctgatgccttctacattggccatatggggggataagccattcttaatcctccgggacaaggctacatgctacttatggtggaggagctgtacatatttttttgactgagccccaaagcatttcgggatggcaatataagagaaagggcctttcttttagtggtgggaaaattgtgcttggaccaaaggaactggggtctggggtttggaga

SEQ ID NO: 24542 - DNA, 464 bp, Glycine max
  Clone ID: PAT_MRT3847_122165C.1
ggatgtcctaactcctaagacatggtgaggggatgtgaaggatgggctaaatgtgagtattagaactcatcggagaatgggaattgaactggtataaggtgcttcccggaaaattgtgtgctactaccactatgctacaaggccatcattggcacatatatcagttgttttacttgtattcatggtgtatagtagtcagcatgttataattattttctgaaaggtaattattactctgtggcagtcattgctttgtgatcccaacccaaattctcctgcaaactcagaagcagctcgaatgtttagtgagaacaagcgtgagtacaatcgaagagtgagagaaattgtggagcaaagttggacagctgactaagcttatcttcgcatgcttgtgggcctttgaagtcatgaattagattgcactgctggaataagaatcattgtgccaacttactgaattttat

SEQ ID NO: 24543 - DNA, 449 bp, Glycine max
  Clone ID: PAT_MRT3847_122166C.1
tacggctgcgagaagacgacagaaggggaccaagatgttcacctaaacgtgccttcaatattatgtatcttagccttcgcattgtcagagtgtaccgaacctgatagggatcagcaaaacaaacacagtacaggctgtgactgcctgcttagacagcacaccttatgcctcgtgttaaacctatgtcctctaactaactgattggccttcgcataccggtcagtgtcattcattgaaacatgacaatggcaatgacaattcttttacccataacctcacatgcttgatcacatgaaggctctatatatacccgaccggatcccattgggtgacgttctgtggaaaacctatactgacacgttgaattgtaactctacttactggtgctgacaacttgcacataggtatagaacttgactaagcagagacaatgaatatagtcccttgca

SEQ ID NO: 24544 - DNA, 389 bp, Glycine max
  Clone ID: PAT_MRT3847_122167C.1
gtgacctggtaattcggacacagttccgttttattttccttgttaatatttcatcctgaatttcctctgctaccagtttctctagaatttgattctcttatttcttagtttattgcgatggattcgagttcaacccaggaattcgaatatttgtttaagttgttgatgattggggactcaggtgttggcaagagtagtctcctcctctgtttcacatctgattcctttgaagatctttctcccacaattggtgttgattttaaagtcaagtatttgacaatggaaggtaaaaagctgaagcttgccatttgggatacagctggtcaagagagattcagaacattgacaagttcttactaccgaggtgctcaagggatcattatggctta

SEQ ID NO: 24545 - DNA, 510 bp, Glycine max
  Clone ID: PAT_MRT3847_122168C.1
gcatctagcatgcaaagcttttgtgcatttcctatagaccttgtcggcggaggaattctagtggacatactgaagactggacacacttatccaaacttctccaattactaccttgccagagagttgctggttggaataaaggtcgtttaatggtcaacattgcgatgtctgggaatgcaccagtcaaaaagagtgattgggcctcattggtacaagtgtttttaacaaacaacaacactacacagcattttgatgcatgtaagcggacataaccataaccacattcctgagaattaatcttcccaatcgaggtctgtgggcctaataatggctttgaaatgtggagttctgactgggcaaatcaaacttcttggcattcgagttaccttattgacaatcccatacactctactgcttatgacattctcttgggaatgactcaagattctgaaactgctggtaatactctgatgccagatgtttgtgttcctcaagctactgccatatctt

SEQ ID NO: 24546 - DNA, 252 bp, Glycine max
  Clone ID: PAT_MRT3847_122169C.1
ggcgatcgagcgtgatggatttggaaccctgggaagcacttgacgtggatgacaccaatctctccgccttcctccgcccttgcaactctaagggcgattcctcttccctcattcccggtcctgccggcgccgtccaggccgtgatgaggaaccggcgccaccatgaccccctctccactcaagaatttctaaagcgagttgagcgccaaagtgaccgcgatttcaacagcaatccctggctctgtgccctcc

SEQ ID NO: 24547 - DNA, 352 bp, Glycine max
  Clone ID: PAT_MRT3847_12216C.1
gaaaaagccttgtcacaaagtccaaactttctcctaacataaacttgccggaaattgtgggtcatgaagtttctatttggaagagtgaggtcttcgttgtcataaagtgcaaccccatgtccttattacatattggatttcctttcctttcttccttgtcttgtttcattatttgcacaagggataataggggtcaagaacttagtacaaacattgggagtagtgagatcttaactggtatagatgatgtttttgaaccacgagaaggtttcagctgaaagatgtaaacgtcgttgatgacaagaggagtttggtttgaacttgaaggaggaatatgatagtggaatatcac

SEQ ID NO: 24548 - DNA, 465 bp, Glycine max
  Clone ID: PAT_MRT3847_122170C.1
tacggctgcgagaagacgacagaaggggaccttcttagttgaaactcccaaacaaacgtagtaggaggcaacatgaaatttctcgtttccattacaaaaggcggggcaaactaatcttccagtagtatggcaactgagaatccaattagaatctctgaagctgggagtaaatggccgtcttttaaagaagctgcaacttttggctcaccatcccgtcacatggcaacataggatttgggtatattttttgaatggccataagtttcatggtcgtggaaaggatgtggtacccaacagcagtggcagtgcacctccaagcatggaaggctcatttctggccatagaaagcttgttatcccagaacaccacctggaatgcgagcttgggatctctgaacagagatatgcaaaaagatgatagtggtaaagggtctttatatttgtcacgaggaactcttgcacacac

SEQ ID NO: 24549 - DNA, 171 bp, Glycine max
  Clone ID: PAT_MRT3847_122171C.1
ctgcaggaaagtccactctttagcattgataagtgattacacaaaatgtgcagcaggcggctcaaatagctgaatcgaagaggacaaattcacctataagaatcagagagcacttcagtttcagttacaagacattttacaatggcatgtgcttccttacgtgcaacaaca

SEQ ID NO: 24550 - DNA, 284 bp, Glycine max
  Clone ID: PAT_MRT3847_122172C.1
ggctcgaggagatgtcactccttaattttttcaccaacagaattagggcttatataccgaggcaaatcgaacatggtgaggtcaattacatggaatagtgccctatatcatttagcaaaagaacttccttccttttggccacatgtatcctgtcaaaacctagtaccatgacttgactgattgctacgccactgctgggggtcctttaatgagaataaacaagggcgggcgctgagtaaggacgtttgccatccccgtgtgtaataacggccccatacccgtat

SEQ ID NO: 24551 - DNA, 452 bp, Glycine max
  Clone ID: PAT_MRT3847_122173C.1
gggggtccttttttttttttttttttttttttttttgggggttcctctttccccccccccacccacaaattttttaacgcgaattatgtaaaaaaacttcaccactaaaatgccccacctttaaatcccccatgaatccccccaccatacaaaaccatcttggggggggggtctggaaaggctttaaacttctacccggaaaccaactcccgtagtggaaaaaagtgcgctccatctggtccactatacaaacgtttccccagttttacaaaacggcccaaagaacccctcctttaatccccaaaaaaaggggggtcctgggatttgttccaaacacaaccacaacttttgcatttcacggggggaaaactgaatttcttttttctaacaaaaacaccccaggggggggggcttttattccctacaatggggaaacagtgaaatcccaattt

SEQ ID NO: 24552 - DNA, 246 bp, Glycine max
  Clone ID: PAT_MRT3847_122174C.1
tctgcttctcctctcctcttttttgaatcgatttctctctttcccttcacaacatacatagaaaatttacacaacaatcttttgtgctgttagtattctcctatagttgttcaaatgtcaagaaggagcaaaagggtgtgctttagccccgatgtgaaagacaaaccaaccatctttctcaaatactgtggtgatggtggcaacggcaatgatgatagagtttcaagaaaccggaagaggatcagc

SEQ ID NO: 24553 - DNA, 329 bp, Glycine max
  Clone ID: PAT_MRT3847_122175C.1
aacccagaaatctctccattatcattttgggggtcatcctcggccaagattaacaccctcatgattttttcgggacagcggtgacctggtccaaaagcatttccacaatgataacaccttcctttgtctctcctcttgacatactcagcataaggaatggttcgagttcccttgcttctaaagaaacttggtttggccactaaagacatggatccttgtgaattccgagtcccaccgttggacgcttgggcactatttgcaccttcaaacgcccctgcacgaggtataactccaccgccaccttggtacctaaaactcgaactcgcacc

SEQ ID NO: 24554 - DNA, 234 bp, Glycine max
  Clone ID: PAT_MRT3847_122176C.1
gcttactacaatgcgttaaataacggtaggggggtcacgttcaccgtttctacatctgggagttcaagggggacgaccaaagagaggccggaggggtagtttttacatccaaacgaccctgaaaaatatgacaaatcagcccaccgccattaagagcctaccgcctgttaacgccccaaacatagacgaccacccagacctgccatcattataataaaaactgcgtttgatcat

SEQ ID NO: 24555 - DNA, 112 bp, Glycine max
  unsure (1)..(112): unsure at all n locations
  Clone ID: PAT_MRT3847_122177C.1
catggtcattganaccaataggacaagctaccatacatgcctcttgacttgcaaaanttctgaagtgcttggagagaaagatgcatgaggnatggcatcaaatcacttctca

SEQ ID NO: 24556 - DNA, 225 bp, Glycine max
  Clone ID: PAT_MRT3847_122178C.1
aaaggctccgggggagacccccacagcaagccgactcttgagaaaaaccctttgcaacacaaactgttggtaaactttattgaccgcttccagggtccacagacattggagttcacaattgaaaatggttggccctctgatgggccaaaagatcaccgtatctcgggagtgacaccctttggcatatgctcaaaagagctttaattggggagcatacctgggaat

SEQ ID NO: 24557 - DNA, 444 bp, Glycine max
  Clone ID: PAT_MRT3847_122179C.1
gggcggccctttttttttttttttctttttttccccttattaccttatttcaatttcaaagacttttaatttttttttacagaaggttttttcgaaaggcaaattaataaccttcttattccccatttttttaaaacattttggatgaaccagggccttaatttttcaaggttagtggcaacaattacttacttctaacattattacccttgaaaaattaccattcaatttcccaaaaggggaaaaacattggaggctaaaacggcctatatttaacaaattttctttggaagaaacggtttttaaaaaaaaacttttttttaagtcaataaaaccatgacattttaatttaaccaaagccagggcaaaaaccttaatcccccctttggttgttgaaaagggtttggtcaccaaagcccagggaagctccacatgctaggtttt

SEQ ID NO: 24558 - DNA, 287 bp, Glycine max
  Clone ID: PAT_MRT3847_12217C.1
acatctcctcttctctctccgtcactcgcacttcatcgtcactacacactgtctctatcgttaccactctctctgcacaatgctcatggttgctctaatcactaatgctcagattgagtatgcgatcttagcttccctcataccgggctcgcggacattctcctatatcggaatcaacggctctcactgcaaggcctctctgatcagattggtatcgtcggatcaatgggtcatggtcatcatggagtgctatgctcaaggtacgtctactgactacgaggttaact

SEQ ID NO: 24559 - DNA, 149 bp, Glycine max
  Clone ID: PAT_MRT3847_122180C.1
tcattttcatccaaattttcagtcgcggcttcttccctttttgggctggagttctaatcactgctggagattgcttttactttctatttcttgagaactatggagtgaggaagcttgaagctgtttttgccggtctcaattctgttatg

SEQ ID NO: 24560 - DNA, 251 bp, Glycine max
  Clone ID: PAT_MRT3847_122181C.1
cttgaaaggaagattctagatcctgagcgcttgagcagggtggaatcaattttcggcaatctttcagaaaccattaaaatatatggtccttggtcttctgcatgggtaggagaagctggaggggcatacacagtggtggcaatcatgtttctaacagatttctaaacagcttttgtgcagttttgtggcatcggttaatgggaaagaaggttcttacggtctccagtgatgttcatattaaagacttttac

SEQ ID NO: 24561 - DNA, 473 bp, Glycine max
  unsure (1)..(473): unsure at all n locations
  Clone ID: PAT_MRT3847_122182C.1
ctcatctaagagaagtctctgctgacattgttttgttcccgaaatctttgctctgctttttggagggttttgaaaacatttgaagaatttatttgggctcacttcacagcaataacacaatcccgccctcagcctctcttgttctcagcttcaattcgttttcaattcttgccgcatcgattcccaaccctaatcttctaccatgactgagtactgggtcagccagggcaacaaatggtgcgacttttgcaaaatttatatatcaaacaaccctggaagcatcaggaatcatgagcttggccaacgccacaaagataatgtttccaagaggctagctgctatgagaaaagataatattgctaaggagaaagaacagaaagaaacagctcgtgccattgagcatattgaagcataagcgcagcgtagctatcataaggatatagcanagtttgaggagaccagagaatcacatg

SEQ ID NO: 24562 - DNA, 1405 bp, Glycine max
  Clone ID: PAT_MRT3847_122183C.1
gaaaattcctgcctgagaatttctttcttgtctagagaagtctgacattgttttgttcccgaactctttgctctgctttttggaggttttgaaaaaaatttgaagagatttattagcacttcccagcaataacacgattagcctctcttctcagtttcaattcgttttcaattcttgccgcatcgatttccaaccctaatattctaccatgactgagtactgggtcagccagggcaacaaatggtgcgacttttgcaaaatttatatatcaaacaaccctggaagcataaggaatcatgagcttggccaacgtcacaaagataatgtttccaagaggttggctgctatgagaaaagagaatattgctaaggagaaagaacagaaagaaactgctcgtgccattgagcaaattgaagcaaaagcgcaacgtagctatcaaaaggataaagtgaagtttgaggagacgagagaatcacatgaattggatgaccaagaatgggagtttgacagcagtacaggctattactaccataaaacaaatggattttactatgaccaaaagtcaggattttactactctgatgccattggcaagtgggtgacacaggaagaagcatatgcctcccctcactttacatctaatgccgggcacaatggaccaactgcaaagaaatccttgtcaacatcacagtccaaatcagatgaaaacaaaggaaataagtttaataatggatcttcaccagggccagttgttacaacttctttgaatcccaaaagaaatgtgaaagctgctccttcatctcttgcggttggaaagagaaagagacctggtgaaaaatccaaggttatctctgatgaagaaaaagcagctctaaaggcaagagaggctgcaaggaaaagagtacaggagagggagaaacccttgcttggcctttacaacaagccttactaactgcaaaatttacttaacagccttgtcttcccccagaaatatgaggttgtttcttttttgtttgattcctttatgctggtcggtgtcctaattcttcaagtgtttcccatgtgactctaccttgtacaatgtaactgttccgtttctttttttagtttttgcaatacatgctaattttcagccttagaggagaaaataagggcttagaagtcttcgctaggctgatgaaaccaagttaaatccctgttgcagaagcttttagaaaacacatccaaataagttaatcttatgtggatacaaaagcaatgctcattttacgttctttaatgtgttaaatcatatgatgtacaagaagggaaaacttacagtcaaatatcctgaactttattattttattattaaaaaaaaaaaaaaaaaaaaaaaaaaaaaaaaaaaaaaaaaaaaaaaaaaaaa

SEQ ID NO: 24563 - DNA, 409 bp, Glycine max
  Clone ID: PAT_MRT3847_122184C.1
tgcttttaagaaaaaaattggaaaaactaaaactaaaattaaataaatttacaggactaaaaggataattaatgaagcgcgcgcatatatatatatatatatatatatatatatatataaaggcaaattatgaagacaaaaattaagtaattaaaaattagaaaaattaattgttcaaatactatatattaaatggagtaaacatgcaatttaaaaatatattaagccaaattgtataactttttttctccctgtttctttattttataaatccaatgtctttttttataagaaaatagctaaaagttttattgaataaaaaggtgctagtgtagacagcatccaatgtaaatactaagtatatagtttcaattgcccacaaatataaaagatttattagggtttcact

SEQ ID NO: 24564 - DNA, 290 bp, Glycine max
  Clone ID: PAT_MRT3847_122185C.1
ctgacccgtcgactcgctcggacgacaccaaacgagccctagctgaagctcatcataagctgatattcgccacacacgccctctccgacacttctactatgggctccctgcacgtggctaagtccctagtgcgcacccatggttacaccgtccggaatcacaacaatgagtgcggtcttatgtctgacactgatggagccacgtccatgggacagctgtgcttccgccaagaggacgccgaatgctatctcgctcacgttcgatcacggagtagagagcttagaagcagg

SEQ ID NO: 24565 - DNA, 455 bp, Glycine max
  Clone ID: PAT_MRT3847_122186C.1
ctcactcgtccggactgctcatgatgtatcgacaatgttacggtgcggtcaggaaaccatgatctgtctgatgaacaatggtggatacaccatcgaggttgaaactcatgatgtgccgtacaatgtgattaacaactgcaattactctgggttgattgatgcaatccacaatggtgaacggaaatactggactgccaaagcgcactgtgaaaaggagctagttgaagcaattgccacagtcacaggacccaagacagactgcttatgcttcattgatgtgattgttcataacgatgacaccagtaatgaagtgctagaatggggctacagggtttctgctgtcaatatccgtgcgtcaaatcctgagtgatcatgagaatatattctatgactaagttgctgcagatgcccattagctctatgaaagggagaatcatgttgaatgatgcccttgt

SEQ ID NO: 24566 - DNA, 285 bp, Glycine max
  Clone ID: PAT_MRT3847_122187C.1
ctcgcatataaaatcctaagcttcaaaaataatcaccccaacgcccttaacaatattgtgtccctttacaaatgatcctgagccaacactcacaaccaatccacctttcaaatctctcacacgaactgcttcaacctgactccacacttccacaacccatagcactactactaaatcaaccatatccgtaaccctaaccctaaccttaattctcgccctgtcattcttaacaatcaatcgattttctataattacacttacaataaaacaccttaactctctctt

SEQ ID NO: 24567 - DNA, 122 bp, Glycine max
  Clone ID: PAT_MRT3847_122188C.1
gggtttgggaaaggcacggaaggctttgctgtctggtttctcaccacgagggtgcgcaaccatttcaccatagagacgccttcttcaagcttttgccatcgaacgctaatttgatatgcttg

SEQ ID NO: 24568 - DNA, 227 bp, Glycine max
  Clone ID: PAT_MRT3847_122189C.1
tgttgtacaagggcactcatcttagcacatcctgtatttaatgtcgcgtatcctcgaaacctaggtggtacttacaatccccctgggaacgaacctctacagctgccgctcctcctctctttaacacaaatataaaatgattacttgtattaaaccttatacaatggtggctctgtcttattgtaaagtagcagtaattgcctcactatcatacggtgtatacattg

SEQ ID NO: 24569 - DNA, 110 bp, Glycine max
  Clone ID: PAT_MRT3847_12218C.1
acaggacagtgttatcgcgcacgcatacatggccatcacaggcaaccttaacctcaacctagtactccccgtggcgggctccatgttgtgcgggccacgctccccaactt

SEQ ID NO: 24570 - DNA, 267 bp, Glycine max
  Clone ID: PAT_MRT3847_122190C.1
gtaatgacagacaatctgttaagttctctttacataatcacacacataattttagactaagctacctatctattggcacactacaaatgataatgcttgacactcaaacttactaataccctttactatagtaatttatatctaaaatcttctcaatcatctatctataactacatcctatctatatctaataacgaatgcacttatgcattatctacatataaccatatgctttcctcaacaaagtcactctaacaaatgcttaca

SEQ ID NO: 24571 - DNA, 150 bp, Glycine max
  Clone ID: PAT_MRT3847_122191C.1
tctcggggggttctcctaccgattcttcagccggggcgattttggatccgaacctcttctgcggcgtcgctctgggacactccatcgttcggcattcgcaccctctcgtctacggtcctggttctcgcatttgccgagtgtgtgggattc

SEQ ID NO: 24572 - DNA, 810 bp, Glycine max
  Clone ID: PAT_MRT3847_122192C.1
ccaggctcccggttttcctcttctgaatccaccgccactgcagcgtggacggaatcggagtgcagccatatcagcagcagcagaagtccttgaagtgctgctctagtttgaggcacaatgagattggagaaatgctggttttgctcttcaaccatataccctggacatggaatccagtttgttcgtaatgatgcaaagatttttcggttttgtagatctaaatgccacaagaactttaaaatgaagagaaatcctcgtaaggtaaaatggaccaaggcatatcgtcgagtgcatggaaaggatatgacacaggactcaacttttgagtttgagagaaagagaaacaggcctgaaagatatgacaggaatcttgcggagaatgtcctcaaggccattcctaagattgataagatcagagtctcgagggaggagagacaccataagaacaggatgaaaggcaaaaaggaaaaattgctgaaggaggcagtgaaggagttggagcagggcatcagtttggtcaaagctccttctgtgcttcaacaggatccatctctcactttaccaaagatcaaagtcaaggtttcccaacagcaatcagaggagaatcatgccatggaagagtaattctaacaatgctgcacttaatttttgctattttaatatttgttgctaaattagttgcctgtaaggtccagtttaccagtttcgttgtgatcattagtgtgaatgatgtgattctcaaacaagatttcaaacatttgatgtatttgtctcttgaaactatggttctctgagatagtcaactattat

SEQ ID NO: 24573 - DNA, 267 bp, Glycine max
  Clone ID: PAT_MRT3847_122193C.1
ttccaaggatgtcgatcgaactgtccaaggtgctgtcaccaaaaaggacgaggacaggggcggagggggagggggaggggagaccgtgtgaggaaggggcgcggttgagtcgaatacacaaaaacaaaaccatacaagtagatgtatatatatccactgtgcaattaaaggaaagcaggcacaacacacactcaagaaaaaaaacacacgtaaattgaattgggtttcaaaccgagtcggggcgtttggtggccgaatttgattggt

SEQ ID NO: 24574 - DNA, 1781 bp, Glycine max
  Clone ID: PAT_MRT3847_122194C.1
aaaccctaggttgagagcgctgatacggtgaatcggagtgcagccatatgggcagcttcagaagtccttgaagtgctgctctagtttgaggcacaatgagattggagaaatgctggttttgctcttcaaccatataccctggacatggaatccagtttgttcgtaatgatgcacagattcttcggtattgtagatctaaatcacggctgcagacaggcaaccctagtgaccgtcctccccgttttcctcgtctaaatctgagaaacgcaatgagttcgtcgaacctcagagatcttcaacgcgaattggagaacaaagccaatgatctcagcaagcttcaaaaggaaattgcgaagaatcaccaaatgagaaagaaatacacggtccagcttggcgagaacgagctcgtccttaaggaactggatttattgaaagacgacgcaaatgtttataagttgattgggccagtacttgttaagcaagatttggccgaggccaatgcaaatgtccgcaagagaatcgaatacatctcagctgaattgaagcgtctggatgccactgttcaagatttggaagagaagcaaaatagcaagaaagatacgatactaaaattgcaacaaaggattcaatcatttcaggctgggaaaggcaaggcgtagttttccctcacatattgttccaggcattgtgatttaaccgtgctactggtaagggtggatgtggatttgtattttgtgcctctttgttttggaccaaagttgactcttaggaatctgttacgggaaacagcttggaaattagactgagattaataaattccatcacccaccgtaacaatatttcagaccgtggacggaatcagagtgcagccatagcagcagcagcagcagcagcagcatcattgaagtgctgctctagtttgaggcacaatgagattggagaaatgctggttttgctcttcaaccgtataccctggacatggaatccagtttgttcgtaatgatgcaaagatttttcggttttgtagatcaaaatgccacaagaactttaaaatgaagagaaatcctcgtaaggtaaagtggaccaaggcatatcgtcgagtgcatggaaaggatatgactcaggactcaacctttgagtttgagagaaaacgaaacaggcctgaaagatatgacaggaatcttgcggagaatgttgaattcctaagattgataaaattagagtgggaggagaataagaggatgaaaggaaaaaaggaaaagctaaagttggagcatcagtttcaaagctgtgcttcagatcactatacaaagatcaaagttcagaatcatgccaataatgctgcacttaatttttgccgttttaatatttgttgctaaattagttgcctgtaaggtccagtttaccagtttcctcgtgatcattaatgtgaatgatgtgttcgtcaaacattcgatgtatttgtctcttaaaactatggttctctgagatagtcaactattataaaggaaatcggaaagttgttgctatagcctagaagtctccttggacctattgtacctgtcactgtcaggagtattcaatctgttaatatcaagtcaaatgttaaattagtaggaaagtaaaagttctttatactaggtacttcagtcaagaacaaatttatttgttgaatgtctatttattttttgtttaccttattataagattttttcgatggatttggtaatgtcaaaaaaaaaaaaaaaaaaaaaaaaaaaaaaaaaaaaaaaaaaaaaaaa

SEQ ID NO: 24575 - DNA, 519 bp, Glycine max
  Clone ID: PAT_MRT3847_122195C.1
agcagctctctcttcggctcctcgtcatactatgctgtttattaaatctctcttcccctcctgatcttagatctcgtcgtctgacactactcttaagatcttctgccataaacctccaaacccttctcttatccattgctctctttggccactgagatcatagaccaactctgccatatacaatctttatgtgcttttacagctatatctgtttctgaatcatgccacacttttgaagtccaaacgcattcaactaggaatcaaggtacaaagtacctacacgcctccatattttttgtacttgcatgaaaaactatttgttttcaccttccaaggctgtatatacataaattcagcaactgtggtcgggtgctagaagcaaagtcaagaacaacttgatctttggtcaactggtggatcatttgggctgttgacggggatgggaagcatagcctttttgaaaaaataaggggttggccaaatgatggttagacggggttggaagcctattgctgatgg

SEQ ID NO: 24576 - DNA, 791 bp, Glycine max
  Clone ID: PAT_MRT3847_122196C.1
gtcctttcccgcgcgtccctcctgtctgttgcaccgcctccccttcttccctttccagcttcttgccccctcctgccctggttttcacgtttccgtcttcgtttcttgtccttcctctcctttttcttcctcctctctgccccttttttcttcctctgcttcccccccacccatctcgcctcctccatctcacactttcactcaaaataatcaattaagagccacatggaagactcttcttcctctgctgcgtatatccgcctggtgcaccgtctgatagaggacgggcaaatattaaatctcacacacttccactcaaaagaatcaactaattaagagccatggaggactcttcttcctctgctgcttatatccgcctggtgcaccgtctgatagaggagtgtatcctattcaacatgagcaaagaagagtgcatggaagctctttccaaacatgcaaatatcaagcctgttattaccttcaccgtttggaaggagttagagaaggagaacaaggagttcttcgcggcctatccccaggagccgaacagaaagagcttcggagagagagacaaggcaaaggatccagagcgtggtttcagattcttccaaagagcgaatttagattttcgacacgccaccaactcaaggctaatcgtcaaataaattaacgaagaacaggacgaacatggttgtttatgtaataataccccaatccccaagatgtagaagttgaagtcagcactctacagtgactagaagagtgtgacatggcatacaagtgtcgtgcta

SEQ ID NO: 24577 - DNA, 465 bp, Glycine max
  unsure (1)..(465): unsure at all n locations
  Clone ID: PAT_MRT3847_122197C.1
ctttttttatttattgtgctttgaaagttttacatgtgtttttaccatacctgttggccccatctgagcagttgngtttaggtgcaaatggtaactccctttactacgtttgaaaacttttatatactttcttgaaactctagtgtgacttgaatcatatttgtctttcatcatcagcattgtaattattttgggttagtccgggattttacatttccctattttgatttttccaatttactatcccatatagttttgctattgcaattaatccatatccgggcatgccaatttgagttgatattccatttgcaaaaatatccanttgaatgcagcacactttcacaattttccacccccgcccatttacaagaacagtaataaaatggctggctattnacgggnttccgganaatccaaatccnaatataaaaaatttctantnactttatccaacccaacggt

SEQ ID NO: 24578 - DNA, 515 bp, Glycine max
  Clone ID: PAT_MRT3847_122198C.1
aattcggctcgaggcgacagaagggcttctaagaaaacaacagaagagtagttatctttctttttcttcaatttcaccacctattcctaagtgcattgaacctgtaaaaatgaaattatcttaaagttgaacatggacctagatttaaactctgaaaaactgactcagccttcgtctaggtcttttaatgccgtatgtagtgggaacttcgatttttatctaatattatatatatcatcttcccaaccctcaatcaacagaaaaatatgcatttctaaaaaaaaaaaactgaaaaatatgcaagaaatttatataggaaaattcctgtagatatttaaagatatgtttaatttttttctcttaaattaaaattgtaaaaaaaattgaaacataaaaatctatacagatttttaagtgaatttaaatatgcatgaaaaaaaatcatataataagtagatctgtagcaaaattacaggaaatttctgcaacaataatattacgagatttcttctgga

SEQ ID NO: 24579 - DNA, 931 bp, Glycine max
  unsure (1)..(931): unsure at all n locations
  Clone ID: PAT_MRT3847_122199C.1
gggcgcaagtgttcagtgttcttcnnnntaacattatttatcagagtgctnnangtaaaaannaattggaggcnccgnnnncatgagtaatactatgatcntntgttattttttcccctannaataatgcacgcaaaaaaaaaaagctgaattacacaagggaaaaaaataagtataaaactcccatgtctaaagcattttaattggagatgcattcgaatacgttggggacgccataagtactaagtagtatgatgaagataagccccaagaaaattctaattgacttggtcagtcccaggagatgttgtcccctttatcaagaactagggtgccccagatgccgaaaccctcacgcactgacacgagggcgtgctgggatcccactcccacacgcagggagagagaggacatgtgaaacagtgtctgacagcagcacttctcgagcactgactgagatggtacatgaattccatgaagagagtgagaacatgtgaaacaatgtctgccagaagcatttcgcagtctgctgaatgcgccataaaggcagaaatagggattttgtatcggccacaaatggaggcagcaacttgattgcttatcctgctggctccccttgcgcctcctgagctccttggtctggtgcgccttcaccttcctcctccgcttcttcgtctcactctcagcccacggcgcccgcctcccttcggccccctcccagacgggggttccggtcaatcctaatgcgaagctgggaaaaatcacgtcgctatggggcgagcccaaaggctccgttacgggactcggctgaaatatgggtcgctgctgaacctcgacggcgagagggaaacgacgttgtgcaaggggttccacttgcgaaccgtggaaggaagctatgattcttgtagctggtgaatttctcagcagcttt

SEQ ID NO: 24580 - DNA, 337 bp, Glycine max
  Clone ID: PAT_MRT3847_12219C.1
aattgcaagcgcagttcaaggccaaagccccgggggaattagtttctgattgacagactactgcacaaattggcctacctcaggtgcatacaattgtgacgcaagaaggagcataaaggcactactgtactgcaagaaaatgtcagccttatatcctagctttgaatccaagaaaccatgacttggaaaattgtgcaaagtacactatacaagggatatgctacatagtgcatgagaactgcgctggtaataatggatatgatgacatactagcgtaccatgattacaaagttcatgttccattttggcaaaatggcctttgactaataaccctgct

SEQ ID NO: 24581 - DNA, 131 bp, Glycine max
  Clone ID: PAT_MRT3847_1221C.1
cgccgatcttcaatctctgagccaatcgctttccgatccatcttaccatgatttgctccgggggattcaatctgcgtgtgggagggaccttgccgaaaccttggaaaaggctgcactctgttcgtgcgctc

SEQ ID NO: 24582 - DNA, 366 bp, Glycine max
  Clone ID: PAT_MRT3847_122200C.1
gttgagaagagttttgtttttcttttttaacaaaaactggttttataccaacattgctcgagtgaaagtagagaaccctaaaaacaagggaaaacttaaaattgggactaacccgaaattgacccaaaataaggcttactcaactccaaaaaaagcattcaaattttgggcctaaaaataaacagggcggctaataaattctcgagaaaatgagtctggaaatacccaataagatagttctacttatggagccctgagaaggcatgtgcatgaactttcactcattagtcttgtaattatgcgcaccaaagatgggagccgccacacgggaaatcaacttaggcctcctctactcctatgaaaact

SEQ ID NO: 24583 - DNA, 281 bp, Glycine max
  Clone ID: PAT_MRT3847_122201C.1
accgaacctcaatttcgagccaggcctacgcgtacgctcgaaagtatctggagcacactagcatgtatcattggaattgctggactctgcggcctagggtgtatcatggcacttctgtatgcatatacatacgcataatgcacctctaaggaagacattgagctgctgtcaatatctaaactccggttaattgtaagcaatgagaaacttaccggtactataccatgacctatttgaagcataatgaccgtatgccacgcttgttcacctattgaacatgc

SEQ ID NO: 24584 - DNA, 168 bp, Glycine max
  Clone ID: PAT_MRT3847_122202C.1
ggagagcttgagttctaagaatgaggtgagttattttgaacccatttctctgtttatttttcctagagtggattatgaatatagtttggatactatagaagcaaaaactgagttctctaatgaaggtgaagtagtactgggtttatccattaatccggttagtttttg

SEQ ID NO: 24585 - DNA, 179 bp, Glycine max
  Clone ID: PAT_MRT3847_122203C.1
caaaccatgggaccgggtgtcttaattttatggtacctaccctatccaaaccctcactcatacttaaaactatcattcctatagatccattcggccacctttaaccatggaatcttacaccaacctaatttaaaattatcatccaatccatttcctatcttccttttttaacacctccc

SEQ ID NO: 24586 - DNA, 142 bp, Glycine max
  unsure (1)..(142): unsure at all n locations
  Clone ID: PAT_MRT3847_122204C.1
gaggaaacaggagccaaacccnncnggcccccgcnannggaggcaaagnnggcgccgcngnnaccgcnaancccagaagacccaacgcnggagccgccgcngcaccaaagaagncanggcnccccggcgcaagaggcggcgg

SEQ ID NO: 24587 - DNA, 302 bp, Glycine max
  Clone ID: PAT_MRT3847_122205C.1
cccacatctccagcgccccatctactatatccattcttacaacctcttacctccgacggcatagctttcttataatgctccctaaattcaatacacttccccactttttacaactcctcaactattaaaaccctgactttccccaacttaatcttctctcgacacatccacttttcgacagatcacctattaacaaatagaccctctacctacggcctctccaacagttccacatccttaatcaccaactgcacaccccctataatcactcattaaaccctcgatttgattaatttactctc

SEQ ID NO: 24588 - DNA, 225 bp, Glycine max
  Clone ID: PAT_MRT3847_122206C.1
acgattccggcacgagtaagaatgtgaggccttttatcaattgtacatctgtagtgcctaaaaattttgcaactatagtaacggatgatcatcgggcagacaatataatcggcgcaggatttttaggcactacagatgtacaattgatataagaatttgaggccttttagctgttgtgtaaaggacggcgatactcttaatatatatatctgagctctactgatt

SEQ ID NO: 24589 - DNA, 296 bp, Glycine max
  Clone ID: PAT_MRT3847_122207C.1
gaggaattccgaaattcggacccctcaacttgttaagaaaacacattggaagcctttactcggggcctagcttggaaaaaaactaaatttgccgggggtggttggctcttgccttcccccttattaaaaataacttttgttatttaaaaagtttggtgggctttttggggaaaaaaggcactacccttttccggattatttaataaaaaaggggtcttatttttggttattttaaaaaaaccccccattaaagcccttggtaaccattggtttttaaaaaaacgtttttttaaaaa

SEQ ID NO: 24590 - DNA, 245 bp, Glycine max
  unsure (1)..(245): unsure at all n locations
  Clone ID: PAT_MRT3847_122208C.1
ccgctcgacgcttgccactgactttccacactgcataccttacgtcttccgaactccaagttcatttgcacgacggctaacgacaaggctcagatcaacattctggtggttggtcatgtggaccctgacgcgcaaccaccattcacgagctgaagaacgcctgttctggacacatccgctccagggcatgccatatcacggcatgcacgtacggcctcggactcgaancccccccccccctaaca

SEQ ID NO: 24591 - DNA, 321 bp, Glycine max
  Clone ID: PAT_MRT3847_122209C.1
gacattacattcactcctcccttacctcagctttcaactcgagtctaggatagacacacagaaacaatacttgttttgcctctttcactgcaaaaccacagtggggagtctaaatattatgcactctcattatttctaatcatgtcttgagcataaaccttcctctaatcaaaacacacccatatcgaatgaagcatctcataataggcttctcaagctttctttgaatccagacaacgaggcttctctactaacactatacaatgttggcaatacttacattgctaaagtatctcgctccggcaagctataataaacact

SEQ ID NO: 24592 - DNA, 111 bp, Glycine max
  Clone ID: PAT_MRT3847_12220C.1
aaggccccaatagcaccctttggttaatgggtttgaatttaattccaacagcgctttattttattgatggtgtagtcatagagatagctgaaatgagatatttcggcaatc

SEQ ID NO: 24593 - DNA, 493 bp, Glycine max
  Clone ID: PAT_MRT3847_122210C.1
accacgctttcgttcatattaatgacactactacccataacgctggtcgcttcaaagatccacaagtgctttctgacacattcttagctcacgcctggattacaaagatcttacgtgtctttgatgatacatggctcatcaagtcttcgtttgcgacgacacgttattataaggggattcgaacatgatccaatacccttaaggggctcataggggtgaccttaaacttatcctttaccttggatcaacaccacccatccagagaaatctctcgcacactttggtaccgctccttagacagctcagacgcgatcgatcctgcctctgccaagctgtatgcttgcagattctgcagcgccttccgagaatctggggcaaaggttcgtcgcgcatagccgctcgcaaagcatatatcaaggtaggtcttctctgggcacctgagatgctcttcaactcgccatgtttctacccaaatgtatagaacagtgtaagg

SEQ ID NO: 24594 - DNA, 327 bp, Glycine max
  Clone ID: PAT_MRT3847_122211C.1
ttacgaattcgagctctgtacccggggatcctctagagtcgacctgcagatcctgatgatcccctcaaaactaccgatcagaccagaaatcttggcttaattgtaagttctcatcttcaacatcatgagtgtcagaattacaccttctggctcataaaaagcttgctttgctgatgtcgtgcttcattaaaattttgcatctttgcttctttgaggttctagggaagtttaataaatcaagttcataaaatatttattttgtatttgtaagaaaaatatcaagttaattgattagaattacagtccaagtacataggagagatcaat

SEQ ID NO: 24595 - DNA, 963 bp, Glycine max
  Clone ID: PAT_MRT3847_122212C.1
gtctgcttcaaccagtttggaattggatctaaaacagttgtttttgctttttccaacctactcaatgggtgccgacgcaaacaaacaccaccacccattgatcggtttttgcttcatccaaactcaatgggtgccgacgaagactacgattacttgttcaagctggtcctcatcggagattcgggtgttggcaagtccaacctcttgtcccgattcacccgaaacgagttcagcttggagaccaaatccaccatcggcgtcgaattcgccacgcgaagcgtccccgttgatagcaagctcgtcaaggcacaaatctgggacactgcaggccaagaaagatatcgcgctattacaagtgcatactaccgaggagccgtaggtgctttggttgtgtacgatgtaacccgacacgtgacattcgagaacgtggagagatggttgaaggagcttcgagatcacacagaagcatacgttgtggtcatgctggtgggaaacaaagcagaccttcgacatttgcgtgcagtgtccacagaagaagccacagaatttgcagagaaagagagcatttacttcatggaaacctctgcccttgagtccttgaacgttgacaatgccttcatagaagtgctgactcagatatacaacgttgtgagtaggaagactcttgagactgtggatgatgacccttctacgaaagccttgcccaaaggggagaccatagttattggaaccaaagatgatgatgtctcagctgttaaaaagagtggatgctgttccacatagtttgtttgagagagatatacaaaagagtcttttggttatgcagtgtaacaggatgtttttgtgaactcattgttttattttgtttagttcttttttggttggtgatgtatacgattgattggcctcagctgccctttgtcgtgaacttctggtcataatacaggttttttattcaaaaaa

SEQ ID NO: 24596 - DNA, 1770 bp, Glycine max
  Clone ID: PAT_MRT3847_122213C.1
ccacgcgtccgcttaactcggaatgtgtcttgtgtaatcgaattaggtattgtttctgagtatgggaaatccgagtctctcatctctcttgttggtcttactctgcatcatctctctcatccttgccttggctcaggcagattcagattctcatttcgaaggctttgaagccgaagacgacgatgacgacttggaagactcttccatccatccagcctctctccgatcaccccccctctccgaccctactcccactccccagcctccaccttcggatctccccaaattccctcccttcgatttttgggacgacgatgaattcgaaggcgtccccgtggaacactcctcccccgagcctccctccgatcccaaatcccccgaaaacgccaccaccactcaaacccctccaacccccaaccctcctcgctccttctccgtggagatcatctgcggaagctttcttatcatgttcgcaatcaattacttctccgggaagcgcgagaacgagaacatcgcgctgtcgtgggcggcgcagttcgcggcgaaggattcgatcttcgagaagaatttcagcctcttggggatcggcgacgggggcgaggaggcgccactgctgctgaaggaagggcagacgacgttcaagttctacgcgagcgggagaaggtactgccagggtttgctggccactctggagttgaagagcagacacgatctcatcgccaggatctacaatatgatcgttccctgcagggacgagatcgccttcgaggtctacatgaacgacgacgccatggatcatgtcgttttcgccatggccaagaagaaggccgccaaggccatgcataaggatgtcagggatttgcagaggttcgctacccttctctcccctctgccactgccactgccactgcctctgcccgtaagtgggtcgctgatgacctcgctgtcatttctgagtccaaggaggtcgctaatgatttcatcactgatgccgtcattgatcaggtttttggtgagaaagcttttgagaaatttggaaaaggtttaatttcattgcatttctccgaccagcaccctggtatacacaaaaagatattgttgttcaagtttgtgcttccagctgctaaggacatggctgatatgactcgactggtggctcttgttccgtattatattgacttgatcggacgatacaaattaagttctcaggctcggtctaagacagaggctgcacgacaaaaggctgctgtagaagcacagaaagaactccgaaatgcacagcaagaggccatgcagagaagaaaggcagagaggaaaaagatggtggaggaggctgaggcaaagctcagtgcagaggctattcgaaagaaagaagcaaaagagcgtgctcgtcaaatgaagaaggcaatgccaaggatgaaaatggctcgtggtgcctaattcttgaattgatgattcgtttgccagtagaattgaaggccttccccgcccccagcgtacgttgtattgtagttggccttttgtagaatttacggcaatgtacgttttcagttggcatttcatgctaactagctagataggtgtgaccacgtcttagggggattttgaatgtaccaaaatttccattttagagcatttatgactcttgataacaagttaaatctctttattctggcttccatttgacaatgctgtaatcccattttcttttttcatcgtgctgtgacaaatgtctaatgaccttgcttttgaaaaagcgcgcgtctgtac

SEQ ID NO: 24597 - DNA, 200 bp, Glycine max
  unsure (1)..(200): unsure at all n locations
  Clone ID: PAT_MRT3847_122214C.1
ccanaacgcagtggatgattaggaatttgggttttnagggntccaatttttatttnttggggaanggngtgtaaaccctnaatcanccncttccgaancctcgtnnccccctanganacatccgcatccttaaaccctccatgnntnccacccccaaccccaattcnacgacncatncntccagnnctcgaaaanggcgt

SEQ ID NO: 24598 - DNA, 365 bp, Glycine max
  Clone ID: PAT_MRT3847_122215C.1
ggctcgaggcatgatcttctatcttcttgtgcagaaatcagaaaagtattgacttcaaaaaagttgatgctcatgttcaccagctaaagggtagcagctcaaggtattatcactcttccattggacctaaccaaaattgtgtaacccataagaatctgaataaaaaggaacctctttattttgttttgcaacgcttctgtacttgttgattcttaacatactataaaacacagactaatcgattttagatattatccttaataggaaaaaaaaaaaaaaaaaggtagttccaattcggtttttgtaataaacaatggctgactttccttggttaactgaaacaaattttttgtctggcacaacat

SEQ ID NO: 24599 - DNA, 621 bp, Glycine max
  Clone ID: PAT_MRT3847_122216C.1
ctattattttctctttttcattttgtttgtgagcttgtcagcacaccagacctcacctatggcaaatccaattctctcctttctcttgttggccctcctctgcatcctcgccttggctcacgccgattcccatttcgaaggctttgaagccgaagacgatgacgacctcgaagactcttccatcgatcccgcctctctccgatcaccgcccctctccgaccctactcccctcaccaccgatcccaccccccaacctcctgcttcagatctccccaaatcccctcccgccaccaccttcgatttctgggacgacgaagaattcgaaggcgtccccgtcgaacaccccgcccccgagcctccctccgatcccaaatcccccgaaaactccaccaccactcaaacccctccaaccctcacccctccgcgctccttcaccgtagagatcgtctgcggaagctttcttattatgttcgcaatcaactacttcactgggaagcgcgagaacgagaacatcgcgctatcgtgggcggcgcagttcgcggcgaaggattcgatcttcgagaagaatttcagcctcttggggatcggcgacgggggcgaggaagcgccactgctgctgaa

SEQ ID NO: 24600 - DNA, 492 bp, Glycine max
  unsure (1)..(492): unsure at all n locations
  Clone ID: PAT_MRT3847_122217C.1
tcggctcgagtgctacctgagttcgctttgtctcaaactggcctacgcttctgtgactgcaaccacattgtggagatcgtgtttgtggagatcgtctctgccacttatcgattgaggtacgtcctttcgttttaacattaggcgttcgtcgttttaaaatttgctcactttcgcaggtcgaagaaaactaggaaaggaatgagtcccagatagagtactcccagggcgttcttgttgtttctccttctgcctgagttggggtttgtcgcanactgagctgcgcttccgtgactgcaaccacattgtcgagttcgtgtttgtggagttcgtgtctagcacttatcttttgaggtcgaagaaaactaggaaaaaatccagtcccggaaagggtgggactcgattttggaaggccattgtgcttggctttaagactcccagggaagccatcgaaagtacatgattcctattggtgtgagagtgaaatgatgggca

SEQ ID NO: 24601 - DNA, 319 bp, Glycine max
  Clone ID: PAT_MRT3847_122218C.1
gttatgggggccaccaacccaccttagcaacatttggtgcggaccaatatgatgagaaaaatccaaacgagatgagttcaaagtggttttttctgtactttacttgcgcttatgtcgttcttggttttaaactttctagttactatgggatacaggatgggacagggttttggttattgtcttgtgcatagctttggttttattggactcagattagttgtagcatgtggaacccagtgtggggtgcacagtttcactgtgttttgaaatggaggtctcgaaaggcgaaacttatgggtcgaggtcacaattgaataaa

SEQ ID NO: 24602 - DNA, 179 bp, Glycine max
  unsure (1)..(179): unsure at all n locations
  Clone ID: PAT_MRT3847_122219C.1
cgnncangtgnnncgtatgtnggnatncggcgcgngcnagtagttgtgnncgnnnaatganaagcaaatggnntcctcnantagntcttncccagctgtnnccnctgtnaanngttccgtggccggcnttgtggngccatttcactnncctcaagtccatggctntcngcccnncnagt

SEQ ID NO: 24603 - DNA, 403 bp, Glycine max
  Clone ID: PAT_MRT3847_12221C.1
tttggtttcgactatgtcaaaacagctgatgaagaagagcgacatccttcagttgagggaggaacagatgcgcagaagtgaaaaagagaggcggcgaaatgagcggaagcaagaaggaaaagcggccaaaacactttcggccattctgttcgccttcattatcacttggaccccttacaatgtgatcgtttgcctcgaggctttctaccccaactcagtcccatcatatctcttcacacttagttactttctttcctatgtcaattccaccataaatccgctctgttacgcgctgtgcaacgcgcgcttccgcatgacttatttgcgcattatcaaatgcaaatggaggcattcaccaatcggtcgacaaatgtacgcggcggacggagcgtttgttcagtcg

SEQ ID NO: 24604 - DNA, 464 bp, Glycine max
  Clone ID: PAT_MRT3847_122220C.1
gaggccaagggaattaaacatatgccattttggtaacccaacaaaaataattactacatggacgttaaaaacacccaagtcatttggggggtctagttctatctgaaacagcttaacatggaagggacaaactgaaacaaaaaatatttgggggggacatattaaacagcttaaaatggaatggccaaacaaaaaaaatctcatggattaaagaatggaagttgaagggaaaattaaattaggaatgagggtttttttgttatcaagtaggagccccttgcattgccttgctaaaaatttttggcttaaaaaaaaaatttcaagcagttttggggaaaacaaggcccctacaaaataaaaaatggcttggctgtatttcgggcggacgggagttaaaaaacagccctcaattttcagctgtaggtcttgtaaagcaaaaactggggttttaaaaacccatgctt

SEQ ID NO: 24605 - DNA, 316 bp, Glycine max
  Clone ID: PAT_MRT3847_122221C.1
aaatatacaaatgccggaccacttacatctgaggtgatcaaaggattaaaagtaaaagctatcgactggggcgactgccaacctacatgggaaactctaaacatgtagagaagcaaatctgaaaatgcctccggagagaggatctaaagagtctaaacctttgatgggaagatcggggtggaatcactgtataaagacaccattgatattacaatgagctagacctgaacatttagacccatgctaatttgtgcgaagctaagttcacgaaatctaagcaggcaattgaaaatgattaagctcaaaaatgagtttt

SEQ ID NO: 24606 - DNA, 431 bp, Glycine max
  Clone ID: PAT_MRT3847_122222C.1
atatatatatcttcattctccacttcataacactcaatccaagtgagtgatgatggggagaactccatgcagtgatgaaaatggtttgaagaaggggccttggaccccagaagaggatagaatattggtggattatattcagaaacatgggcatgggagttggagagcacttccaaaacatgcaaggttgaacaggtgtgggaagagttgcaggctaagatggactaactatttgaggcctgatatcaaaagaggaaaattctctgaggaagaatagcaactcatcatcaatttacatgcagttcttgggaataagtggtctgctatagcaggtcatctgccaggtaggactgataatgaaattaaaaatttctggaacactcatttaaagaaaaagcttctgcaatggggttagatccggtgactcattc

SEQ ID NO: 24607 - DNA, 289 bp, Glycine max
  Clone ID: PAT_MRT3847_122223C.1
gcacgtgccttgcgcgatttttggatagctggagcctactgtgattgatgaaggtaggactgggacatacacggcactgtatcattctgagcagctgattatcggataggaagatgcttcaaacaactctgcccgtggccactataccattggaaaggagagtgatgaactttgcttggatcgcatcataaagcttgctgacaactgcactggtctgcaacgttttctggctttcaatgctgtgggtgggggcactggctctggtctaggttccctttggttggaacgt

SEQ ID NO: 24608 - DNA, 860 bp, Glycine max
  Clone ID: PAT_MRT3847_122224C.1
gttggtttccatgactgaggtgggagagaagcaaatattgattgattgattccttagtggtgccaaagcaaactttaaagagatcgtgggaaatggtgagcttaagcctgtgtcttccgtcgtcaatttatcttcaggctaaggatttgaagtttgagagtctccgcaaagccatctccaggcttgacctaacaacgacatctccgctcataaagtcttcccttctcctcaaagcctgcatcaggtctggtaacttggagctgggcaaactccttcaccacaagttgattgactccggactccctctcgactccgttcttctcaactccctcattaccctctactccaaatgcggggattgggagaacgcactttcaatattccgcaacatgggccatcataagagagacttggtctcctggtctgctatcatctcctgtttcgccaataattccatggagtcccgagcccttctcacctttcttcacatgctccaatgctcaaggaatatcatttatcccaatgaatattgctttacggcctcacttcgatcttgttctaatcctctattcttttctactggccttgcaatctttgcctttctcttaaagaccggatactttgattctcatgtctgtgttggctgtgctttaatcgatatgtttaccaagggcgaccgagatatccaatcagcacgcatagtgtttgacaaaatgctgcacaaaaatcttgttacttggactttgatgattaccagatatgtgcaactgggcctgctgggtgatgctgttgatttattctgccgtatgatagtaagtgagtatacacctgatgtgtttactctgacaagtctcttatcg

SEQ ID NO: 24609 - DNA, 405 bp, Glycine max
  Clone ID: PAT_MRT3847_122225C.1
ttataaataaagcatttaactaatctccaagtcttattttctcatcattcttgaaaagctccttttctctcggttaacacgagaaataaatattgaagttccaggtagaaggaatgcaatatcatacatgatcaaaccccgtacagtaacatgcttgtttaaactttaaagaacatctctacagaattacaaaaaaaataattttatttataatcacaatcagagaaagttgacgttgtacaacagcatgtacgggatgaagcattttattgaagtatagccaaagctaagaccttttctcatcacctgtaccgcaattatcatcaaggtccccagttccatccagccactccgctagtttaacttctttattagctttgaaatctttctgatactgacaagaaa

SEQ ID NO: 24610 - DNA, 259 bp, Glycine max
  Clone ID: PAT_MRT3847_122226C.1
atagtgtcaaacatttgggtagcgttgaccgatgaattgacctttgcggtttcatgcatataataagaagacattgttttctttggtcttaattttctatcaatcgttactgtattgtcctgttaactgtggtgttgagtagtcctgaaacaataacatgatgcttcgattcctagtgctgtttcttacgttggcaagttgtagggagagttacaaaatggcgaaagcagagtataactatacggttgtgtctgcgaga

SEQ ID NO: 24611 - DNA, 421 bp, Glycine max
  Clone ID: PAT_MRT3847_122227C.1
aatcccaaaagtaggacctacatttttattccttggcaagggaactactgaattcatcacatatagaatcactttgggctgggacatacattcacaccacaatgaatcacaaaggggtaataataaacagatttactttacacaaaaaatctatactattttaccatttaccgcccgcataaacaaaccaaggggaagagaagagcctaagcaaacaacccccaaaaagaggggtttgaagaatttatgaatacagcaacggggcttgcacatgagggggtcagggcgcatattcatgttcaaggggagggtgggttcgagaaaccggggcagcaggtgctttattatccccaacaaaagccatattaagggctttttcaaaaaatgggggcctttccatctgggggattttcttattttg

SEQ ID NO: 24612 - DNA, 265 bp, Glycine max
  Clone ID: PAT_MRT3847_122228C.1
cgcatatacaagcgctaatcacgtaccgacgtttatccaatctttttttaaaaacccatcgtcataactcaaatgggccaacctttaaccatcttgcggtcctaaaaaaaaaatgcaataaaaaagtaacatgctcattccacaatgataaacgcacaaactccatcattccattaatgctgaaagaacgtccaacatgatttaattttaccatctgggccaaaaaatcttttttaatttaataatttgaggaacactttgaata

SEQ ID NO: 24613 - DNA, 489 bp, Glycine max
  Clone ID: PAT_MRT3847_122229C.1
gttttctattgcttgatgattttttggaagcaggaattgcattagttatagttaggttgatttattaattagtttttaggcatgatgttgtgtctaactgattaactggttttgcaaattgcatgctgtctttaaatgacataatcaagtcttccccctcttggattcattcccttgttatgtcaactaatttttagttaatttcccctcgtatatgtttaattatgttttcggtttctttgattatgaagatttcaatttacacatattggtctttgactgttgactctgctcaggtatgatccttcaactggtatttatggaatggatttctttgttgttctggagcgacctggctatcgtgttggacgtcgccgaagatgcaagtcccgtgttggaattcagcaccgagtcacaaaggaggatgctatgagatggttccaggtgaaatacgagggagtgatccttagcaagtaccgcactattctt

SEQ ID NO: 24614 - DNA, 414 bp, Glycine max
  Clone ID: PAT_MRT3847_12222C.1
ctgactcatgggaaataattaacaagctgtgagtcaagattctgtcatatcattctgctaatcatgtgatgtgatttcatatatgcattactttaaattatcattgttaggtttacgtgtacaattccaaatcaccagctagaaagcgtggtgctgtctaacttgttggccatgttcaccgaatgggagggactaagaagatggggctaaaaatcagaaactgcatacccatttgttttagcgctttgtctatattagacatcttatagtacgtggtattgcggtaatgaatattctatattcagattagtgcatgctgattggatggaggattggctgatgtacagaatttacattttttggtggaacataattcacattttgattcttatattaaatcatccaaaatatatt

SEQ ID NO: 24615 - DNA, 749 bp, Glycine max
  unsure (1)..(749): unsure at all n locations
  Clone ID: PAT_MRT3847_122230C.1
gaattcgagctcggtacccggggatcctctagagtcgacctgcagtttaaaaaaaactgcatgagatctcagattctcattcgttcatttatttttaatatttaacattttaattaatatataaaaggaagaaaaaacttgtatgaatggaaaaaattgctcaaggtgcaattgtcttccaaactgcaaggggtcaagaaaaaactatggtggtgaattgttctcaaaactcttgtaatcatgtattatagcacaacttgttaattagactagctaataagtctctttgggggtggtttttgttgcgagtttcaaaaattaagtaaacaacaattagtttttaattttttttcttctaatctttagttttaaaataaatttattttaaagattaatttaaaaatatttttatgtaatagtgttagtgacactgataaatgttaattttaaaagtagtgaaagggcgtgagttttgatgagtgtatgtgtgagattcgaggaattaatttctggcaagcattagaggaactggttagagacgacaaaggatgctgtgcctttaaagaataagtggtgggcgggtactgagaaagtttaaatgaatctaatggtgaataaaccagntcaccatnaacnacccacatagctggaccacacaaacatctttctacagttcatagnattaatttataaagaatgtaatccatacataatttgtttttggccgtgaatatatnntttttttaata

SEQ ID NO: 24616 - DNA, 177 bp, Glycine max
  Clone ID: PAT_MRT3847_122231C.1
ctcacacatcccaatctatatacctgtttatcatgcctccctatatgtattactttggcttgtctacgagcgggaggacacatctgcaacttcatctatttccaaggatgagttatttgctggactaactcatccatactgtctattatgactcctgatatcgcttgtgagtcatgg

SEQ ID NO: 24617 - DNA, 348 bp, Glycine max
  Clone ID: PAT_MRT3847_122232C.1
ccgatagattcgattggactctttcgaaattcatgctgtggttcagtaccaccattttttggaaggggctaataagggggggggggggcaccttcctttttaagtgattggtaacatattatctcttctaggatctgcccgagatgtattggttgcttctgtaacttgtaaattatggagggaagcatgtttcaataacccacacaggctttcattcaacaactgcgagggcctctctaacttcctgtttaatatcaaaggcaagcaggagaattttggattagtcctcccacccttctatctgcaatagacttcatatgtttagtttacaccactattctttcttta

SEQ ID NO: 24618 - DNA, 256 bp, Glycine max
  Clone ID: PAT_MRT3847_122233C.1
agatatcccaatctatgtgctgaaaccttgatggaattgggtttagggaatcaaaatgttgacaacaatattgaggctcttgttaacaaaaccatatttgaaaccagcttgccaagttcatattttgctgaattcaagactggggaagctcaaccagctcattcagttgttgcagactattgtgaagagctaatgagcatgtcactgaaaaggctagaccaatccctgagagcactgaaatcccctaaaaggtaca

SEQ ID NO: 24619 - DNA, 954 bp, Glycine max
  unsure (1)..(954): unsure at all n locations
  Clone ID: PAT_MRT3847_122234C.1
aaaaaaactaaatacttgtttattttaccgtttcagatcgttggcactaaattattagttctccttatccttgaacgtacatttgaagcttttcaactaaaaccaaacacactttaaacaccgtcaaaacaaccgtccaccacaagatcgtgtccggttacaaactcggagtcaccgcacgcaagaaacagcaccgcatccgcgacatgcttcggcgtcaaaaagacacctttcaacctaaagctctgcgcgtactgcttctgcaactccttcgtctccatcggggcatgcgcggcacgtgtcagcggcgtggtcaacccactcggcgagacgcagttcaccctaacaccatgcgctccaagctgcgcgctggccgcgcgcatgagccccttcaccgcgtgcttcgacatcacgtagtcggttcgccgcaggccgccgtgcgacgctgacacgctcgccgtgcacacaatgctgcccctcacgcgccgctccaccatcgaccgcgctgcgtgcttcacgcacgctgccgtgccccgcgcgttcacggcgaggagacggtcgtacgcggagaagtcgaggtcgaggattgtctggtcggagggactgaggatgcccgcgttgctgaacatgatgtccagctggccgtgagcgttgaccgtggaatccacgaggtttttgacttggtcttcgtctgtcacgtcacaacggacatagctgcacctgtgagagccaatggatgctgctacttggatacccaggtcatcttggatgtctgcaatcacaaccattcgtgcaccatggtgagcaaacagacgcgccgtctcttcgccgatgccgctggctccgccggtgattatggcaactttgccggctaacttttctggccactgttgtggattgagtttgctgattcagccattctatattatcttntctagtaatgtgagagaacgc

SEQ ID NO: 24620 - DNA, 320 bp, Glycine max
  Clone ID: PAT_MRT3847_122235C.1
gccagtgtcattctctttggaaccaacaatagcagctccatttctggggtctgggtctttcgaggccaggagcttgcttttccgctgagtccagattggcaggtggactacgagtcatacacatggcggaaactggatcccggcagcgaggagacccagacgttggttcgagaatacttctgctgggaaggggccttccagcatgtgggcaaagccttcaatcagggcaagatcttcaagtgaatacctcttgccatcgcccagctgcctgcacctgcccttcggggagaatgggggtcattaaaggaaactgaacattg

SEQ ID NO: 24621 - DNA, 202 bp, Glycine max
  Clone ID: PAT_MRT3847_122236C.1
gtgtcctcgggggcggggggttgttatgccttaaacccaatctcccttttttttacaattaaaccaaaaactccctttttggtaattaaccgtcccaaacctgggtggagcatttaaaacctcgcgccccccactatgggcaacacctaagtgcgccccccgctcgggtaatgggccttaaaagcaaagcatcttttaagtt

SEQ ID NO: 24622 - DNA, 475 bp, Glycine max
  unsure (1)..(475): unsure at all n locations
  Clone ID: PAT_MRT3847_122237C.1
ccagctaaaacccatatataaatggagcaaagtatcaggggaatataaggcaaaaaacaaaaatatctttttccttaaaaaatatataaagcaccaaggaaaagggctgcaataagggggggaaagaaggccataaaaaagagggacccaaccagacaaatggggtaaatcataaaaaggcgtccattttaatcctcccacgtttccaagctcctgatagataaggaacagggctgcattgggcagttcaagtttggggccagggatgaaaattaggaaaaaaaaatgatggtttgtnaggaccaactccatcctctcctgggattctagcaggaatgcaaaaccccggcattgcttcaaacaaaaacctgctgccaaagatggaagctggtggaatgggctgcgacttgggaggttctgatgaacccattggaatctctcctccaggacgaagggagggggagaaactggcctg

SEQ ID NO: 24623 - DNA, 283 bp, Glycine max
  Clone ID: PAT_MRT3847_122238C.1
acgtacgctcacacttacacaaaatcatctaaaataactacaaaatcattgaattatcagagtggataattgcacttcctacatctaactaagatacattttaaaggcttacactacacaccaaaactataatacataatatatattctcaaactaatcttaaacaaatggttacttcactaaaacacttaatgttacatatttcctaaatgacatctttttactgacattgactaatacaaaccatgtaccaaatattctaaaattatgataattttgaaca

SEQ ID NO: 24624 - DNA, 257 bp, Glycine max
  unsure (1)..(257): unsure at all n locations
  Clone ID: PAT_MRT3847_122239C.1
gcaaggtcaagatcggaatcaacggatttggaaganttggccgtttggtggccagggtggctctgcagagagacgatgttgaactcgttgccgttaacgatccttcattaccaccgattacatgacatacatgtttnaatacgacatgttcacgggcactggnagcatcacgatgtcaccgttaaggatgagaagaccttctctncgtgacaagccagtccatgttttnggacacagganccctnaagagatccctg

SEQ ID NO: 24625 - DNA, 480 bp, Glycine max
  Clone ID: PAT_MRT3847_12223C.1
tgctattttgcccttagtacttaaacttctgatttgatagatcgttaagcacggtcgagggcacttccacatatatcatgctacagtttatgactctcgcaaaggcttagtctgacgacggctcggactgagcgcgatacaaccttggcgcttctgacgtaccctgcactagtgaagctgtgcgccgaattccacatgtactccggcgtgatcaatgccttgtgattgtgctgcactttcttgccgaatgtgtccaacacccgactaggtctcgagtctgcgtgcatacctatcttagctgagcaggtttgggagcaccaaggtccacacagcgggctaacgaactcgtatagcaccgcatatgactgccagtacgattgaaaggaattgcctacggcataggacatgacgcgcaagacatcatagcatgaccaggtctggtccattagctcttgaacaatgctttcgacacatgccctc

SEQ ID NO: 24626 - DNA, 603 bp, Glycine max
  unsure (1)..(603): unsure at all n locations
  Clone ID: PAT_MRT3847_122240C.1
gtctccttggtgctttcactcattagcagcagcctggatgcttggaggacacggcagtatgattattatcagagggttttgaatggaatattatgagatagtttgtcatggtgatcacttgattttcgactttggccaacccttgtacagtgaatgctcgtcaattcaattagtattgacatttttaagtcactaaaagggaaggttggttcaccatggagtggctttaaagtatttaacagagggaagaattaataggtgggggcgtccagcctcttttctcccaggaaaatcctaactggccttaaaatttgtacagtgtaccaggctatatttactggagctgggtctttttttatttcatttccctcgtatcatacgaatgaagctctgctgcttggagaagttactttagcctcctaaatgcagagagatagtgcagagtgtacagtgatttgagcgggacagaccacatttgaaatgggtgttgaaatggttgctntgtaaactgatttattgtctttcggagtgttcaactccgaagtgttgggaaggaatgatggacaggcctaagtgtaagcaaactgggctgaattttttctt

SEQ ID NO: 24627 - DNA, 1878 bp, Glycine max
  unsure (1)..(1878): unsure at all n locations
  Clone ID: PAT_MRT3847_122241C.1
acggctgctccctcgccgatttccataatagcagagaaccttcagaaaccctaatttctcaaaatcttcagaggacacacagcacaaccaacacctccacagcctctcctacctcccggagccatggccgccgccgactcctccgccgctccatcgcaccagttgtcgcagagggagacggacatccagatgatgctcgccgccgacgttcacctcggcaccaaaaactgcgactttcagatggaacgctacgtcttcaagcgcagaaccgatggtatttacataattaaccttggcaagacatgggagaagctccagctcgctgctaggattattgttgccattgagaacccacaggatatcattgttcagtctgccaggccttatggtcagagggcagttcttaagtttgctcaatacactggtgctcatgcaattgccggaaggcacactcctggaacattcactaatcagatgcagcaatcctacaatgagcctcgtcttctgattctaactgatccaagaacagatcatcagcctatcaaggagggtgctcttggaaatattccaactattgctttttgcgacactgattctccaatgcggtatgttgatgttgggattcctgccaataataaggggaagcatagcattggttgtctcttctggctattagctaggatggtactgcagatgcggggtactattcgtccaggtcacaagtgggatgtaatggtggacttattcttctatagagaacctgaagaggccaagcaacaagaggaagatgaagcaccacctgcccaagattatgccatttcagacttcaatgccgctggcattggcagcttccctgcttctgatggccaatggcctgctgcagtcgaacaaccttggactgaagaagcaccacaaccaatctcagcagctcctactaacttgacaccagaagcagctgttgcaggcgattggggtgaggctgttccagctccagttccagctccacaagctggtgtgcctccagcccaagcttttcctcccgctactggctgggactagcttttgacaagagattttgattccatggtgtcaaaaccataatttttcttcccctcggctcagaaatttccctttcgagatttatttgttagaaaagaaacatcatttacttgatattgaatctcggtaaaattttgtttgttgacatatattgaagcaaacttaatcgtttaattgcagtgatttaattgtttcataatgggtttttagtttaattgcagtcatttaattgtttcaaaaaaaaaaaaaaaaaaaaaaggggggccccctgacacatatgatagttccaacaattatgctgagcatggagattgaatggtcgcatggaatactttgtatgagagaacatacttctacaatatatgaacacacacttctacatgggaggcaccctcagggatggagcatctggcaactggcgggtgtactgaatcagctgatagtaaaactctaagggcagtcagaagaatgtggaacacaagatagcactagaccacctgaggaaaccttgattgaagagaacttggagagacagcaacatgaagagtatttgacaaagaggggagctgctggtgagcatttcatctctcgaatcactacacatgctctaatgaagggggcattcaggtggcatcaggaggataatcatacacgccttggaaagcatggtaattgatatgtttggattggatactaaatctgatcctttttgagtaaaacagggaaagaaagtanaaagaagaccaaggcagaggaaattatataatgaagctgaggatcttcactttcaagaaatgcctgaagtgtattctgttgcag

SEQ ID NO: 24628 - DNA, 443 bp, Glycine max
  unsure (1)..(443): unsure at all n locations
  Clone ID: PAT_MRT3847_122242C.1
ggctcgagagctgtttcagtgttaccatggagtcaaactttccaggtgcttatcacctgtttggtgaagaccagggcataccgtatctctcagactcgcttggttttccaaccatggatccttcttcaccggaagacaacgatttctcagaaactgtcaagttcataagccaaatcctcatggaagaaaacgttgaccagaggccattctatgactcactcaccttgcgagttacggagaaatccttctacgatgctctcactggcaaccaacccccttttgttctttgctccgaagctgaaaccaacaccataaccagcaacaacagtggcagcaattttttaaatgaaaattctcgtgagttaaacatcccttccccactctctgtntctgtttctgctattcactttaaccccaatnctctntctcaaccactgccatca

SEQ ID NO: 24629 - DNA, 359 bp, Glycine max
  Clone ID: PAT_MRT3847_122243C.1
tgaaggaatgcctatatcaaaagagcctgggatgaaggggaatttgagagttaagcttgacgtcaagtatccttcaaggctaactccagagcagaagtctgatctgaggagagttttagggtaggaaacataaacgactgtttggaaagcgtcaatcttagtgaaacagatagataggtaattcagctgagtttccatcattttgcatcaacttgttttatcttttggttaaagtcgtgaagattactagttttgagataggttcacaacgagtcatgctcataccatgaaaattgtatatattgattgtttttttattggaggttcctttatttaaaaaaaaaaaaaagcagccaaaa

SEQ ID NO: 24630 - DNA, 234 bp, Glycine max
  unsure (1)..(234): unsure at all n locations
  Clone ID: PAT_MRT3847_122244C.1
gaggcactccattgctggntttattttttttggggtcaaaagggctcgggggcaatttatttggatggacccggggggaaaaaaaggccgaaaaaaaaaagaccggatgcaaagtccattagcagcagaataaggtaaaacctttgacgggtgggtcggcaataggggggggggaaattttttatataataaccttgtggaaaaaaataagaagccaagcgctttttattcccc

SEQ ID NO: 24631 - DNA, 1149 bp, Glycine max
  unsure (1)..(1149): unsure at all n locations
  Clone ID: PAT_MRT3847_122245C.1
ttgcttgtcgtcgccagaacaaaaccttcccccgggttggtctggtgttcgatttaacccaggactctcgacgattttaccccgattttttgcccggacggcatcggcgccgttcttctttcgccgagcgggggtccggccgctttttccggacctccancggcggaggcgtggcgttcagtgcttccgccgctgcaggacggaaggccgccgcggtggagaacgcgctcccgtgcagcttggaggacctctacaaaggagtcaagaagaagatgaagatttccaggaacgtctacgacgcttttggcaaatgtggggatgtggaggagattttgactatcgagataaaacctggctggaagaaaggaacaaaaattaccttcccagagaaaggtaaccgtgagcctggtgtcatcccagcagatctcatttttgtgatagatgagaagccgcatgctctttatagaagggatggtaatgatttggtgatcaaccaagagataacccttcttgaggcccttactggtaaaacgttggatctcaccaccttggacggaaggagtctcatgatcccattgacagatattgtcaaacctggtgctgaggttgttgtccctaatgaaggaatgcctatatcaaaagagcctgggaggaaggggaatttgagaattaagctcgacgtcaagtatccttcaaggctaactccagagcagaagtctgatctgagaagagttttaggtggaatctcataaatatttaagtttgctatttggtatcactagtgaatgcacgttgtaaatatatcatgtgcatactgttgatgcatatgtgaataacaggaatactccacgggtgaaactgagtataaagagctaacatacgatgtgcccataatttagcatttggacttttttgcagggtaggaaacataaacgactgtttggaaagcgtcaatcttagtgaaacagatagataggtaattcagctgagtttccatcattttgcatcaacttgttttatcttttggttaaagtcgtgaagattactagttttgagataggttcacaacgagtcatgctcataccatgaaaattgtatatattgattgtttttttattggaggttcctttatttatatgctgttcttct

SEQ ID NO: 24632 - DNA, 171 bp, Glycine max
  Clone ID: PAT_MRT3847_122246C.1
atggtcggattacagggagtgatgcccccaagttttttgccacgtccaatttgtgctactggagaagcatgcgagggtttcagtgttttgctacgctctgtgaaccgtttcaggataggttttatggagtttttctttcgttcgtctgtcattgttaatggaagtgaatga

SEQ ID NO: 24633 - DNA, 278 bp, Glycine max
  Clone ID: PAT_MRT3847_122247C.1
tttttaaaatgtactactattgggcatgcccgatgaaaaaggcacgtaaggcggctaggtgttacaaaatatactagggaaccacagctccctaatataggcaacaagaacagaaatgagctaatcagagctatcgtacaaatataatggacctgccttcgcatttagtttagtcgttacaaacacttaaaacagaactccggaaattttaattgggggactagcggttctgaatacattttgtgaaataggagatgtacaaaactaaagtgctatag

SEQ ID NO: 24634 - DNA, 198 bp, Glycine max
  Clone ID: PAT_MRT3847_122248C.1
atcatattctgtctatatccccgtctgtcgctcgatagaccgagattttgtgcatggctgaagttggagaggaacatagcatgttcaagcccactgttcctgaggactagcccaatgttgctgctgcgaaagactccaaaaaactgattgtggaagattgtactgcttacaggtgtgggccatgccgttttatagccc

SEQ ID NO: 24635 - DNA, 358 bp, Glycine max
  Clone ID: PAT_MRT3847_122249C.1
atcggattataggaagagagagagagaggatggtgaaaacactggaaaaggtggcggaggacgtgcctgtgcaaaagtgttacggtggacaaaatgaatataagaagggaatgatccctcctaacacgatgtttgtgaatccaaaaggcatacggattcagcataccatttacagggacactgctgctgcttttatctgcccttactgatgtgacaccgatcttactaccatcagatcaaagcccaatgtaacagcattagatagatgcttagtgcctatgatgctagtagtctgctttgtatgaactacaatggattgcctttggcataaatatcactactgtgctaaatgtcaaga

SEQ ID NO: 24636 - DNA, 575 bp, Glycine max
  unsure (1)..(575): unsure at all n locations
  Clone ID: PAT_MRT3847_12224C.1
cgcatctcgagtttttatttacgaaacaaaaaacgaaggaaatgccgtgttagtagagagacagagacaccggtcacagtcacaccacaccggcaaatattttgcattgcttagggttttggaacagattcaattcagcgttacttcaatccaagcacatggcgaaaggaaagcatacgcatacccgagcacaggggaagaagtggtcaacgttctcgctggttctgtgggcgcttttcttcctcacactcatcctcgtcgtgctccttgctctcggcattgtttatcttccaactaccgacgacgattttccaaccacggatctcagcgccttcaggcgcaagacctctcaaagtgccgagagtttggtggaaaatccgccggagcagtggaccgagattctctcctgggagcctagagcgttcatctatcacaattttctgtcaaaagaagaatgtgagtacttgattgaacttgccaaacctcaaatggtaaaatcaagtgttgttgatagcnagactgggaagagtacagaaagccaggttcgaaccagttcaggaatgttcttgaagaga

SEQ ID NO: 24637 - DNA, 423 bp, Glycine max
  unsure (1)..(423): unsure at all n locations
  Clone ID: PAT_MRT3847_122250C.1
cgtgttgagtaaaacatactaacatataataccatcaaactgaaataatttaaacaacacaacaatatatgctgtgcgatcctatatcccgggggtgggcggtgctccacacatncaacacaacacctatccttcacagatcactataccacaaatcccatacctctgcttgcttacaacagcttcatcaaaacacatggtatctattaaagatataactctaatctatcgcacacgtgataactatatccactgcgacaataaaactaaagattatcattaatcgccaatactaactttaatacttaaaaacacaacaaacaataattgtcctacactcccattcaattcacatttattgaattatcaatcactctcccacatcattattaatgcaaccaatagttaaattcaattttacct

SEQ ID NO: 24638 - DNA, 1681 bp, Glycine max
  Clone ID: PAT_MRT3847_122251C.1
aattctcctattgctatgatttccttccatattctctgttccgaacacgacacagtgacataccatcaatcttcccccaaattattcattcctctttttttccccattaacaatattaatcaatccaattaatttccatgaccatgtccataacactcttactccaagccaacccctcccacttgaaatggaaccagttaccttcccttccacgtcgcacaaggcccgaccgtttcactccaatacccgactcgaaacgccgcgtttcaagcgtcaaatgtatctcctcgtcgcggaagccggataacacgtttagtttgcagtccccgtgggaggttctggcgagcacggtgtcgaacacgctgaaggcgctgaagaaaccggccatagctgcggtgttggtggggctgttattaatgtacgatccaacttgcgccttcgcggcatctggagggagaatgggaggaaggtcgttttcttcgtcttcttcttcgtctaggagttattcagtgccgaggacgtcaagctcagggttctctttttcggcgccgtattacgggccttctccgttcggtggggtttatgtgggtcccgccgtgggggtcggagtcggtgctggctcgagtttctttctcatcttagtgggattcctggcttttgttttggtttctggctttctttcggatcgctcagagggtagtgctttattatctcagtgggtttcatcactttttggtttctaggttggattgttggggatgggtcgcacacttcaaagggatctgaataggattgcagcagttgctgatacatcaccttcagaaggtctgcattatgtattgacagagacaaccctagctttgcttcggcatcctgattactgtatctcagcgtattcatctgtggacataaagcagggtattgaagatggggagaaacgtttcaatcaactttcaattgaagagcggggcaagtttgatgaagagacactagtcaatgctaataacataaagagacaaagcacaagaagccagagagcgaatgggttcagcaatgaatacatagtgataacaatcttggctgctgccgaaggagaccataaacttccaagcatcaatggaagtggagacttgaagcaagctttacagaaacttggttccattccgtcaagcagattattggcagttgaggtgttatggacaccacagaatgagaacgatactctctcagaacgggagttacttgaagattacccgcttttacggcctttgtaagtggtgatggtatgcttgtcattctgcttctagccttctagagctatgaactgaaattgggttgtgattgcacaattaaggatcatctccagtagtactgaaataatatcgttaaaactgatgagattgtcctgctactcaatctgcaaggcaattttcagctgcggccaatgtcactaatgacgttgtatcacttataaaggttcaatattaaatattgatggcattagttgtaaaaattaccagtaggatcaactctaaagaatatgtacaatattatagacaatcattttatcattgaaataggtgccctttctgtttagaaattactctgctgtagtcggtgaacttttccagattttattcgtgcatgactctgagaatacattctcttaattttattttaa

SEQ ID NO: 24639 - DNA, 216 bp, Glycine max
  Clone ID: PAT_MRT3847_122252C.1
gtgtggttagtagtggtctattgctacctgttctatgtttgtacagcttgctactgtgtggcagatctttttgtatggcttgtcatggtgccctggtttctgaacttcccatcgacaggaaatttctacagactactattctccgtcgttgtgtcatatctaggttagcgttgctctcattgtggttagattaactctcagcagtggttgactcgt

SEQ ID NO: 24640 - DNA, 298 bp, Glycine max
  Clone ID: PAT_MRT3847_122253C.1
gggggacaaatacaaaaatccaggctttatgtggggccagcacattgaattatatttttttttgggggcccccaatgaaataaaacaaaaattttcatcaattttacggggttcatgagaagataataagatgcttagctaatttaacaatttggggggcatcttttacataatacaacccacaagggaagaaaggctaaaaagtttttgccgagatttctcaggggttaatgggggataactaatataagctcctaatttttggtttaccagcggaaactttcaagggccccccccc

SEQ ID NO: 24641 - DNA, 1484 bp, Glycine max
  Clone ID: PAT_MRT3847_122254C.1
gcaaaaatagaaaatgggtactaacagatctttaatggccacgatcctcatcgtgttcttcacggtgttggcagtgtcatcggcgttggacatgtcgataatctcgtatgacagaagccacgcggacaagtcagggtggaagagtgacgaggaggtaatgagtatatacgaggagtggcttgtgaagcatgggaaggtgtataacgccgtcgaagagaaggagaagaggtttcagatcttcaaagacaacctcaactttatcgaagaacacaatgctgtgaaccggacatacaaggttggactgaaccggttcagtgatcttagcaacgaggagtaccggtcaaaatacctgggaaccaagattgatcccagcagaatgatggccagaccaagtagacgttactctccgcgcgtggctgacaatttgccggaatctgttgattggaggaaagaaggtgctgttgtcagagtcaaaaaccaatcagaatgcgagggctgctgggcattctcagcaattgccgcagttgaaggaattaacaagatagtaacaggcaatctaactgcactgtcagagcaagaactgttggactgtgatagaaccgtcaatgcaggatgtagtggcggacttgtggactatgcctttgagttcattatcaacaatggtggcattgacactgaagaggattacccctttcaaggtgctgatggtatctgtgatcaatacaagataaatgctagagctgttacaattgatggttacgaacgtgttcctgcttatgatgaattagccttgaaaaaggcagtagcaaatcaacccgtgagcgttgccattgaagcatatggcaaagagtttcaattatatgaatctggtatattcacaggaacatgtgggacatcaatagaccatggtgttacagctgttgggtacggaacagaaaatggaattgactattggatcgtcaaaaattcatggggtgagaattggggagaggcaggttatgtaagaatggaacgtaatatagcagaagacactgcaggaaagtgtggaattgcgattctgacattgtatcccataaagattggccaaaatccctcaaacccagataactccagctaaacccaccgggaatttacaggaaataacaggaagactaaaagagttctagacttctgtttagtggaagttatctagcccatgaatgaaaaggtgaaaaaagagaagattaggccgtactcattctctattctctaatttgaaccagccatcaaggccgtacgagaaagatattcaaggtgggaagatcacattccttttttcctcttccttctaataaatctttgtttttagtttttctatgcctagctaaatcctttttgatggagttaggagaatttctatgtaacccacagggatttttaataaaattatgtttttctcaaatttgtgttctctaatctttttgcttcttaagaattgacgacca

SEQ ID NO: 24642 - DNA, 327 bp, Glycine max
  Clone ID: PAT_MRT3847_122255C.1
gtgccacggttatctcggttgataaacattgtggttaccacgtgtcaacttaattgtcttcaactgcctaaacttactggctctcatcgttaatcgattaacgtcgttggtaatggtgcctatgtgtttgtggtaatgttaattttcttcatattaaatggccttctcatcatttgaaaagtcggtacaaagcccgttgagggtacgtgtcctttaagttgtcgtggcccttgtttgtaaggtggccaacaagtaataagtctcactggttgttgattcggtgtgtgcagttaaaaacaggattacacatgtgatcagggtggtgat

SEQ ID NO: 24643 - DNA, 1055 bp, Glycine max
  Clone ID: PAT_MRT3847_122256C.1
atgcccgcatgctccgccgtcgtgccggacgtacttcacggtcggacccctgacgcaacgcccgctcatgcccggtgtcagaccgcaccgcaacgaattctcattgacgattccttcatgatacagggtcaattagtagataatgatcgttctgactcacaatggaagacggacttaagtatggttgcagatctatctgctgccaagaagcttgaaagtgatgcagcagctgcttcaaatgagaagaaccaggagccaagtgacctctttgtagttctaaaacgggattctggattggactctgttgaggcctcacggacaatggactatgaaatcgacttttccttctcggagactaatagaagatcctccattgatgattctcatgaaaaggtgaatgacagccttcctgttagtcctgcgaaaaccaaagtttctggaacaagaagttctgaaaaagatggcaagtcaaaagcgctgcgatgttcctctgggaagggcaagcctgaaatcatgtctagggccagaaagccagctctccctaaaaagcctgtagttcagaagagcaaaagggaacaggaagatgagattagacagaagatggaagaattgcggaacgaacgtcagaggagaattgctgaaagaactgcatcctctggtgttggtcgtgccgcgacaaagaaagaccaaattgaaggtaaaacagcaaggatttctgccaagagtgacaagaataagggaatcagttctgtcaaggtcaggggaatttagcaagccacacagtaaagtgtgtttaaataaccgttgattaaaatgaaatgaatagttttgttttctatataatctcaaaatattttgttttgtttcacggttgtatatcaatagattctttatcaattgtaggtgaaaacttgtcataggttttgttggattgtatatcccggcattctttgttctatgtaatgtatgaaaccttttataaatagtttttgtttttcttcatataaaaatgaattttgttttccaaaaaaaaaaaaaaaaaaaaaagaaaagaa

SEQ ID NO: 24644 - DNA, 349 bp, Glycine max
  unsure (1)..(349): unsure at all n locations
  Clone ID: PAT_MRT3847_122257C.1
cttcttctaccttattttctttccctagtctattagattcatctctccaccaanttggtggggaatataaaaaaggctgaacattttctgcattcatgctaaatatttatgttgtccaacaatttcaatcattccacttaaattcccctcaatttaaatatcatcttttttacatctctaaattcattattgcaacattgaacaattaccaacttccctatctattatccacacccttattaattttttaaacaatttcttgtccagaaccttttcttcaacacttattttaaaaaacatttcttttatgcccacataattttcttattcctcaacatccctacaaaaa

SEQ ID NO: 24645 - DNA, 871 bp, Glycine max
  Clone ID: PAT_MRT3847_122258C.1
ggattggactctgttgaggcctcgcggacaatggactatgaaattgacttttccttctcagaaactaatagaagatcctccatggatgattctcacgccaaggtgaatgacaaccttcctgttagtcctgtgaaaaccaatgtgagaaaaagccaagtttctggaacaagaagttctggaaaagatgaaaagtcaaaagtgttgcgtgattactctgggaagagcaagcctgaaatcatgtcgagggccagaaagccagctctccctaaaaagcctatagttcagaagagcaaaagggaacaggaagatgagattagacagaagatggaagaattgcggaatgaacgtcagaggagaattgctgaaagaactgcatcctctggcattgctcgagctgcgacaaggaaagaccaaattgaaggtaaaacagcaaggatttctgctaagagtgacaagaataaggctcaaccggtaaaagagacaagcagaatcagttctgtcaaggtcaggggaatttagcaagcctgtcagttcaatgtggatgcaacttttataagctacaaagtaaagtgtattcaaataaccgttgattaaaatgaaatgaatagttttgttttctataaactgtaagttattgcatgtattcaatcttgtaatctcaaaatattttgttttgtttcacgtggttgtatatcaatagattctttatcaattgtaggtgaaaaattgtcataggttttgttggataaataaatattgatgtttaataggttctgtggattgtatatcccggcattctttgttctatgtaatgtatgaaaccttttataaatagttttcgtttttctacataaaaaaaaaaaaatgaaaa

SEQ ID NO: 24646 - DNA, 321 bp, Glycine max
  Clone ID: PAT_MRT3847_122259C.1
atagagaattcaaacgcaacatattttttttgggagctaatatatcagaaggatccccccaaagacatggcccaaaaaaaacgagaacatgaatggctgaggttttgccttatggtgacccacgtacaagaagaaaaaggtgaaggaataatgacggtattaaccaaaatgatgaccctaaaacgaaaagggtcagattcgggaaaagctgataatgagcctccaggttgtgtggacctcgctgatggagagactagagttaacaacactgcctaagatggatgataaggcaggcaccagacacggggttttaccggagaa

SEQ ID NO: 24647 - DNA, 443 bp, Glycine max
  Clone ID: PAT_MRT3847_12225C.1
gcaattcataacaaaaaatgcaatatcctaaagtcaatatacaaaccttcacatcattcccctattgcatctatgtactttcggttgtttcatcagaaattatactccttgccaagctgctttccttctctgtccatagttccaaaattgaggccatgtactgccttctaggattatgttcatttatctctgttaaagctgccagctctgctgtatatgctcctccttcgtccatgtcattttccagcctattaaggttttcattataatctttaataatttcctgaaattaaaaatatgtgaagccagataacaaagtttaagcattagaaaatttatcaaatgaattggagcaataatgcaatataatattaaaattaatctgaaaaccttttattggatcaaattgctatattagaaggatattattctaaagcaataga

SEQ ID NO: 24648 - DNA, 498 bp, Glycine max
  Clone ID: PAT_MRT3847_122260C.1
cttgaaaaactgacattgaatttgttcaaaaacaggtttaaaatcgtgaaaaacaaattcgggggggggaaaaatctcccccccccaggagggtttttagcctgggtgcattacaaactacgaaaaaatttttgggcgcgcgaggggaaaccccaaaatttcggcgttcctttgccccgaaaaattcatttgcctctggaacccagtccaattattgccatttttggcggccaaagaaaccatactgtatcacacccttgtctttccttttagacccccttggacacaaaagcgctatcctttttcaaaacctcccaaagtttttttttttggggaacccttcgggttgggaggccatgtggtctccggccacgaaaggccgcccccccctctcaaggaaggggggccaaaagaaaacacaaccttccccttgggttttttaaaactgcttcttaataccccgacctgtttgttgggtcacccaaaaaaagccatgcc

SEQ ID NO: 24649 - DNA, 332 bp, Glycine max
  Clone ID: PAT_MRT3847_122261C.1
ggcggcttcaaacaaaaaaagggtccccccccctttggctggtacccggggccatttttttttgggggggaaccattttttggggttaaaataaaaccccccttccccccttttttttaaaaaaaatcccaattcggcaaattttttttccggggataaaacccccccataaaaaagggttgggggttccaacaaacaaaccccaaggggcccaaccaaaatcccccgggggaacaaaatctcccccccgtcctaaaaggcctggaagggatttttccccgttggggggccctttttttttttcttccacccccaggggctggggttttcaa

SEQ ID NO: 24650 - DNA, 596 bp, Glycine max
  Clone ID: PAT_MRT3847_122262C.1
gcctcctgttggtggctggctcttgccacaagtggctcgccccttcgcgtctgccacgccgcagcagccactgttgtccggtgcctccagtcttgcgcttggctgccgtcggatgccttacggctctcatcctggccaggggcaggcgcctgttcccccgtgctgcccttttggtgcgtgtcttctcatactcgagccgattcggctcgaggccagaattaaggattaaggtctattcagtcacaaggaatttgctcataaccatgggtgttggtacataaaatttgagcgtgattaagctgtatttaatttgaccgtgattaagctgtatttaatttgaccatacttagtgtcactttttaattagtcctcttgaacaggaatggctttataccttgcacaggaagttataaacaatgcttttgctgatttaagtattattgagcataagaatagtggcatattaaatggttcaaattcaaatgcttctgctggagcagtgctactgccaattcatagaaaacggaagcacagcagtacaactggttctcttcatgcgcatggtgaaactctgttgcctgtggaagttccaagaa

SEQ ID NO: 24651 - DNA, 547 bp, Glycine max
  Clone ID: PAT_MRT3847_122263C.1
ataatgtggagctgaggtcatctgattctgattatcatcacagtcatggtcaaagaagcagatcaaagtcattggaagaaaattctgaagatgaaagcaaaagatcaatgcataagaagtctgatcgccaccaccaccatcatcgccaccaccaccatcatcatcacaaacatcggcaccacctggatgatgagagaaatcacatgcaacaacactcccctaaattcaatggaaagcatgatgagaagttagacaaaactgaaaccgataaaaaggatggtggtcatcatgaaagtagagctatggtcgagaataatgatggtcaaattgtttgatttttgagaatgaatctgttgtggtggttctgtactgattggcagctgagtatctgatatccaaattaaagttaaaggaacaatttcattatttatgtcggatgtaatattgtcggcagttattgtctatggaaactttgttgggtaattgttggctgtgaacattaatttgatcctcattcaactataaaacagttgcatttgaagtttac

SEQ ID NO: 24652 - DNA, 304 bp, Glycine max
  unsure (1)..(304): unsure at all n locations
  Clone ID: PAT_MRT3847_122264C.1
gtcgcacgcncgcgtacgtaagctcggaattcggctcgagcacngtcactntnnncccngnactancactncaggtgtngtngnnaagtanctcaacaaagagttcgnaaggagacaaatttatngtnnctctgtgccatnctcancgatgaacacnggatntnatcttanagcngccagggganggnacacggtncctcnnctgcatggnanngtaaancngtgnnanatganattcccngcngtagcncannntatctgnnctatnnaganagcggattnagtaannntngcatncnnnncg

SEQ ID NO: 24653 - DNA, 455 bp, Glycine max
  unsure (1)..(455): unsure at all n locations
  Clone ID: PAT_MRT3847_122265C.1
atggatcgaagttggatgaatgcaagtcgcatgagcccagaatatgaggatggcgtcgaacagttcttgcaatttgcttcagaaagaggtcgaccgaatgaagaaggaaaatattattgtccttgcatcaactgtttgaatggaagacgacaactacttgacgacatacgggaccatctattgtgtgatgggatgaagaagaattacacgacgtggatatggcatggtgaagtgactgacatgcatactgggtcccaatctgaaccgtttgatgtagatatgggagatcgcttggaagacatgattcgtgaccttggacaagattgttttcaacaagcacacgcccctgtgtatgaaagattgcagagtgattcaaagaatcctttgtatgcaagctgcaagaattccttaaacctgttgtctgctgtgttaagtctggttaatgtgaaggccan

SEQ ID NO: 24654 - DNA, 436 bp, Glycine max
  Clone ID: PAT_MRT3847_122266C.1
gacgacagaaggggatgaaagatcaatttgcaaattacgttgtacaaaaggtgctggaaacttgtgatgatcaacagcgcgagctgattctttcccgaattaaggttcatttgaatgcattgaaaaagtacacctatggaaagcacattgtctctcgtgtagaaaaacttgttgcagctggaggtacatgttccgtgtcattcctaaatttgtagtctgacacatttttatttttcaccatccatgtgtgcattaagagcaatttcattgatagcatgctcctacatgataaatgcattacacgagatacatgcatggaaaccaagccattctgctgcttctaattgtgttatgatatgcacatttaatttcaagcttatggttatcatatgtgaagtatttatgatatataagtttatgaaccggtcatgtattt

SEQ ID NO: 24655 - DNA, 323 bp, Glycine max
  Clone ID: PAT_MRT3847_122267C.1
gcccaccttggaatactttaaaagatttttttcaaacctacctccacatgcattttttggtaaaaaggctaatatctaaaacatgggaaaaattcaaaggctaaaacacccagttttaaacccgggaaaaagaacaactcccttacaaaagggacccatttgcccatacaaaccctaaaaaacactggttcctaagagtaaacctttgaaaaaagggtttgattaaagccgcctccacacttgaatggcccaatcatgggaactggcgtctgacctatggggcttaatgcacaaataccgggttttgactagtctgaaaaggg

SEQ ID NO: 24656 - DNA, 482 bp, Glycine max
  Clone ID: PAT_MRT3847_122268C.1
cagtcgcgagagtgatacaagggtggctactcgggagctggacgggtggacgaagattgacattgaaatgggacccgtttagatggccgatgacatgtcagcggcatactacgaccagctgagccggaagggcaactgctccataaaggagaatgcaaggtcgcgatgtgttctcttcctcgccaaacgacgacgatgcaaacccctgctccttcctctacaaattagtcaaagcctgctccactgcgccttcaaactatgggaaccaagcacagcttctatccatacgccacaagctcaagacaaagccctgttccgagtctagggtgtcgagcagcgatagcgattgacgtataagacgatgcagagatcgatacttggaatcgcggaggcgaagcacgattagagacagacatcatcgtccggagagaggtatacgcaggagtaatagcgttgctgctcgcgagcaacgcaggacgcag

SEQ ID NO: 24657 - DNA, 396 bp, Glycine max
  unsure (1)..(396): unsure at all n locations
  Clone ID: PAT_MRT3847_122269C.1
cgcactaacataaccgtacattcggannnggatcgtcataaggaactggcatatcaatgttactacattttcaggagaactacacaagaataaaattactaaaaccaaaactggcataaaaaacttctcaacaatgtttataatcaggatgaaaaaacattcccactattgggaccaatctttatcaaaaacagaatgtataaaatcattttagcactatacaaaactagctcatggggctttaattctgccttcaaagaaaacctaacacccaagtaaaacttgaatgtctggaacattcttaatggcccttaaaaaaatagggaacacgggtttttgagcatactttaatttattggggaagcacatttttctcctccttttctggctcgaaaa

SEQ ID NO: 24658 - DNA, 781 bp, Glycine max
  unsure (1)..(781): unsure at all n locations
  Clone ID: PAT_MRT3847_12226C.1
gagagacagagacaccggtcacagtcactccacaccggcaaatattttggtaagtaaagaaaagaatagtggctggagtcaacgaaatcgtgacgacaccattcgaaggacttgtttgtttaactacgactgagtatatcgtaattcgttcgtccattagcattgcttagggttttggaacagattcaattcagcgttacttcaatccaagcacatggcgaaaggaaagcatacgcatacccgagcacaggggaagaagtggtcaacgttctcgctggttctgtgggcgcttttcttcctcacactcatcctcgttgtgctccttgctctcggcattgtttatcttccaactaccgacgacgattttccaaccacggatctcagcgccttcaggcgcaagacctctcaaagtgccgagagtttggtggaaaatccgccggagcagtggaccgagattctctcctgggagcctagagcgttcatctatcacaattttctggtcagttttccttatctactaatgatcggctcatctgcttctcctcgatcttttttttttttttggagatagctagaagtaagcgtctgttttttttttttttttttgagtgagagatcttattttactgctggaaattcttgcattagcaaactgttgaaatttatattgtatgcaaatggttagttctgcttataatttggaacagtcaaaagaagattgtgagtacttgattgaacttgccaaacctcaaatggtaaaatcaaagtgttgntgatagca

SEQ ID NO: 24659 - DNA, 443 bp, Glycine max
  Clone ID: PAT_MRT3847_122270C.1
caaagagatttgaaaatagtcaagttgattttaaaggtcaagaatactttcagtttattccatttggttttgggaaaaaaggatgtcctgggatgaattttggaattgcttctattgagtatgtgcttgctagtcttctttattggtttgattggaagttgcctgataccctagatgtagatatgagcgaggtatttggacttgttgtttcaaaaaaagtaccacttttccttaaaccaaaaacctttccattttaattaagccaagttatacatgtttttgttcttgaagtgattattgctgtgagttttttttttttttttttgttatcagcgttatcgtactgtacattatcttcactttgtgtgatgttgttgccctaaataatatattagtatttgaagtattgtcaaatttataaagataataaatttaggcccccc

SEQ ID NO: 24660 - DNA, 364 bp, Glycine max
  Clone ID: PAT_MRT3847_122271C.1
ggctgatcaaaccgataaggcttttttgaaacaaccaaatgtgtttctcatctcgtacaaaactgggaaggtaaagaaacccgaaaagggtgggaaccgcttttggaaatccattgggcttggatttaagactaccacggaagccatgtaaggaacctacattgacaagaagtgcccgttcactggcaatgtttccatacgcggccgtatcttggctggaacatgtcacagtgctaagatgaacagtactattattgttaggaggaattatctccattatatcgagaagtaccacaggtacaagaaaaggcactacgagcattttgctgatatatcacctgatttcactgttaatgtaggagat

SEQ ID NO: 24661 - DNA, 461 bp, Glycine max
  Clone ID: PAT_MRT3847_122272C.1
tacggctgcgagaagacgacagaagggttgcacccaactagcctttaaagaatcagaaaaagaatttccaaaagtgtccgttgctaaagagttcattgtctcagaacatgacctggtcccatcatataaatccactcgaggagcataacccaaagtaattgacggaaatctcttacatatcaaggagatgtccagatcatctaatgcatcttttggactcattttagatttcttttcaccgcttccattcccaattaggtcaggaaggttataatccataagagcaactacctgaaagtaaaatgaatttcagtcaatgatacattcatccgtgcagccatatgcatttataaacaaactatcaacatttcttatcaagtcatgcattcaaagcagtaagctaaaaaaaatgtcaaaagcaatcattagattcataaaagaatgaatgagatgaagaaaat

SEQ ID NO: 24662 - DNA, 1211 bp, Glycine max
  Clone ID: PAT_MRT3847_122273C.1
gtgtgacaggtgcttttccacgtcttcaacgtctttctatggagtgttgtcccaagctgaaagggcacttgccagagcaactatgtcatttaaattatctaaagatttctgggtgccaacaacttgtaccttctgctctcagtgcccctgatattcatcaattatacctagcagactgtgaagagctgcaaattgatcatccaacaactttgaaagagcttaccattgaaggtcacaacgtggaggcagccttactcgaacagattgggcgcaattactcttgttcaaataacaatattcccatgcacagttgctatgatttccttctaagcttggacatcaatggtggctgcgactctctaacgacctttccgctagatatcttcccaatactcaggaagatttttatcaggaagtgtcctaatctaaagaggatttcacaggggcaggctcataatcatctccagagtcttggtatgagagagtgcccccaattagaatcattgcctgaaggaatgcatgtcctccttccatctcttgatcggctgcacatagaggattgtccaaaagttgaaatgtttcccgaaggaggtttgccatcaaatttaaaaggaatgggtctctttggtggtagttacaaacttatctacttattgaaaagtgcattgggaggcaatcactctctagaaagattatctattggaggagtggatgttgagtgtcttcctgaggaaggtgtactgccacactctcttgttaatctatggataagggagtgtccagatctaaaaagactggactacaaaggtctctgccacctctcctctctcaagacattgcatcttgttaactgccccaggctccaatgcttaccagaggagggtctgcccaaatccatttcaactttgtggacttacaattgtccgttgctcaaacaacgttgccgggaacccgaaggcgaagactggccaaagattgctcacattaaacgcgtgtcgttacacggtggttaatgagatgcagattagctacttgctatcctgggagatgcatgcttattctacattgttttaaacattagtttatgtacagctaaatttgtaacaggattatgggcattgcttttatcgggaattcactgacatgtacatttctaaaatttcaaatttgttttcttctaaaactaatgatcgtgaattcatgatacttct

SEQ ID NO: 24663 - DNA, 3497 bp, Glycine max
  Clone ID: PAT_MRT3847_122274C.1
tggaatgggtgttatgggtaagaccacgcttgcccaacatgtatataacaacccaaggatacaggaggctaaatttgacatcaaagtctgggtctgtgtgtcggatgattttgatgttttgatggtaaccaagaacattcttaacaaaatcactaactcaaaagatgacagtggagacgacctagaaatggttcatggaagattgaaagaaaagttgtcggggaaaaaatatcttctcgttctggatgatgtttggaacgaacatcgagatcaatggaaggctttacaaactcctcttaaatatggggctaagggaagtaaaattcttgtcacgactcgcagtaacaaggttgcttcaatcatgcattcaaacgaagtacgtggactaaagcaattacgagaagatcacagctggcaagttttcgctcagcatgcattccaagatgattatcctaagttgaatgagcagctgaaggagattggtataaagatagttgagaagtgccaagggttgcctctagccttagaaacagttggatgccttctacacacaaagccatctgtttcacaatgggtaggtgtattggaatacaagatatgggagttgccgatagaagacagtaaaatcatccctgctttattgttgagctattaccatcttccttcttatctcaagagatgtttcgcttattgtgccttattccccaaagatcacgagttttacaaggagagcttaattcagttatgggtggctgaaaattttgtacaatgctctcaacagagtaattctcaagaagaaattggtgaacaatacttcaatgatctattatcaaggtccttctttcaacgatccagtagagaaaagtgttttgtcatgcatgaccttctcaatgatttggcaaaatatgtttgtggggacatctgtttcaggttagaagttgataaaccagacagtatatcaaaagtccgtcatttttcatttgtaccccaatacgatcaatattttgatgtgcacgggagtttatatcatgctaaaatgctacggacatttatgcccatgcctgcaccagcaagtcgtatatttacttggggttgtacgggactagtagatgagttgttctccaagtttaagtttttacgcatcttatctttgtttcattgtgacctgaaagagatgcctgactctgtaggcaatcttaagcatcttcgttcgttagacctttgctatactgacataaaaaaactacctgattcaacgtgttttctctgtaacttgcaagtcttgaagctgaattgttgtcaccgtttggaggagctaccctcaaatttgcataaactcaccaatttgcgctgtcttgaatttatgtacactaaagtgagaaagatgccaatgcattttggaaaactgaagaatcttcaggtgttgagttcgttttatgttggaatgggcagcgacaactgcagtattcaacagctaggggaactcaatcttcatggaaggctatcaattgaggagctgcaaaatattgtgaatcccttggatgcattggccgcagatttgaaaaataaaactcatcttctggatctagagttaaaatggaatgagcaccagaaccttgatgattcaataaaagaaagacaagtacttgagaatctgcaaccttcaagacatttggagaaattgtcaatcgggaactacggtggtactcaatttcctagttggttattggataattcattatgtaatgtggtgtggttaagcttgaagaactgtaaatattgcctatgtttgcctccccttggacttttgccacttctgaaggagcttttaattggagggcttgatgggattgtgagtattaatgctgatttttacggtagtagctcttgttcatttacatccttggaatctttggagttctacgatatgaaggaatgggaagaatgggaatgtaaaggtgtgacaggttcttttccacgtcttcaacgtctttctataatgcgttgtcccaagctgaaagggcacttgccagagcaactatgtcatttaaattatctaaagatttctgggtgcaaacaacttgtaccttctgctctcagtgcccctgatattcatcaattatacctaggagactgtggagagctgcaaattgatcatccgacaactttgaaagagcttaccattgaaggtcagaacgtggaggcagccttactggaacagattgggcgcaattattcttgttcaaataacaatattcccatgcacagttgctatgatttccttctaagcttggacatcaatggtggctgcgactctctaacgacctttccgctagatatgttcccaatactcagggatcttggtatcagggagtgtcctaatctacagaggatttcacaggggcaggctcataatcatctcaagtttctgggtatcacaaattgcccccaattagaatcattgcctgaaggaatgcatgtcctccttccatctcttctatctctcctcgtaattgattgtccaaaagttgaaatgtttcccgaaggaggtttgccatcaaatttagaaaaaatatgtctctattgtggtagttacaaacttatctccttattgaaaagtgccttgggagccaatcactctctatttagcttagatattggaggagtggatgttgagtgtcttcctgaggaaggtgtactgccacactctcttgttaatttacagatcaggtagtgtccagatctaaaaagactggactacaaagggctctgccacctctcctctctcaaggaattgcttcttaaagactgccccaggctccaatgcttaccagaggagggtctgcccaaatccatttcagctttgtggatttggggggacgtgtccgttgctcaaacaacgatgccgggaacccgaaggcgaagactggccaaagattgctcacattaaacacgtgtcgttcctagattgaaagagctgtcaatcaggagctatgttagtacaggatttccaaattggtttggactttgaagattaatcaatatcgggggagcaatagtttgtacgtcaaaagtatcatcagaatactgaaggcagaaattccagccactgaatgcctccaaattgtctagctttggataaggaaactaggaaattggcgaaggtcgtcaaactcaaattttctttggtccatggaaaagatacattgctcgatgaccaatgacctactggtgcctctgaaagtccttgagtgaaggtggttaatgagatgcagattaaatacttgctatcctgggagatgcatgcttattctaaattgttttaaacattagtttatgtacagctaaatttgtaacaggattatgggcattgcttttattgggaattcactgacttgttaattccagaggttacatcatgcaagtacatttctaaaatttcaaatttgttttcttcttaaactaatgatcgtgaaattcatgatacttttaacttc

SEQ ID NO: 24664 - DNA, 701 bp, Glycine max
  Clone ID: PAT_MRT3847_122275C.1
cctagaaagattttctattggaaaagtggatgttgagtgtcttcctgacgaaggtgtactgccacactctcttgttactctagacatcagtcattgtgaagatctaaaaagactggactacaaaggtctctgccacctctcctctctcaagaaattgcatctttctaactgccccaggctccaatgcttaccggaggagggtctgcccaaatccatttcaactttgagcatttacaattgtccgttgctcaaacaacgttgccgggaacccaaaggcgaagactggccaaagattgctcacattaaacgcgtgtcgttacacgattgaaagagctgtcaatcaggagctatgttagtacagatttccaaattggtttgtactttgaagattaatcaatatcgggggagtaatagtttgtacgtcaaaagtatcatcagaatactatggcagaaattccagccactgaatgcctccaaattgtctagctttttataaggaaactaggaaattggcgaaggtcgtcaaactcaaattttcttgtgtccatggaaaggataaattgctcgatgaccaatgtcctactggtgcctttgaaagtccttgagtgcaggtggttaatgagatgcatggttattctaaattgttttaaacattagtttatgtacagctaaatttgtaacaagattatgggtattgcttt

SEQ ID NO: 24665 - DNA, 1448 bp, Glycine max
  unsure (1)..(1448): unsure at all n locations
  Clone ID: PAT_MRT3847_122276C.1
cgtacgcggctcggaattggctcgagccgctcgagccgttggaattggataatagccaccaaccagaatcaaaataagaaaaacagagtaattttgcatcgtcgtcacacatggagatctccggcaccgttctccgtcaggtcagctacgtctccggctatgggacccacacgcggtcccgcggcctggctcctcgttttggggtgaggatggggatgggttctggtttctgtgacgaggggcatttgcggtattaccaggacaccaaaaaggttctcaccccaaagaagaagttgaagctgctcaagggtttctccaaattagggcttgcatcggatcccgagaaactcgccatgttctatgatcttcaacaaaacctcacctcggatgctggagatgtattactgagagagttagaagcagcaagagcaaaggagaaggaagtgaagaagaaaaggaaacaagagaagaaggccaaactcaaagctgccaagatgaattgtgaatcttcttcatcttcatcgtccgaatcaagtgacagcgattgtggttgtgatcaagtggttgacatgaacaccttcagagctggtgttggtgttggtgttggtgttgttgttggtgttgttgcccctgcacctgtcgaggaatccccactgcccaagaccgcccccattgttgaggatgcgaatgcgcattgcgttgccatggaactgtgttctaagaatgatatatatgttagcagtgctagtaatggttttaagaacgagagtgctgtagttacctctgctcctcagaagaggattgaggtatgcatggggaacaagtgcaaaagatcaggggctgctgcattgatgcaagagtttgagaaagtggtgggtgttgaaggtgtagctgttgttgcatgcaagtgcatgggcaagtgcaaaactgctcctaatgttaaagttcagaattctgttgatcataatagcctggctcagggacttgatgattctgttaagattcctgctaaccctctatgcattggggttggcttggaggatgtggatgccatcgtggctagatatttttgggagagtcacacagatataggcatggcaggtgcaggtgcagctacagctacttgatgttgtgggaatggctagtgtgttatttgtaattatatatatacgtagccaggatgccgaggaaacattattgacaatggttttttttagttgttcatattgtataatataaattagttatgaagtttcttttccttgtttattgggaatgccattccattgtttcactcttatacaataattggctgcaattagccgttgtcagaaaaaaaaacattatacaaccaaatttggtcatttaaagtgaataatatcacgttcataggactaaactcgtaaagcgcttttacaaaattcaagttcttacaataaatannnaat

SEQ ID NO: 24666 - DNA, 1421 bp, Glycine max
  Clone ID: PAT_MRT3847_122277C.1
ggttatcggataattcatcattgaatgtggtgtccttaagcttgaggaactgtcaatcttgccaacgtttgcctccccttggacttttgccatttctgaaggagctttcaattgaagggcttgatgggattgtgagtattaatgctgattttttcgggagtagctcttgttcatttacatccttggaatctttgaggttctccaatatgaaggaatgggaagaatgggaatgtaaaggtgtgacaggtgcttttccacgtcttcaacgtctttctatagggtattgtcccaagctgaaaggtttgcctccccttggacttttgccatttctgaaggagctttcaattgaagggcttgatgggattgtgagtattaatgctgattttttcgggagtagctcttgttcatttacatccttggaatctttgaagttctccgatatgaaggaatgggaagaatgggaatgtaaaggtgtgacaggtgcttttccacgtcttcaacgtctttctatatataattgtcccaagctgaaatggcacttgccagagcaactatctcatttaaatcgtctagggatttctggatgggactctctaacgaccattccgctagatatcttcccaatactcagggagcttgatatcagggagtgtcttaatctacaggggatttcacaggggcagactcataatcatctccagcgtctgagtatgagagagtgcccccaattagaatcattgcctgaaggaatgcatgtcctccttccatctcttgattatctgggcataattcgttgtccaaaagttgaaatgtttcccgaaggaggtttgccatcaaatttaaaaaatatgcatctctatggtagttacaaacttatgtcctcattgaaaagtgccttgggaggcaatcactctctagaaaccttacggattggaggagtggatgttgagtgtcttcctgaggaaggtgtactgccacactctcttgttactctagacatcagtcattgtgaagatctaaaaagactggactacaaaggtctctgccacctctcctctctcaaggaattgactctttggaactgccgcaggctccaatgcttaccagaggagggtctgcccaaatccatttcaactttgacaattcggaggtgtgggtttctcaaacaacgttgccgggaaccccaaggcgaagactggccaaagattgctcacattgaagacgtggatataaggtagtgaggttgattataaagaataatggtgaaagatgtagatgcttctctattgcctgcaatttactaattaattgttttctaaacttatttttgctttctgcttgctggacgccgccgctctgttatttattattcgactaaataattgtttaatacagtttcaagtgattgattctgcttggat

SEQ ID NO: 24667 - DNA, 5403 bp, Glycine max
  Clone ID: PAT_MRT3847_122278C.1
tttttacttaattattttttttataaacattaatgagagccaattaaataagtatagagataaaaaaataataattttaaaataataactttgtagctattcatcaggtgctaattctccgcagtagctttgtagcttttgagatatgatattgtttatatattaaatatgaaaaggcattcaaaaatcatactatgcgctgaaaacttagtcttgctttgcagagcttcctatgatgtgggttgggcttcgttctctgtctcttgtcatctttttttgcttaatgttctcatgtactttttcacatatcagtttttctgttaattacatggttaagttattcggttggtccttatattattttaaaatttttaagtaggtttctaaactaaaaaaataataattaagtccttgatcatgtaagttttttaatcgagtccctaagatttttaaaattaccataaactatcattttctggcagtttcaatctgccagatttttaaaattacttttgcatatgtatgcatcctctttctttcacaaactaactccttttgtctattcctttttacttgcaacaagccaatcccttttctgatgggacgttccagtagcctgggggtcgcgtacgtctttctcacgccagccttcccctagactcggtccttttcttttaaagcattgacttccttggagttcgattattattactcattttcattcatccactcaactccctttcctaccatggcactagaattggttggtggttctcttctttctgctttccttcaggttgcgtttgagaagcttgcttctcgtcaagttctggacttctttcgtggaagaaagcttgatcaaaagctgctcaacaacttggaaatcaagctgaactccatacaggctctggctaatgatgcagaactaaagcagttcagagatgcatttgtcagaaacttgcttcttaaggtcaaagttgctgtgtttgacgtagaggattttttggatgaaaaacaacatgaaatcgccaaatgccagatcgaaagtgaagatgaggccgattctatatcctgcacttccaaggtccgagaattgttcatagcctcacatgcaattgcctgtctcacgaacaccaaatcaaggatggaagaattccgtgatagattagattttctcttcagccagaaggatcatctagacttgaaaatttctggtggtattggggttggatcagaataaagttttgcagtaacacatgtatgactttcatcatatgcatttgttgaaagagagatttatactagagaagaagactcaaaattgattttttcttaatagacatatgacaatggaaatcgtaatcggctatccataattgttattatcaggaggggtgggatgggtaagaccacacttgctcaacatgtattcaatgaccctaggatcgaggaggctagatttgatgtcaaagcttgggtctgtgtttcagatgattttgatgttttcaaggtaacaagaacaattcttgaggccatcactaaatcgactgatgatagtagaaaccgagagatggttcagggaagcttgaaagaaaaattgacagggaagagattttttcttgttttggatgatgtttggaacgaaaatcaaattaaatgggaagctgtgctaacgcatcttgattttggggctcaggggagtagaattattgctaccacacgtagtaaggaagttgcttctaccatgaggtcaaaagaacacctcctggagcaattacaagaagatcattgctggaagttgtttgctaaacatgcattccaagatgataatattcaaccaaatccagattgcaaggagattggtatgaagatagttgaaaaatgtaaaggacttcctctggccttgaaaacaatgggaagtctattacacaacaagtcatctgttacggaatggaaaagcatattgcagagcgagatatgggaattttcaacagagcgtagtgatattgtacctgctttagcactaagcacattaaacgcgtgtcgttacacgattgaaagagctgtcaatcaggagctatgttagtacgattatgagtttgataaggagtgcttaatacaattgtggatggctgaaaaatttctacaatgttctcaacagggtaagagtccaggagaagttggtgaacaatacttcaatgatctattatcaaggtgcttctttcaacaatcaagcaacacagagagaacagattttgtcatgcatgaccttctcaacgatttggcaagatttatttgtggggacatttgtttcagattggatgggaatcaaacaaaaggtacaccaaaagcaacccgtcattttttaattgacgttaaatgttttgatgggtttggaactctatgtgacacaaaaaagttacgtacttatatgccaacaagttacaaatattgggattgcgagatgtcaatacacgaattgttctccaagtttaattacttacgtgtcttatctctgtttgattgtcatgacctaagagaggtgcctgactctgtgggtaatctcaaatatctccgttcgttagacttatccaatactaaaatagaaaaactacctgaatcaatatgttcactctacaacttgcaaatactgaagctaaatggttgtagacatttgaaggagctgccctcaaatttgcataaactcactgatttgcatcggcttgaattaatagaaactggagtgagaaaggtaccagcacatttgggaaaactggagtatcttcaagtattaatgagttcgtttaatgttggcaaaagtagggagttcagtatccagcagttaggagaactcaatcttcatggaagtctatcaataaggcaactgcagaatgttgagaatccatcagatgcattagcggtggatttaaaaaataaaacacaccttgtcgaggtagagttagaatgggattcagactggaaccctgatgattcaacaaaagaaagggatgtaatcgagaatctacagccttccaaacacttggagaagttgaggatgaggaactatgggggtactcaatttccaaggtggttattaaacaattcatcatggagtgtggtgtccttaaccttgaagaactgtaaatattgcctatgtttgcctccccttggacttttgaaatctctgaaggagctttcaattaaagggcttgatgggatcgtgagtatcaatgctgattttttcgggagtagctcttgttcatttacgtccttggaatctttggagttccacaatatgaaggaatgggaagaatgggaatgtaaaggtgtgacaggtgcttttccacgtcttcaacgtctttctatagagtgttgtcccaagctgaaagggcacttgccagagcaactatgtcatttaaattatctaaagatttctgggtgcgaacaacttgtaccttctgctctcagtgcccctgatattcatcaattatccctaggagactgtggagagctgcaaattgatcatccgacaactttgaaagagcttaccattacaggtcacaacgtggaggcagccttactcgaacagattggacgcaattactcttgttcaaataacaatattcccatgcacagttgctatgatttccttgtaagcttggtcatcaatggtggctgcgactctctaacgacctttccgctagatatcttcccaatactcaggaagctttttatcaggaagtgtcctaatctaaagaggatttcacaggggcaggctcataatcatctccagagtcttggtatgagagagtgcccccaattagaatcattgcctgaaggaatgcatgtcctccttccatctcttgatcgtctgcacatagaggattgtccaaaagttgaaatgtttcccgaaggaggtttgccatcaaatttaaaagaaatgggtctctttggtggtagttacaaacttatctccttattgaaaagtgccttgggaggcaatcactctctagaacggttagttattggaaaagtggattttgagtgtcttcctgaggaaggtgtactgccacactctcttgtttctctacagatcaatagctgtggagatctaaaaagactggactacaaaggtatctgccacctctcctctctcaaggaattgcatcttgaagactgccccaggctccaatgcttaccagaggagggtctgcccaaatccatttcaactttgtggatttggggggacattgtccgttgctcaaacaacgttgccgggaacccgaaggcgaagactggccaaagattgctcacattaaaccgttgctcaatcaacgttgccgggaacccggaggcgaagactggccaaagattgctgacattgaaaacgtgtatataaggtagtgaggttgattataaagaataatggtgaaagatgtagatgcttctctattgcctgcaatttactcgagtgcaggtggttaatgagatgcagattagctacttgctatcctgggagatgcatgcttattctacattgttttaaacattagtttatgtacagctaaatttgtaacaggattatgggcattgcttttatcgggaattcactgacttattaattccagagcttacatcatgcaagtacatttctaaaatttcaaatttgttttcttctaaaactgtgaattcatgatacttctaacttctttggggctctcttcagctatctgaatccatgtaaatactctataattattttctaaacccaaattttattcatgggtgtagacgtctgaattatttgtcagataagatatttaacctgccccaggctccaatgcttaccggaggagggtctgcccaaatccatttcaactttgagcatttacaattgtccgttgctcaaacaacgttgccgggaacccaaaggcgaagactggccaaagattgctcacattaaacgcgtgtcgttacacgattgaaagagctgtcaatcaggagctatgttagtacagatttccaaattggtttgtactttgaagattaatcaatatcgggggagtaatagtttgtacgtcaaaagtatcatcagaatactatggcagaaattccagccactgaatgcctccaaattgtctagctttttataaggaaactaggaaattggcgaaggtcgtcaaactcaaattttcttgtgtccatggaaaggataaattgctcgatgaccaatgtcctactggtgcctttgaaagtccttgagtgcaggtggttaatgagatgcatggttattctaaattgttttaaacattagtttatgtacagctaaatttgtaacaggattatgggtattgcttttattgggaattcactgacttattaattccagaggttacatcatgc

SEQ ID NO: 24668 - DNA, 474 bp, Glycine max
  Clone ID: PAT_MRT3847_122279C.1
cccattctttcggtcctttcctttttcaatcaattttggtactctgcttgtgtttaagtgtaacttcataatattcttgccactagatcttggttacatattagacccacccacttgtgaattttgctaataaacacttcgggccaagattggtcaatgtgtctcttggaatcaaagtagtgcaaggaattctacttggcaaggttaacttttgtttctgtgaagggagaaagtttggaaattgcatgtttccaaatctgggtcttgcttaattcttgtgcctgggtttctatctgctaagaatctactgttctgccccagctgtggattttgggcctatgatttccactttcaaacctccaatggcatgaactgactgtgatggaggttaggggaaatgagcatggttaggacatttatgtggcctatagcttcatgatagtcaggttaggactcatagtagatgttttcatt

SEQ ID NO: 24669 - DNA, 720 bp, Glycine max
  unsure (1)..(720): unsure at all n locations
  Clone ID: PAT_MRT3847_12227C.1
gcatttatagatcgagattgaagtctgcacttctcgcaactgcaaattctctgtctctttctctcccgtgttggctccttcatcagaggaaacaagcaaacaaacaaacacacaaaagctgaatttcctgctgcgctccaccacacacgtctacctccgacagggaaaagccttcttcgacggcgaacggcgaacggcggcgacttccaacgaacgaacggtgaatgaacgacgacgactccccccacagacggcgcgtcgtcattggagagtcttatgtccgacgaccccttcgcccaagttgagcacttcgacggagagttcgagggcgaaaacggcgcttaaagttccaaaatgacgctcccgttttggccaagcacctggatgtttccgaagaacaaagatggatcaccattccttacaaggaacttcctgagaactggaatcatgtgtcggatatgcagtcccttgcgctttttaaatcgttcctttctttttcctggtgaacaagttcatatcctaacgtgcctgtctgcttgtaagcaggatacagagattattactccatttaaagttgctgctgtgatgagtaagaatggcatggngtcacagttctgacaaagaaaatggaaatgttgaaaacagaaatgaattcngtatctggagaagggcaaactgagtcctagcaaacaagagcagaaagagnataaattggaaaaa

SEQ ID NO: 24670 - DNA, 344 bp, Glycine max
  Clone ID: PAT_MRT3847_122280C.1
tatccattcgttcgtccacgcgttcgtacggctgtgatatgacaaattaaggggcacttacttaaattaataatggagcactgaacaaagaagctatttgctgctacttgcctaagattattttaaaccctacttgcttcgatgttgattaaaaacgaagggttttccacataatagcaaaacatacaacagccgttccaatcccaaaagaagagaggttgtgcggctcgacatcctctctatgagatttgtgccatatattgctcaatcctttccactggattagagggagcacgtgtatccaaggaggaggatactcgccccaaccccccaagagctggggg

SEQ ID NO: 24671 - DNA, 1267 bp, Glycine max
  Clone ID: PAT_MRT3847_122281C.1
ccccagaattgcctgcgtgctctctcaagtcccaacctgcttcttattgaagtacccaaagcatgtctacaaccgaaaaggggctttcaagtgctttgaatgccagaatcgaagggtgcggcactgaaactatagtgtttgctcatggctatggaacggaccagtcgatatgggacaaaatacatcctttggttcttgctttaaattaccgtcttgttacgtttgattgggcttttgctggaactgtgaaggatcagagcctctatgaccctcacaagtattcctctgtggaagcttttgctgatgacttgatcactctgctgaatgagatggacctcaaagctgtcacttttgttggccactccatgtcgggcatcattggttgcattgcctctgtcaaaagacctcaactcttcaagacccttattctcgttggtgcttccccaaggtttctaaattcagatgattatgagggaggctttaacagctcagatattgagcaattgctctcaaacataggaaccaactatgaaaactttgcttctggcttcgcctcattaatagcggatccaactaatgaagacactgtggacaaatatgagaagtgcttgaagagaatgcaaggtgaagttgctctgtccttggccaagaccatattctattctgattggagagagatacttgacaaggtggagactccatgcactatcattcagaccaaaaaggatgcagctgtgccacacaacgtagcgctctacatgaagaacaaaattaaagggaaagttactttagagatcatagatacacttggccatttcccccagttaactgcacaccttaagttcgttcaagtgctcaaggctgctctagcttcataaaacgaggaataaatatataaaacatgttattttaatattttcttaacgcatactttatagttgaatttcgtctcatagtacttgttttacaattgagcaagtatagacgtagtccaataataaaagtatgttaaagaaaatactcaaaaaagatattatctagtttactactagtcttccaaaaagaaataaacatttatatgctaccctttgtggcacataatctctctacttgtattttcataacgaaaaaaaatatgtatgaattaagatatgctatatatgccatcagcgtctgtgatttagatttcctattaggagaaacaatgtgtttgtgtcgaaataatgtgtgatatttgtatttgttaactgattagtgtgccggctgg

SEQ ID NO: 24672 - DNA, 563 bp, Glycine max
  unsure (1)..(563): unsure at all n locations
  Clone ID: PAT_MRT3847_122282C.1
attgcaatcnatatataagtnnnnagtaaatctatgaagatcaagatgaccaatcaaaagaggtgtgtataggttttttcattccatgtccattctacaacttgcaaactattttttttttgttgctctttaaaaaaaggtgctatgtgctggatactgtagaattgtgtttttcaacagctctagctctgtgtcttctcttgaaaacatcttgcctgaatctcttggtctcaatttttatgtccatgaagggtttcttctctatgttttccttttcactctccaacatcctttgcctctttgccacggccatagctgcttccctgtcctccaattcttggttctttgcctcttcctgaagatcatgaatgagactgtcaagtgatttgatcttcctatgaggccagcggggaataccaaattctctgcactttctctttagaacagtaagcccaacatttnnatttcttgatgcttctacaattggcataccaaagnnnttcaccaaatctgataaagnaatttttgctacaagatcactnngtgccctcttttnnnnnnnt

SEQ ID NO: 24673 - DNA, 463 bp, Glycine max
  Clone ID: PAT_MRT3847_122283C.1
acagaacaccaccacctccttgtcaccgtcgccgccatctctgccctcaatgcctctgaggcggggctagatcctgtggcgctctctgccctcgtgtctttcatggccatcgccctccctctcatctcgcccggcggcatcaccggcctgggagggggagggagtgggcatggcgtgtgtgaagtccatgatgaagtggcgtgcgtgagttccatggtcttacagattgacaatctgtatatgctatacataagggtgcttttggttttcactctcactgctaggtgtagaagaaaaatgacaggtgcaagaagaaaattccaaattattttggggtattttgtggttttagttatttgagttgcaatttttgttgataactgttgggccatcatgtttgatgagacaattatttaacgcaccttgttgttggctggatgcaccttataatttttttatattc

SEQ ID NO: 24674 - DNA, 244 bp, Glycine max
  Clone ID: PAT_MRT3847_122284C.1
cgttaatacgacagaacgggatagtgctagagtttctcctgagctataaactagtctggcgagaggagaatatgaagttgtctgttttctttggtgctcctaaaggttacctaaaatggccatggcctcttgcaagctttcaaaggatatctatccttatgaaaactgttaagtcgttatcctttttactaagtcaaatccgcaagtttaagctttcagtggaaacacacatcatacaaccctt

SEQ ID NO: 24675 - DNA, 1626 bp, Glycine max
  Clone ID: PAT_MRT3847_122285C.1
tcgagcgcggctcgaggggaaaatcattcacagaaagggcggtgtgttgtaccttttccgaggcagaaactacaattataaaacacgcccacattttcctctgatgttgtggaaacctgtgcctccagtatatcctaggttggttcagcgagttcctgaaggtctaacgctagaagaagcaactaaaatgcgtcaaaagggaagcacattgattcccatatgcaaactaggtaaaaatggtgtttactgtgacctagtaaaaactgtcagagaggcatttgaagagtgtgaactagtgcgtataaactgtcaaggactgaataaaagtgactatcgaaagattggagcaaaactaagggatcttgttccatgcacattgctttcgtttgaatatgagcacatacttatgtggagaggaccaaattggaagtcatttataccagatcgaggagatgaccgcaaggaatccaaacaaatagaggttgaccataaaaattataaaccactgccgtcagaggccctagaattctcagcaccgagtctacaaatgaacccattagagcatgaaagcaatttattacatgacactagcatttcctctatttcaagtgatgtgactttggataaggttgaggtgtcatatcccaatgaaaatagccaccaatctatgtctggggttactgaagttccttcacttacaaaaatctatgacgttgaaaccacaaatgattccacagactcctatgctgagccagaacctcgcacaagcctcattccaagtatgaccataccacactatgatagccatgctgaattctcctcgaaagctatgagtgaaagtcatggaactgagcatataatggatagcaaaagctgcagtgatggtctttctgcttcaatttcaggatctcatgcaacgctaggaggtagtgacaattctactaatggcatggtggattctcattctaataagttgctagatgctttgggagaagaagatgtcagtcaggcaccaaggtcagctgctccttctatgaaagcaatttggttactgttggaacaagctgttgagaaaggcagtgctcttgttttagataaggattctttggatgcggacaatatttatcaaaacacagttgcctttgccaaatcagctccacccggaccagcttttaggaaaaacacaaaggctgtgtctcaaaagaatcctaagcaagaaggttcaactttggagactaaagaaactaccattgattccatgaaacggaaaaaggagaatagtactaaaattcctagaaaagcaaattttgatgaccaattactaaatgttgtaccacaaggaacattaggagttgatgaacttgctaaacttttaacatgatactggatggtgttatcagaagttctagtgtcattttacttggtggtgaggatcgactggcagagagggggtcgttatagcagaggtcaacttggatccgagcgaaggggatgtccattatttttcatccattttgtaaagttttttctaatttattgttactgttaaagtggtagattctggtgtttgtaaaatttttctgatttgttgttaatgcaaattactttcttttgttttttctaaaa

SEQ ID NO: 24676 - DNA, 364 bp, Glycine max
  Clone ID: PAT_MRT3847_122286C.1
gactgtataggatctttctggtttattttgcaaggacatctgtcccacggggtggttccttcttcgtcggctggactccttcggcgccacaccgagagagcctagggtgctggctgcgcttggactccttcacagggtcactctgtctcacttttccttctcacactcacgcctaacacagctccttaatccctagccaggacagccgcactcactttatcacatggtctctacgactgggagattcctacattgggtgctcactgcctcctagcaaccactaaatcttggcacggcgatgaacttgagcgcaccgacgcacggacgggctactcacctgctttgtgctggaagcgcaagggca

SEQ ID NO: 24677 - DNA, 413 bp, Glycine max
  Clone ID: PAT_MRT3847_122287C.1
agaagatcgatcgtcactgcactttactgaaacatcatgggaaactagaccctgaacaaggttgagagctgtgagagttgagggccagagatcgaggtgtttatagacattgaccggtcggagacacgatgagctctacctgactccttcttaagaagagggcagccgtatgggaatggctacaaggacgacggtagaccaaggcaagatcatacacggtgtattaaaaaagcttcaccgagctgacagctgctatagctacacaagcttctttttctttattttctttgcatgcataaacattatatatatataacctgatcatcctgaaaggaataactttatattaacttgtcttttttttctaataactatgttataattgaaacataacttatttttatacgagattg

SEQ ID NO: 24678 - DNA, 268 bp, Glycine max
  Clone ID: PAT_MRT3847_122288C.1
atcaaccttcgtgtcttgcaggttcgtgatcattttcattaccagaaggtgggtggcaaattgcaatggctaagcatgatgttgatggtggttccttctctgcaaaggactatgatgatcctcctccagcaccattgattgatgctgatgaactcacacagtggtccttctacagggcttgtattgctgagttcatggccacaatgctcgtcctgtacgatcacagtgctcactttgattgggtactgtagccagattgatgtaaagt

SEQ ID NO: 24679 - DNA, 540 bp, Glycine max
  Clone ID: PAT_MRT3847_122289C.1
atgttatttcttttgtttagattcttttttttttttttttttttgagaaaaaaaaaacacatttttttgaaaaacacaaaatttgttatgatgtggctccacaagataatgagagggcaatatccattttaagcattattttttggaagttaaggaaataggcttggaaaaaatattggagcatatcatcatccaaactatgtgattgggacacttgatatgatacaaaagacctgctagtaactatatatagtaatccctattataaaatctattgcacaatcatgttgcagcatatttactaagaacagcaaccagcgctttgagatgtctcatatatgggtttttgcttttggcttttcactgcaacagaccccttttcccttaaacctggcacatctaatatctttaatgtgagatcattaaagcattgctgcacattttctctagttttagcactacactctaggaacaagcatctatgttgctgtgcaagagccataccctcttctttgcttacagctctttcactatccttgc

SEQ ID NO: 24680 - DNA, 392 bp, Glycine max
  Clone ID: PAT_MRT3847_12228C.1
gctgaaaaacccgagcaatgaaaatgaaacggctcaccctgccactaagaactgcacgagcaaaacaaaactcttgcaaaacattggcactgagccaaccactgaaccatgggacccacatgctagaagaccgcttcacacccatgtgcacaccccaagaccctaggtaaacacttaactgccaacaccaaagcgtcaaagcacccgcaaaactttactaaccccgccaccaccagatgaaggagtgcactccgttccattgccttagcagaaaaaccagacatagccccggcacaaccaactagccactggatgcatacacatttgctcaacaggagtgaagtctagacctaactcactcaactgatgagcagcatgctttgcacttgctc

SEQ ID NO: 24681 - DNA, 360 bp, Glycine max
  unsure (1)..(360): unsure at all n locations
  Clone ID: PAT_MRT3847_122290C.1
ctgatagttacatccaggtcgtcacagcccgcgagagcgtggtggtgtttttgacaaatcccctcgangtggacttgcagccacgtagtataatggagatgtatcgagcgctgtgtagctgcatctcgtcttctaatttagaggtgcgtcagcttgtgcagcggctgctgttgagtggtcgactccccgaattctgcctagagctcatggatgcgtgggagcgtcagtctcattagaattccacaagagctgccattactgacgaccaaagaaatgttgatactacagtttgttgggtgcggcaggatcgcgaactttggtgagactgccggaaagcttgttcgaaccttacacattgtg

SEQ ID NO: 24682 - DNA, 261 bp, Glycine max
  unsure (1)..(261): unsure at all n locations
  Clone ID: PAT_MRT3847_122291C.1
gaagatgccgatcagaaacatcgccgtcggaaggcctgaagaggcgactcaccccgacacgttgaaggcggctttggctgagttcatctcaaccttcatcttcgtgttcgccggctcagggtccggcatcggctacnacaagttancgaccaacggcgctgcaaccctgtcggcntcatctcngcntccatcgccaatgcnttcgccctcttcgtngcgtctccgtcggcgccaacatctcggcggccagtcaaccccgcg

SEQ ID NO: 24683 - DNA, 272 bp, Glycine max
  unsure (1)..(272): unsure at all n locations
  Clone ID: PAT_MRT3847_122292C.1
gacgnaatctcgaatccgctcgagcccaccacaacatttctacaccaacatttttcttcctttttttactccaccactgcccaataattgctttactatctaaaaactccggggggcaaaataaccctatcaaatacctaacctctccataataaatcatccaacaacatttctcactaacttattctcgctaaatcaatacccactctttaccaaaatatataacaaccttaaatttccatatatcctatattctatcctacacatataat

SEQ ID NO: 24684 - DNA, 307 bp, Glycine max
  Clone ID: PAT_MRT3847_122293C.1
caattcactcgtaacaaaacatacaagggggaccttatacacatactaaacgctatctatttactattatgcctaattataaatgtatattacttcctaacttaaacccgcgttacatgagcaacagttcatctacatacaactggatacacacaacattttttaatctacaacaaatagctagatccttaatccaaaatttcacaactactttctagacctattttagactcaaacctatcttaatacaggatccttttaaaattatcataatggggctcgtagggggccacatctggaaaaatca

SEQ ID NO: 24685 - DNA, 158 bp, Glycine max
  Clone ID: PAT_MRT3847_122294C.1
tctatgtactgcccacgcagcggcactggtgtatcttggatcctgtcaggctgacgtcctgtttatttgttcacccatcgagcgtaggcggtcatgcagttcataataggcaatgggctcatacacagctaaacaatgggcccgaatggccatgatta

SEQ ID NO: 24686 - DNA, 1139 bp, Glycine max
  Clone ID: PAT_MRT3847_122295C.1
acggctgcgagaagacgacagaagggggaataacgctaacctgaagaaaagagtgtaagagtaggaaacgagattgacgaaccctaagctgaaagaagaaaaaatgtctggcgtgaagagagcactgaggcagttcaccttcggaaccggcaagaccgccggtcgcaactcggcggggcgcataacgtccttccaccgcggcggcggagccaagcgcttgcaacgaaccgtcgatcacaaacggaataccgcttcttctctcggcgtcgtcgaaaggatcgagtacgaccctaaccgctcctccaaaatcgccctcgttcgctggatcgaaggcgtccatcaccgtcgccgccgcgctgcctccgccaacgccgcttcgcccaagctcctccatctcgatcccgccactaacgacgctaacagcattcgcggcgttttcgctctcaattcgatgctgccgcacactcacgctggaacatcctccagagagctttttctgtctgcgttggcgtccaaggccaagggatcagaatcggaatcggtttcttcgctcggaattccgaggttcgcggttgcggcggcgagggctccgttcttcgcgcagcgtgcgagaggggaggagacgttggaggttcggcattggagaaggaatagcgacgcgtgggcgcataggaacaaacgtaaagcagcgatttcgtggcaaagcattgctcgttgagttgactgatggtgttcagaattgtaaaactaaacttataatctctctcgcttttttttttaaaaggattaattgctagttgaggttgtgtttctctgaatgttgaggcatgaaccatggattggtgaatgctgtttagtgttaaggtcatttgcactggactttattggtgactctagtgaaattgagagaggagctgaatgattattgttgtttttctgaactggaaataatcagtgtctttggaatagatagttattaagactgattctttttatttcgttgaaatttaaagatcggaacagaatagatgactgtgtcatttccatcatcctgtttcgagtgattgatgaaaggacttaccagtttatttctcatttggattagtaggagcaatgtttgtgagttaatatttagccag

SEQ ID NO: 24687 - DNA, 537 bp, Glycine max
  Clone ID: PAT_MRT3847_122296C.1
gaatacatgcttggcttcatttgaaactaacatttggttgcttttgcatcactaaaattccatttctgagttgatacaactttgttcacttctctctactaacaattctatcgttttttctttcccttgatctgagcataaaagtatctttatatgtaacttggccttctctgttttatggatcctgggactgattcatgtacggctcttcacttctttgcatcaccaaacagtctaaaagatcacccctcgtatgcaagctagaacaaaactcagtttgcttgcattgtaaagaatttgcacccattactgcttgaagaaccagcaagggaaattattaacatcattagcccttcaatagcaggccatcctagttgactcatgactcatgagaccatgcagctccaccaacaaactatttatctagttcaatctttagtctttaatctttattgatttgattgcagcagtagataatgtctgcagctttaacatgttgatccctccaaccagacaagaagaaaattcatttgatgc

SEQ ID NO: 24688 - DNA, 191 bp, Glycine max
  Clone ID: PAT_MRT3847_122297C.1
tatcgctgcgagtagactacagaagggtgttacaaacaccctaattgcggtataatactctagtaatgacggtgcagtctcagtatgattacagctttagattatcacgagacgagcgcggtgtacgattagctgttcacattcgtgctcaactacctgacgaccatcgtgaatcaaacttcgcaacaagg

SEQ ID NO: 24689 - DNA, 542 bp, Glycine max
  Clone ID: PAT_MRT3847_122298C.1
gatcggcgctccagtaccaagttgaagactgaatattttgatgaattgcttgagagaaaaaccacccaacagggcatatattcatatacattccatgtttaattttaagagaagtaaacataaatgcaattccctaagtttataagataagcactaggctggtttctgaacattcatgtgtcctagactttcaatacagcaattcccaatatctaagatttgtttccaacagttactaaagaatataacacataatttcacaagtcttgtgatttagaatataggattaccttgactgtgtaagcaccatttgcagatgctggacttgtagcctcgaaattctgttttaatgagccattttctttattcaatctaacaatctgatcctgtgaagttgaaaggcttggatagttaaacttaacaaagggaagtaataaaatatctaaaattaataagttagacaaattgttaattgattctttatggaacctctgctctgcctgagatagatatcacctaatgaaatataatccaacaatata

SEQ ID NO: 24690 - DNA, 328 bp, Glycine max
  Clone ID: PAT_MRT3847_122299C.1
ggcttgttcagatgtggagtaccggagcttggtcggtaggctacgctgagccactgacgaccaaactctggagagagccttgtgtgtagtacgggatatggtggaaacgaagattgtcaacggatcggaaaactagtagatgcagaggtgtggatgttgtaccttcgactgtgagcagtacttgaaaaacgccatcggagggatgaacgggcgaaacgtttacggaggggcgatgagtgttaacgaagcgtagtaccgtggtgcgggtggcgcggaggacgggaaagtgtggatttagtttggaggagtgagtggagggtgtgtgaga

SEQ ID NO: 24691 - DNA, 274 bp, Glycine max
  Clone ID: PAT_MRT3847_12229C.1
ctcattaatgcaagactggcacttcgttgcttggtgatgtcccttcctgttctcttcactcttggtcttgcgagagaaagccatgccagacacgaagatttatggcatgctggttggccatacattcccattccaagctcattgcgatatcttctaaagactggctctgtcagtgtcgacatcgatgactaggggctggatattgtagatttacactactcgaaaatctacttctataccgaagattccttccaggcaaaacaatgagagtaca

SEQ ID NO: 24692 - DNA, 245 bp, Glycine max
  Clone ID: PAT_MRT3847_1222C.1
caaattagttcattctctttgcgcagttccctacctctcctttcaagatgcaggtcttcgtcaagacgctcgccggaaagcacatcacacttgaggtgaaaacgtctgcaaccatcgagaacgtcaagcgcaagatccgacgaacggaaggaattccaccggatcagcaacgtctcatctccgccggaatgcagctcgacgacagacgtacactcggcgacatacaagatcaagacggagtcaac

SEQ ID NO: 24693 - DNA, 589 bp, Glycine max
  Clone ID: PAT_MRT3847_122300C.1
tcggccatctcccgcaaccaagttcagtccctactttgcgttctctcaaagcgtctctatcgttgattttagctcagttaactagttttgcaatttgatatgattagccttttttgctaaaaaagattttattcttcgttagtactaagtatatgtacattacttgagtttcactccactttctttggcttgccatcttttaagaaatcagtgtggcattaaaggcaaagattgtaaattttagctcagttaatcagtttgtaaatttgatacctcagtaggtgtacatgtgtttccctccactttcttttgcatgcctatttttaagaaataagtgtgacattacctttcttagtttttgtttgtttagattttgtaaaggccaagattccaataatttaaaatggagtcatgtgattgcatgatgtttactaagtagttctgtagttgcaccttcattgtttatagagtgtctggtctatcgatcatgaatcgtcatggtcaaaatcaatcatctattagttggtttcactttatgatttacaggcactaaaggtcaatagctggcactgcatggtattttatgcat

SEQ ID NO: 24694 - DNA, 281 bp, Glycine max
  Clone ID: PAT_MRT3847_122301C.1
tttcgaaattcctaaaggttccatgtgggatcttaaaacttttcaatctaaaattgaacttaccaaaaacacagatggaggaaccatactgcgtagtgatctattggcaaattatttgacagagggcaaatttagagcaagtgttgatttgcagcgcactcatcgtattaaaggaatgattaacatggcggccacatggtggtgttcctgagaatacaggtttagcattagcctgtgctatgaatagttcctttacggggccggccaattctgagatttac

SEQ ID NO: 24695 - DNA, 728 bp, Glycine max
  Clone ID: PAT_MRT3847_122302C.1
gaatcgccaatttctgattgcaaaacagcgttttctcaaggccccaaacgtgcgcgattcgttcgaaacggatgaacttttagctgaattcaacgctcgtttgctggcttggaattctggattcgctgtagcgcggataaagagaacaagaaatggctacggttgatgttatcaaatcctgcatcggttccattagacagatatcagagcatattcaagacgctattgtttatttagatgctggatctacagaaagtttccaatttattggggcatatccagtacttcttgaacttggggcacgagctatttgcagtttggaaaacatgtgctcacttgatgtggtggttgattggaactcaaattctgatcctgggaggaaacttgtggttatcacatcaagtctactaagtgatgcacaccggtatattttacgttgcctgagcgcacatcaagttgttcgtcattgcattatatttacatctatctcagaggtgcttatttacagcacactcagcatttcctgattcacctctggggccagatgcatatcatgaatatgaatccttactggttcaagattatgaagaactagttaagaaatcatggacaaaacctggacaggcaaaacataacttttgagatggaggacgttcagagtttcctttcagcggataggatgttcttaatcttgaaagctagttctagtggaagagatttttacgagc

SEQ ID NO: 24696 - DNA, 2956 bp, Glycine max
  Clone ID: PAT_MRT3847_122303C.1
ttttagaattggattgtttatttcatttgaatcatgttattgttgggtttggttattagtgtatagggttagtaagggatttggttcttggtgatggattcaattggcactgtttgaattaggtttttggtgtttgtttgatcttacacaagtctttttaaggggatgtcatgactcctacataagttttcatttgcccccgggtccgagcgttgctccctcctttctccccgcgcgtgcgctctctccctcactctcaccatggaggcgcaaccaccaaccccctcgactgcgccgccgcctctgccgccacacctcagctaccccgactccgtggaatcctcgcctcgctcccgcaacaccgactcctgggacgagcccttcgcgccggcgtccaccaagctccgtctcatgtgcagctacggcgggcacatcgtcccccgcccccacgacaagtccctctgctacgtgggtggcgacacgcgcatcatcgtgtccgaacgcgccacctcactcgcagacctctccatgcgcctctcgaaaactttcctgaacggaagacccttcacgctcaagtaccagctccccaacgaggacctcgattccctcatctccgtcaccaccgacgaggacctcgagaacatgatcgacgagtacgaccgcaccgccgcctccgccacctccgccgtcaaaccctcccgaatccgcctcttcctctttcccaccaaacccgaatccactcactctatccctccccaaattcttgacacgtcagccaaatcggacgattggtttttgaatgccttaaacggcgccggattgcttaaccgcgggttttcggactctgcctctgttaattgccttctctggacctgacgaatatgggcgaggttgcagggaacaacgctcgtacccggtcacaaactccaccgaatccttctacattggttcaacagcctgctacgcttcgcagggtggatctttcgggaacgggaagaatttgaagcaggatgttcactccattcccgattcgcccatgctcgaaacgacgtcgtcgtttgggtccacctcttcgtggccttcgcttgcgaacttcccgccgattagggttcatgttgtggaggatcagaaggtgttggggattgaggatcagttcgcgcagatgggggttggtgtggggcagaagcagcagcagcaggatgagggttttgttttgctatcttcgccgcctcccccgccggttcccgcgaccctcgccgccgtgggtgtgccaattgggcccgccacggtggttgctggggagtatcataaccgcgttgtctccgatgatgagagatcagatcatggggtttctgttgggtatagaaaaccacccactcctccaccacaggttcagtcacagacacaagcacagtcacaggcacaaacgcaaacacttgctcctcaatttcaacagaagtcaactggtggtggcgccgttgttgatttgccttctcctgattcagtttcaagtgatagtagtcttgcgaatgcaatctcgcgttcgaaacctgctgtttatcaagaacaagttcagattcaatccgggactacaagggttcccagtaaccctgtggatccaaagcttaatgtgtctgatccgcacggtcggatccagatgcagcaacatgtacaggaccctggatatttgttgcaacaacaatttgaacagcaccagcagttgcagtcacaacaaccgcaacagcaatttgaacagcaacatcaccagcaccagcagacactaccgcaacagcagcaacagtttattcatggcacacactttattcaccataaccctgctattcctgcatattatcctgtatatccttcccagcaacatccccagcatccacaggtttactatgtgactgcgagacaggcgcaggcttacaacctgcctgtgcagcaggctaatatgggtgagtctgcagggaacatcgcctctagccgaccacaaactccaccaaatccttctacattggttcaacaacctgctacttacaaccccatcagaaatgctcccatgcctaaaactgaaatgaatgcttacagagctgcaactgcaggcacccctcaacttgttcaagttcctacgagccaacatcagcagcagtatgtcacatactcacagattcaccatccttctcagtccatggctcccaattctgctgcccctgccaattatgcttttgattatgcggatcctgctcatgctcaaatatactactctcaacctatggcacccacaatgccttcacagtaccagactatgatgatgcaggaaggttcagctcagcatccctcagacagcgtgaagcagcagcagataagaacctcacaaccattataagccagtccttaaaaaaaaaagaaacaattttgaaaaaaatgggtttgtttccctttaagtttttatatgcagttcttgtcgtcatgtttgataaaactgtttgtggtatgtatttggatagggaaaaaaaagaataataagaaactgtgatcatcttgtactttttcttgtatgtcataatttataatttatataggaaatgaaattggtccaaagattatactgtaaaaggtcaagtctgaaacattgtattgtgaaaattcaaatatcaattcctgaaatgattgtcatataaaaaaattagcgggtattctttctagctctggtcttgtgatccgtggttcatgataaaactattcaattctgttgataagtgcaatggatgttgccatttgaagttttggactacttgcagtttgtcctcggtcccttatatgaccaaagccatgcatgaaggaccactagtttgcacttgtgcgtgtagtcataaatcctacatcggtctggtcgcattttcaatccccttgttcgttttatatacaagaaaatcacgtttctgctgattaa

SEQ ID NO: 24697 - DNA, 681 bp, Glycine max
  Clone ID: PAT_MRT3847_122304C.1
ttgctcctcaatttcatcagaagtcaactgctggtggcgccgttgttgatttgccttctcctgattcagtttctaggtattctcgatttcaatttctctatctggttttgtctttgaattgttctgattgtaaattttaatgttaagattggattgtttatttcattagtatgttgaatcatgttatatgttattatcgggtttggttatgagtgtatagggttagtaagggatttggttcttggtgatggattcaattggcactgtttgaattaggtttttggtgtttgttttgatcctgcagtgatagtagtcttgcgaatgcaatctcgcgttcgaaacctgctgtttatcaagaacaagttcagattcaatccgggactacaagggttcccagtaaccctgtggatccaaagcttaatgtgtctgatccgcacggtcggatccagatgcagcaacatgtacaggaccctggatatttgttgcaacaacaatttgaacagcaccagcagttgcagtcacaacaaccgcaacagcaatttgaacagcaacatcaccagcaccagcagacactaccgcaacagcagcaacagtttattcatggcacacactttattcaccataaccctgctattcctgcatattatcctgtatatccttcccagcaacatccccagcatc

SEQ ID NO: 24698 - DNA, 659 bp, Glycine max
  Clone ID: PAT_MRT3847_122305C.1
aagcttaatgtgtctgatctgcatggtcggatccagatgcagcaacatgtacatgaccccggatatttgttgcaacagcaatttgaacagcaccagcagctgcaatcacaacagcaacagcaatttgaacagcaccagcagctgcaatcacaaccgcaacatcaatttgaacagcaccaacaccaacaccaacagacactgccgcaacagcagcaacagtttattcatggcgcacactttattcaccataaccctgctattcctgcatattatcctgtatatccttcccagcaacatccccagcatccccaggtttactatgtgaccgcgagacaggcgcaggcttacaacctgcctctgcagcaggctaatatgggcgagtctgcagggaacatcgcttctagccggccacaaactccaccaaatccttctacattggttcaacagcctgctacttacaaccctattagaaatgctcccatgcctaaaactgaaatgaatgcttacagagctgcaactgcaggcaaccctcaactagttcaagttcctacaagccaacatcagcagcaatatgtcacctactcacagattcaccatccttctcagtccatggctcccaattttgctgcccctgcgaattatgcttttgatatgcggat

SEQ ID NO: 24699 - DNA, 250 bp, Glycine max
  Clone ID: PAT_MRT3847_122306C.1
tggattcgtatgtttatcaggatagaattcaaatgttaaccctttcattgtcttcaatttttctgtatttgatttattaaaacattagttacatattgacgagaaaagatcacaacatttaaatttttgtatgattattaaactcttttcaatttggtctttcttttataataaccacaattttcttattttattaatttctaagttgcatttgttgcaaagtatattattaaatacttataattaaata

SEQ ID NO: 24700 - DNA, 712 bp, Glycine max
  Clone ID: PAT_MRT3847_122307C.1
ttttagaattggattgtttatttcatttgtatcatgttattgttgggtttggttattagtgtatagggttagtaagggatttggttcttggtgatggattcaattggcactgtttgaatgatgtttttggtgtaatcattcgtcaactggcgttgttgatttgacttcctgccagagtgatagtagtcttgcgaatgcaatctcgcgttcaaaagctgctgtatatcaagaacaagttcagattcaacctggcactacaagggttcctagtaaccctgtggatccgaagcttaatgtgtttgatctgcatggtcggatccagatgcagcaacatgtacatgaccccggatatttgttgcaacagcaatttgaacagcaccagcagctgcaatcccaacagcagcagcagataagaacctcccaaccattataaaccattccttaaaaaaaaacaattttgaaaaaaatgggtttggtttccctttaagtttttatatgcagttcctatcgtcatgtttgataaactgtttgtggtatgtgtatttggatagaaaaaaaaaaaaaaagaacctgagtactaagtctttttcttctatgtcataatttataatttatataggaaatgaaattggtccaaggttatactgtaaaaggtcaagtctgaaacattgtattgtgaagttcaaatatcaattcctgaaattattgtcat

SEQ ID NO: 24701 - DNA, 1184 bp, Glycine max
  Clone ID: PAT_MRT3847_122308C.1
cccacgcgtccgctcgcgttgactacgcccctgtaaaaccctagataaaccctaatagtcacaccgtcccttcaaatatggccaaaaagaaagtctctcaatctcacgaccccaaagaatcccaaaacgtaaagcaacccttgccaatggctactccaaccgatggctcctcagaactgcagattcagaacctcaaaaacctcaacgccgtccttctcaaggagaccacccaacgccgccagcagattcactctctccagtccgcgctccagcaatccgccgtcacctacgacaccaacctcgcctttgacgtccaaaacgctgtcgtttctgtcttcttcaaaaaccagctcgaggaaatgaaccttcgcttcgacacgctcgtcggagagaaggactacgaggttgcggttctcaagcgccagctcaatgacctcgccgcccgtctcgagaacgaaaccagttctctcgttaaagagcgtgacggactcgttcgcgagacgaagcggctggaggagtgcttttacagagagaggaagcttcgggatgaagcggagacggctaggtctgaaggcgaaaaggttttgtctcggaaacagagagacattgcggaacttgaaacggagagagatttcgcggtgaagagttctcaggagtcgcttagttttattgaaacgctgagggaggagattgaagcggtgactagggacaagagtgagattcaaagccgaaacaatgccctagagaacaaaatcggttatctggaaaatgagttgaagcgactcacccagtctacgaagaaggacgaggagattactcgtacaaagattctcgaactggaaggtaaccttggccttgcgttgcagaaggaagaggagatgaaagtggagataagtgctcttctcaaggagaagaaggaggtggaaaagagcgttgaaacgttaacagaggaaaaagatggtgttcgtaaggctttgaatgttcttcagaaggagttagaggataagcagcacgagcttgatgaagctgttagagtgaggagtgagatcgaggaggtcaagggcaatctcgagaatgaaattgttgagttgctagggaaagtggatgagttgaaagagtcttgggaaaattctgaaaaagaaaacaaagagttgggtttgcaggttaagcattataaaaatgct

SEQ ID NO: 24702 - DNA, 682 bp, Glycine max
  Clone ID: PAT_MRT3847_122309C.1
ttttaaattattttttttttactaatttcttggctagacattcacctatagctggaggaggatcattgatactctcagcttgcttgcaaaaactgaaacaaaatttgcaatagcatgacatcaatggaggaatcatggactagttggctatgtgacatggaaccagatgattacagtttcatgggtcaatcggacataaaagtggatgatgtgaatggaactttagcatctcctcatgatgtagccactgcattattagagaagaatcagcaaagctcattttccacagtagagagtctctcttcagcggctgagagtggcttggagaggcctttcaagttaccaaagatagaacaactctcacaaaagacagcttccagttccactccctcctcctatattctctcctttgacaacacaaatccaccaccggttacggttgaatcagcctcaaagccaggaaccaaggttttgaatcttgagaaagttttgccttcaaagaatgaaccaagacgagtagttactcagcagaacaagaaaatggggtcatttgccggatcttctcatcacacacaagatcacatcattgctgagagaatgaggagagaaaaaaattagccagaagttgattgccctctctgcccttattccagacctcaaaaagatggacaaggtgtccgtg

SEQ ID NO: 24703 - DNA, 551 bp, Glycine max
  Clone ID: PAT_MRT3847_12230C.1
actaattccaacgggacaagataacagttgtaggtgctacccagcatttccttcacagcttgatgaaaaatgagggaacgctatggtatgacactgggcctgtttgtttatcaggccattccaaatccagttgaagtcttaaagactgcgttacgggtatagcttgactgaaggaaaatctgcaactgctagtagtagtttcataaatctattcaaggagcaaattaagtccctcacaacttcaacctctttttagatggtctgctgacatatgaagcttttttagtaagctgatgggtggtgatgagagtcgagaatcgttgctttcagaagcaagagatcattctcatctcaatgagataagtgacctccagaggagaaggccacggcgtggtaaatcttcagataaagagaacaacctcaaagaaaaaaatgtggtccaaaaccctttacactctcaatatatagatccaaaacaagaagcagaattccatttcaagacagtgtttgttgtggctagctgcatacctaggaggaggaacactatgctt

SEQ ID NO: 24704 - DNA, 386 bp, Glycine max
  Clone ID: PAT_MRT3847_122310C.1
cacccaccctttcagggaagacacttgcagccgtgtcattgaatcttctcataatcacacacagaaacaactcaaactgctaccctggagggagctgatattaaatgaagctactggtatgataaagattttgcttagaaaaatcttttcatatttgacactgatgcctatggatttagcactactagattacacagcgccatgactgtgaataggatctggtcaaggaatccacgactccttcaagaactgtaactgcatatactgccggccaaaagctgatcgaagatatgagaaccaggtcttgcccattctgcgggcattacattccactcagggatcagggtggactctatgacttgacgagagataccttcaggaatgat

SEQ ID NO: 24705 - DNA, 882 bp, Glycine max
  Clone ID: PAT_MRT3847_122311C.1
cggctcgagctcgagccgcgacgtcaccggcgtcgacggcgggcctcttcagccccgcgcagccgccggcaacaacaaccgcgccgccggctctggcttcggtttcggcgccaggcgcaatggcggaggcggcgccgcgtgctaccagtgtggcgagtttggacacctcgccagggattgcaacaggagcagtaattctggtggcggcggaggcggcagcggcggtggttgtttcaattgcggggggttcggccacctcgcgagagattgcgtgcgcggaggcggcggcagtgtaggcattggaggtggtggcggaggcggatcttgctttaggtgtggcggatttggacacatggcgagggattgcgccaccgggaagggcaacattggcggtggaggaagcggtggaggttgttttcggtgtggggaggttggtcatttggctagggattgcggcatggaaggagggagatatggcggtggtggtaacagtggtggcggcggcggtggaaaaagcacgtgctttaactgtgggaagccagggcattttgcaagggaatgtgttgaagcttcaggttgaggtgaagaagggtttatgacgttttgcgaagggagaaaaaaggtggaatagtacatattctctttttttgcaccttttaacagttattaacttattattattattatttcggggaagtttatacatatggcaaaaaaaagaagattgtctggttttgggttttttgactatggtactgcttcagcaggcgattttgccttctcttgtctttcttgttacagaactgttgagatttatatcttaatttatttgtctgaaaggtttattatcaatatgatcataaatttagactagtgttctcg

SEQ ID NO: 24706 - DNA, 750 bp, Glycine max
  unsure (1)..(750): unsure at all n locations
  Clone ID: PAT_MRT3847_122312C.1
atgattcaaggcgtttttggtcaactttaaatcgtatgcctccaacaagagtctgcaccctgatggcatcatgatatttcagcaaaacctttgctacagcagcaacttgattagcaagttctctggtagggcaggggggtagaacatatattgggggcacccgttgagacgtattgctactcatagctttcagaacaaaaaagctacattttttccagtgccagttttagctttgactacagcatccatccctcttagaatggataatgtgagaagcctaactcacccccaaaagctagctcaaggggtgagggttgcccctcaaatggttgatgtttgtcaccacaaagcgagggctaacagaagcgtggtcccaggatcagaactgactctaataccatcttagagtgtgtaatgtgagaggtctaactcaaccccaaaagctagctcaaggggtgagggttgcccctcacttatatattctaatgtgagattacttttagccgatatgggacttcgattattttcaacaataccctcaaggcaaataggtaggctagcctctcgtatgcgggtcatatgaacatagccagctgaagaaagtgccttgaccgtcagcggcgatatgccacactcgtcaaggctcttgtgttgcttagaatgctntcattgctttgttgntgctcactctgttggtcctcaatttggctcaacttcctcttattaagctcataactaataaactcaaac

SEQ ID NO: 24707 - DNA, 154 bp, Glycine max
  Clone ID: PAT_MRT3847_122313C.1
gtgcctaatgaggaaactaactcagacaaatggcttaatgaatactgcaaccttcggagagaggaaacttgcgtatcgagctccatgaatgaatcgcctaacaccagggaagcggccaacagcgtattgcgctccaccgtctggtctttataga

SEQ ID NO: 24708 - DNA, 320 bp, Glycine max
  unsure (1)..(320): unsure at all n locations
  Clone ID: PAT_MRT3847_122314C.1
ttaacctcatcaagtgaggcactaccactactacagtctttgttcttgtagccttgtttgtacctctctctctctttctgccacacatcacacccaacagtcagagcattgcagcaactctgcaccactgctcctgcttcagctctcagactagcaaaagggcccaaagcacaaataaagtaaaacaagaggggatacaaagctcccatttttatgactccaacttaaatctcactctatgcttgatttgatgctaccccaaaatacacaccctctcttccccagccataacatanagtaaaaaaagaaaagaccccccc

SEQ ID NO: 24709 - DNA, 503 bp, Glycine max
  Clone ID: PAT_MRT3847_122315C.1
acgcattgctttcttctttctgagtcttcagaaaccctaaccgtggtttcagaatcttcattagggtttttgtgagagaaaaccatgtcgagcgcgttaaactggagacaccatgtcgtgattcaatctctgttgtcgcggggcccactcagcgagaaggacttgcacgccatgtttcaagacctcacaaagcgaaacccaggcactgagcggcaactgtttgatagttttattctgaaaataaacaaggcgcttagttgtgctaattttgagttgcgtgcttgcatagatcaatatgatggccaagtttactatggagtggtgaatactgtttctgacgaacattccaagttagggacgaagtataccgttccgcatattgccttttataaggccattatctgagcaatagtacaagatgcctttgcaaacgctgctatcttcagcattcatgctttcaatcttagtttggatagtcaggttacaattgtgacagaatcaca

SEQ ID NO: 24710 - DNA, 209 bp, Glycine max
  Clone ID: PAT_MRT3847_122316C.1
caaagggacgttctacgcaatagacaaaccctaactagttgaatctaccttcccccatccaatctcccgtgccagtacaaacctccttcgcccgggagagaccctcagatcgacgcctcctcgttttgctcgatgacttcgccatcaaatcctctcactctcacttcttcaacacactcagttctcgcgaattcaatctcgacctccac

SEQ ID NO: 24711 - DNA, 516 bp, Glycine max
  unsure (1)..(516): unsure at all n locations
  Clone ID: PAT_MRT3847_122317C.1
aaatgggtcacaataagctttttcattaaaaataacggacgaaagctatcaaacaaatagattttttgtactttgagatatttatcagggttatacacatttagagagaaatataactatttatccaaaagaaaattacaattataagcttcagaatacaaccaccatcacctgcgcggataatcttgcgaagttgggagcggcaactttcatgaatgctatcgtcaggaaaaatgtcctagtgacatgccctctcttgctgttttcggatgccatggagagatctgaatcgccttgaaaaaaacccaccaatcctaaacccatgtaccaaatccaggacaagacttttaaatgcagcggtggtgatgcttgttcccaatgacaaaattggagtttgaaaggaggagtggtgatggggtggctaaaagggaagagtanttcgggttgaaggtgaagggagagtgaaaggtcangaaatataactacagtccacgtttaaaaaaaaacaattatata

SEQ ID NO: 24712 - DNA, 519 bp, Glycine max
  unsure (1)..(519): unsure at all n locations
  Clone ID: PAT_MRT3847_122318C.1
acaatattttgaagattcgaagagtctatgatgcttttctagcagaatttcccttgtgctatggttattggaagaaatatgctgaccatgaggcacgccttggctctattgataaagttgtcgaagtctacgagcgtgcggttcaaggggttacatattcagtggacatgtggttgcattattgcatatttgctataaccacatatggggatccagacactgttcgtaggtaatggaagtttagttgtttgtcttccttttattattattattttttttgcattggtaggttttgatttgatattccattcactaggatcagctgtttcttgcctgctttctaacataatttcagaatgcgtgcaacagtgatatctcccttgtatggcggaaaagctntgatgggattgcatgccagaatgttttctattctgatgtttaaatcctatgttntaagtccactatttgtggtagtttgaaaattttaggatcattttctccatatacttttttcattta

SEQ ID NO: 24713 - DNA, 1002 bp, Glycine max
  Clone ID: PAT_MRT3847_122319C.1
tcgggttttttgtttctttgagactaatctcagaaaccttaacagtgttttttccagcgaccgtggcattaacgcttacacactctggcggtcaacgattcgcgcgtggagacaattggtacggacagtaacaagtaacaaagtagttcctatgtagctgattatggcggagatttcaagttcagggtacaaggaatatgcggctggcttgttcgctggtgttgccgctgtagccactggccacccctttgacaccgtcaaggtgatgctgcaaaagcacaatgcagaagcacataagattcagtataaaaatggatggcattgcactgctaggatattgaagactgaaggaatcaaagggctttatagaggagcaacatcatcttttgttgggatggcagttgaaggatcactcttttttggcatttattcccagacaaaagtttaccttcaggggggagttcaaagtggggaaccaaggcctcaagtgataataccatctgcagcttatagtggtgccatcatcagttttgtgttaggtccaacagagctgatgaagtgtaggatgcagatacaagggcactgactctttcgaacctaaataccaatttaaatttcagcttctccagtgttgcccttaaaactgtaaaacttgaagggttgaaaggaaatttcgtagatacagtcgtccccttgtttgtgcccttaagaaatgctaagctgtaggggtgaggaaattctgcaacattctgcaaaatttgattctagccatcctctaatttaatttgtttttattacttagagtccacaaaatttggtgcctctcactgcatgtggtgtgctggctagctagctaaggcttagtatttggcccggtctgtcctctgttttatttgtatattttatagtattcgactaatagtgctccttagtccttacaactagattagttgtccatgcctatggcataattggaaagtaaatatcactgtttgatattta

SEQ ID NO: 24714 - DNA, 1928 bp, Glycine max
  Clone ID: PAT_MRT3847_12231C.1
agttcgggtggagagagaagttcaattttcctaactgaaattgtgacaaaattatagacatttcgttagtatttttctacttgtttattggagaaaatgaaccgttaaataagacccactaattacattatcaaaataacaaaaaatgagaaagatcctttaccaatttgaaggataatactaaacaagtagtattattatcgattttattgtaccttccaaacaaaccctgcagcgatttgtttccttccatctccgccgtaccatgtcggaagcaccaccgcctccaactgccgatgcgtcaccgcctccgtactggtgctaccactgcgagaagcgcgtctccgtcgaaacgctcgcgaatctccccgacgtcgtctgcggcgagtgcaagaacggctttgtggaatccatgcccacgccgtcgcgctctcgctccccctccgcctcctccgacgacccctacttcggctcgcagttcctccaggtccttcgcctaatcgctcagtcggcgcgtgacgacgacgcgtcgcctccgccgccgccgagccgctctccggagaacgatttcctcaggatcgagctcggcggctgggacaacgacgaggagaacgaaaacgacgacgataacggcgacgaggagttcgaggaacacgaggaggcggaggatcgctccggcaacgaagatccgcacggaggagacgacgaggatctgagaagaaggaggcgcgagctacttcggcttcggattagggatttggcgactcgtacgaggagcatgcggaaccggatcttggattgggccgagattctgatgggcctcgaggacaattccatcgagttccgcctccagctgccagaatccgaccgctacgtcggaaatcccgaggattacgtcgacgcggcagagtacgaggcgctgctgcagacgctggcggagagcgacgggggaggcaggaggggagcgccgccggcgtcgaaggccgcgctggaagccttgccgacggtgaaaattgcgtcggaaagcgaagccgtggcgtgcgctatatgtaaagatttgctcggtgttggagacgcggcgaagaggttgccgtgcgggcatcggtatcatggagattgcattgttccttggttgagttctcgaaattcttgccctgtttgcaggtttgagctaccaacggatgataaggaatacgaggaagagagagtggttatcgctgcttcttcgaattcgaacggagcttcgagttccggtggaggtggaagtgccattgtttgattccgcttggtatgttccgtcatgctctgctctgctctgttctgttctgccatttgtgtaatatatttcgtggtttctgaatttctctttcttttttttttggtattagtggatttaaatcaaagcttgcgccatgttattatttattttatttgaagcttttattatgtagttggcttcttagctctcggatgatgctaagatacttgtatatagcatttgaatcaatgtgaatgtgatcatatcacactatctcaatggaatttacactttctccctgtgattaatttatttgaagcttttattatgtagttggcttcttagctttcagatgatgctaagaaacttgtatatagcatttgaatcaatgtgaatgtgatcatatcacattacttgaatggaatttgatggattaagctaattatgtcattgttgctactttggcatcatgcctaattggtttacttgatgcatgctcttcttttttcaggctgtgtcctttgtgtaataaattggaaagattgttgtttcttttatggtgtgtttggtagagaggagagaaataatattggagagaaaatttgtatttttttatattcatcctcagatatattacaagtgattctaatagtactcttttatttaaaaa

SEQ ID NO: 24715 - DNA, 490 bp, Glycine max
  Clone ID: PAT_MRT3847_122320C.1
aataaatttatataaaagattaattacatgtcatcgtgtcaattacaaagatggttttctcattcatgcattttctttataataaataaaaattaaaatcttttcaggtacaattaatatgagattttactacggtcctactcctacgtccctgactaattttaagagtaggaaagttgagacttcaattaagtatatttgaaaaattgtgaggtataattacattacttttttaaaaaaattgtttttttaaaccaaaaattttgtttttaaattagtccttcaaatattaaagtctatcaaattaataattccaaaaatacttccactaaacacaaaattatcactaaaattgtccaagtaaaggactaaaataatgataaaaaaaaaactaaacttcgtgataattttgtatatttaaatgttactactttgttgattaaaagatttaaaataataatgtaaaacagtaaaagtgtcctatccttga

SEQ ID NO: 24716 - DNA, 337 bp, Glycine max
  Clone ID: PAT_MRT3847_122321C.1
cctcgtacaggtccactccccatatctctctatctgcggtgtccccgcccactccggaactcggtaccctattccgttctctcttatccatcatgaatgggggagagtactggaccgagtctatagatccgctctcaacttgcgtgtaataagaagggcaccgtcatcctgactaggatacccgccagcatggtgatggcatctatagaatctctcatgcctaagaggccttctagggctttattcgcattcatcggggcatacatgaaagtgcttaacatggaacatcccgtcgccacaccatcgtatgctggggacacagctgatgtagcaaaat

SEQ ID NO: 24717 - DNA, 318 bp, Glycine max
  Clone ID: PAT_MRT3847_122322C.1
gcgccttcttcctctgcgtgtgtgggtcaatctccttcttcctgtgtgttatgtgggtcgagctcctctgttcgatttgtgttggtgagcaagtgaaggctgaagcttgctcctatgatttagtcatttttatttggtttgctcctctgctcgatttgcatcacctattccatttggtttgctcctctcagtcttgaacacgagctccaaattgaagtttttcagcaaaaacaagtcattatggcaagagctccagaggggtccaaaatcagcataaaatgctagaaggagaaattgtgaaaattaaagataaaagct

SEQ ID NO: 24718 - DNA, 240 bp, Glycine max
  Clone ID: PAT_MRT3847_122323C.1
gggaaccaaaagattgattggtaataatacatcacccatttggtccctccagacacccccaaaaaaaaagcctaaccttacaccacaaaatggtttagagaaatccactaacaaggaccaacttaaaaaaagggcccaatcgaaggcgaaaaattcattaccccgtcacccaatcaatctattgtctttttaagtaaaaccaccacaccgcctaagtgggggcatcttaaattcaggagg

SEQ ID NO: 24719 - DNA, 470 bp, Glycine max
  Clone ID: PAT_MRT3847_122324C.1
gcgagaagacgacagatgggacccaaacagaaagtggacgactatttattttaggcttaggcatgggataaatccgcctatggtttcatatccgatcccaagctcaggtaaagaagaagagtggtgttaaggcgtctgcaactaacatagaacttaccagttgtaattgttcggaaccgctcctgacctgcagtatcccaaatttggagcttgatccgttttccatcctgctcaatggttcttatcttaaaatcaatgctgcgccgggagggtagaccttgtgatgttaaggaaacttctggcagacaagattctacaattaaatgttaaattgtgaaaactcaccctatggttgtgatgaaactagttgtgaaagaaccatcagagaatcgtagaagaaggcaactctttccaacacctgcaaccaagaataaccaaaaaaggtttgtgaaaattaagggaattgcata

SEQ ID NO: 24720 - DNA, 511 bp, Glycine max
  unsure (1)..(511): unsure at all n locations
  Clone ID: PAT_MRT3847_122325C.1
tttcgatttacgccgtcgaaattctccacccanancngaagcgnaccggaaaggatagagaaaacaaacgcgncactggacggaccgccacaccaaagcaggaaggacagcgaacaaaagaaaggaaaacaaccacacaggaacgcgcacccaggaccataagcgcgcaaaaaccacaaaaacctcncgagcaaaacaggaggacggggaaacagacacacccccagggcactgcccgaagaggaaaaagaaagccaccctctatagggggaggagctggtgcaaagaatgctattctcatgaatatgccaaatgctgttctttcaatgaggagatatttagttggagaactcgtctatgaagcttctaagatgacttctccctacattaaaggtacaaactctttcttcatagcatttggaaatttggctgacgacaccatcaatattgaggctttctcccacaagttggtgcagattggagagattaaggaaaaagttttctttgaatt

SEQ ID NO: 24721 - DNA, 372 bp, Glycine max
  Clone ID: PAT_MRT3847_122326C.1
attccttttctaagtagattactatgttacagagagaaaattctatttccctgtctttcttcggaagatgaaaacagggttctaagtccaacaccgagagagatactgatgctcccggttacattagatcatggctctgacatgatactcatccaagacgtggctgtactcgttcatagccacacgcactcctacccagctcgacctgataggaggagaagcatttagctggatctgccatgggctacacagcagacctgactctagtggaacgcacatcttacagaagacggaagctgggatggatccattcaagggtgcacaggtgttctccagttgcccaccctcattgactttaaggccacataccca

SEQ ID NO: 24722 - DNA, 358 bp, Glycine max
  unsure (1)..(358): unsure at all n locations
  Clone ID: PAT_MRT3847_122327C.1
tttttnaaatggagtgganagattttgggtatantnnangganaagnttnatatgnaagggagnaatangaagnnangaattgagattngtattgttggatangattatanattnggtgtgtggnaatttnaagggtttttttangtgnntagtggtttttgtggggtgtgnattaagnaagtgtttggtggagtaatttttgnnaaaaattngnagaatagggtntatggtggttntnttantnatttnnaattaantattttggaaanaaaaatttataataggtggatnnggtttaangtgattnatgatgtgggtggnaaaaatgtgaagatttttttttttggggaggataat

SEQ ID NO: 24723 - DNA, 212 bp, Glycine max
  unsure (1)..(212): unsure at all n locations
  Clone ID: PAT_MRT3847_122328C.1
cgcangcacgcgtacgtaagctcggaattcggctcgaggcgagagagagagagagaatggcagcacttggtggcaatcgtgatgtngcangaagncaccancnaccntngaagcttcncnggtttangcncnntttgaggtngagcncccncaacacanaacccgggntaatgcccttttggnnttngaaanggtngnanantgcaaancnc

SEQ ID NO: 24724 - DNA, 457 bp, Glycine max
  Clone ID: PAT_MRT3847_122329C.1
cagaggtcgaacttgggcacgaacatacgggcaattggacttaatctttcacttttgaaattgtgtgctagctgcttgatcgtttgtatattttgttgtaacttgttgaagatgcggctgttggaattcaatatctatgagagtgatctgccgatatgctgttatgacctacactacagttgaatgttctctggatgtataccttggttttttctccaaactctgatcaaacctactgatttaagaatgagaataaaaaaaaaaaaaaaaaaaaaaaaaaaaaaaaaaaaaaaaaaaaaaaaaaaaaaaaaaaaaaaaaaaagaaaaaaaaaaagggaggaaaaaagaaaaggaaaaaagggaaggaaagggttggggaaatagaatagaagatttttaaattgggaatgttaatagatttattaatggggatattaaaagaaataacgttggaaaa

SEQ ID NO: 24725 - DNA, 444 bp, Glycine max
  Clone ID: PAT_MRT3847_12232C.1
cttttttttttgtttactttatattttatattagggtttctttcatgggggagtgggtatattcgttctttttggtttaccacaaaaaacactttttaatgggaaaaatttaaagatctggctcccaaagtcaccgacccaaaaaattttgatggcctggggctgatattctatttctttcgggtccatagggctcctaacatgtttttcttcttcctgtgaggcaccgacaccatggcaggacatcaatagcggaattctaaggctccctgtgagcggggggatctggcccaaagccatcttcattttgggaatatagagccagaggggcctgagaaaaaattttccccttaaagatggggttgtcggggggcgcccctcgaaaccctgttagggattttcccttgccctccccctcttttgaaaaatggcggtccacatccc

SEQ ID NO: 24726 - DNA, 313 bp, Glycine max
  Clone ID: PAT_MRT3847_122330C.1
gaattcccgttcgaccccgcgtaccttacgaaacgcaatgtccactctacttcactccgctcccacttcttctccttccttctcgggtatcatcactactaagggcgggacctctccaatcactcacatctctctcctaaacggcatccgtaacactgctatcgaaacaattaacttgcacaatggaataccaatcactagctatttcatattcatcgtatacacaaacgcaattcctagttacctttatactccaaacacgcatattcacagatttgtataacctaaactacacctctccttctaatattta

SEQ ID NO: 24727 - DNA, 585 bp, Glycine max
  Clone ID: PAT_MRT3847_122331C.1
aaaaaggggccctttttaaaggggggggccaaaaccaaaccccggtaaaaaaaaggggaaattttttaaaaaaaaaaaggccttaaaattaaaataaaaaaaagggggggaaccccccctaaaaaaaaaaaaaaaaagcccccccccccgggggggaaaaaaaaaaaaagggggttaaaaaaaaaaaaatttgtttgggttttggaagaaaaaaaataaaatttccccccccaaacccggggggaaaaacaggtcaaaaacggggggggaaaaatggacccccttccaaaaggaaaaatggggtccaggctaaaggttttcggggccttggggcaaaaaatgggaaaaggggccaaacccaaaaacttccccccctctttttttccaaacccccccttggaaaaaaaaggggggaatttcaaaaccgggggttggccaaaaaaaccccccccaaaaatgggggcccccttgggggcccttaggggagccctcaaaaaaaggggcccccccatagccctttgaaaaagtggaaaacccctttccagccttagtttaaaaaactttgggcccccaattgggggcccc

SEQ ID NO: 24728 - DNA, 505 bp, Glycine max
  Clone ID: PAT_MRT3847_122332C.1
acccccccccccccccccccccccccccccccccccccccccccccccccccccccctctttgggaaaaaataaaaaaattttttttattggggaatctaaagttaaagttttatttactttacctttcgaccaccctaatagagattttaagagaaagaattaagaaaataataaatattttgatttaataagaagatagataaggagacctaaagaatttcatttagggggtttttttatgaaaaggttcataggtttttaaaaaaaaaggttttttatccaatacctagtataacaaatttagttggttaattaggaatttataattcaatcccagggaaacatgttttcccaattttgctgcaaggaaaggaactaatcttggcgggaaaaaaattgtttgacaaagtttccctttaccagaaaattttaaaatttaataatgggggccgtgaaaaaattaaaaaaggggttattatataattggttaatgaattatggtt

SEQ ID NO: 24729 - DNA, 132 bp, Glycine max
  Clone ID: PAT_MRT3847_122333C.1
cttggatagtaattaacctcactcaaactcgggaagacagagaccaacaacagttcttgcactgaggtttcacgatattgctggaacttgcactaggtttgtttgtgttagctttgtttctgcacttgcgtc

SEQ ID NO: 24730 - DNA, 926 bp, Glycine max
  Clone ID: PAT_MRT3847_122334C.1
cccgccccacgcgcccgcccacgcgtccgtccctttcattcccgtgccgccaccgctcctcggtctagcccgcgcctcaaggcgctggtgccgccgccacctttgcgatggtcttcccttatcgctcccgccctcactggtgctagcgctcctctgcctcggcccacccctaacggccgtgccctcccgcctccccgcctcggtcggtccggcgcctcgcgccggcggcgctgtcccccatcgctccgcggctccgcctttgccgggggtgggggttctcggcggtggcccacagtggcgaggaggacgagcttccagcgttcactcgagttgggtggcacggatcggtgtgtggggttggttctatgatgcattgcgcgattggtctttcttttaggcatgggttgcgcaggggctcgcctggggcggctctcagcggcgatgaagatgaggttccagtgttgaatctggttgcgtggcttgaatctgatgtttgttgtttttcatcggtttctcagttctaagaggcttccgttggcgtcggcttaccctgggccgcgcggctggcttgatttttttttataaaaagcgttttcggtttgggtctggttcttgttctggtccctgatttcgtgtttctggttctcttgcttgtctcggtggggctttggttctgtttctatcgctctctccgatctaaattgaatgcgacgttatcttcggagcgcgattccccctcctcttggtagcgatggtggtctgcaatagggaagaagaaagaaagcggaaggggaaagaaacttggctgccataaggtggtttcagaggtatcatcggtgttatttcgcagttttcaatgggagagaagggacatggataaggttaaattggaaaatacaaaagataacaaaaaaaataaaaaaacc

SEQ ID NO: 24731 - DNA, 1049 bp, Glycine max
  Clone ID: PAT_MRT3847_122335C.1
taattcattctgataaaataaaatcaagctgaattttttgttgatgcaagaaataaaatattacaagaataaaacataacatttgggtgaaggagatattcagagcttcaatttatttattacataccattgtggtccatcctattcattcctacgctaaaaagtaaaagtaaaagtaaattaatatgaactttgcgcgcatccaattgtttttggttctcctcacgactctactctaccacccaacgaaccccaagaaactgagagagagagagcggagagcaatgtgttgggtgagagcatggaaaaagaaatgggcaccgtgaaggaataccaccactcctgtgcaacctaacaccaacacttccatcatctttctataatttccacacatcaaacaaagcttatcagagaagggttatggttgacgagatttcgggacgaaaggcctcaaaacgcttcgtcgtttgtggttactgagtcctgagtgatcttgtcatccgacctttgccatgacaggtgcgcttgcttggcaggtcaaaatatgttaataaaaaaagttttattggtttagggagagatcgcacgggagttgcccggggtctctctctcgtgtggtgtgtggtgtttgctgtgctctccttttcgttatgccttttattattacctatctgtcgctccactccgtattacgactctggatcagagggatacatcagaggattcgctccaactcctatcgaataagaagatgctaggtggtgttcatcaatattctgaaaggtaaaacgattttggtttttaatgataatataaccatgaatctaacatcagacattgaacgctacacatcaaaaataaatcgagccaacgcatttaattgtaagtgtcttcatattacctgtgttctgtgacatctttttgcataattttggcactaagtcttttttgatagaaattgtgaagatgtactgttatcattgtatcaactatattgtgcccttctttttttacttgatttggcaaacacggctacttttctccaaata

SEQ ID NO: 24732 - DNA, 374 bp, Glycine max
  unsure (1)..(374): unsure at all n locations
  Clone ID: PAT_MRT3847_122336C.1
actcttgcacggaacgngggagagggggggggggggnacaaagaggtgcaacggtagaaagggtgatgattttgatattaaactagtgtgngatgttataaacattttttaaaggaccgattgttatgaggggattcttgtgtgactccttatgagggtggtgtgtttaaaattgtgtgtggtgtgtcggatctttatattttacagaaaattgaggtcggggttttgacttaaatattttgctcgattgtgcattttatgaatggggagatttggctaaagatattgtatattgcttggagaacgggttggacactttaatctgtatgtatggttaaaattgctttggtggtccatacaaaagctgtcattct

SEQ ID NO: 24733 - DNA, 2682 bp, Glycine max
  Clone ID: PAT_MRT3847_122337C.1
cgcggcttcaaccttgtagttattctctttcttcttttttagctatccctctcttgaaaaatctagatctcgttcttccttgatctacgttacgcttttagtgaccggatctgtatggatctgaaccagatctacacgccgatggtggttttggcctggtacgataaatcttccatcggagttttgctctgtataggttcgattcatcgttattagcgtcttgatattgttattttcatttgtcatataggtctttcatagatctgatgcatggaggctcagatctactgtacagaggtgtgcgattcatgttcgtctctcttttggaatctgtttcgtagaaagtcgtttggtcttccatgtcgcatggctcttgaggtatttttttttgcagatactgtagataatcgatgagaagaacgcagatccagccgcttccgcttgttcgatcgctacagacgcttgtatcggattattcatgattgattcataagcagcatgtcttcctccggctatagttgttgcagatctcggatgttgtaaaattagtgtatgatgtgaagctatgggctggaaaatgtggatgtaggagatttcgggacgaaaggcctcaaaacgcttcgtcgtttgtggttactgagtcctgagtgatcttgtcatccgacctttgccatgacaggtgcgcttgcttggcaggtcaaaatatgttaataaaaaaagttttattggtttagggagagatcgcacgggagttgcccggggtctctctctcgtgtggtgtgttggtgtttgctgtgctctccttttcgttatgccttttattattacctatctgtcgctccactccgtattacgactctggatcagagggatacatcagaggattcgctccaactcctatcgaataaggtattatctgtcaatttacattggaaagggttaggatattgaattttacataattaaagataaaatcaacgatagctatagttttaaaattaaccatcgatttagttgcaactggaacacaggtttctttcaatgaaataatattaatatcaatttaataagctggtaatgtaaaatactgctaatgttaatatgaagtttggatggtcttattggcagaagatgctaggtggtgttcatcaatattctgaaaggtaaaacgattttggtttttaatgataatataaccatgaatctaacatcagacattgaacgctacacatcaaaaataaatcgagccaacgtatttaattgtaagtgtcttcatattacctgtgttctgtgacatctttttgcataattttggcactaagtcttttttgatagaaattgtgaagatgtactgttatcattgtatcaactatattgtgcccttctttttttacttgatttggcaaacacggctacttttctccaaataagatggatcatttgtattgccggctttgtgcacaattatctacttgtaagatgtccaatttcgggcaacaacatttgtaatgcagaaataggtcattagcattgtaaatctccaggcgataaatggaatatcaaatggaagacgccgcatagcttctggtgtgacaatatcattgtgttgggcaaagcattttcgaagaaatatcgtggatttaggaagattctgattattcttctacatctacaattattaaggtgaagataatttcggctctttacaagtaaagaatgaaattttcatatggtagatttagttgatcagtataattattgttttaatttaattccttgaattattttaattattgttcttcgacactttattcagtatattattaatttttttagaaccagaattagtttattgcactatggttagtttttttagtcattcacatttgtacatttattcggtatacattaatttatcattatacattaatacaaagggatttttagaagttagtttttcccttgctggaaattcttattgagaaccccagcaaacagccaacccaagtatcttctatttgacctttcctattttcaaggtttcacttgtggttcgagttcaatttgcaattcaattgataagtttctgttatctgctattgaggatgactaacggttttgtaatacaggaagtttagacgtggttcagcgaacacattaaaaaaatcgtgtttttattttatatttatactgtatctacagtttttatgtatttcagaaattcagtatacgtagttttttattaagttattttagttattctttatgtatacataattttatgtatttatatctactgatgtttatattgttccgagacgcatggataattggaaaatcatggcagttgtcggtttagatgttaattgagccaaaccaaaatatattatcagcccagtaaagtagttttaatcttttttggtcccctcttaattgttactttttctagtaattcccttttttatatgaattatgtatattaattttttaaaattgaagaataagaaatactcttggtacatgataaactacataattgaattggttttattatttaagtagttaggaattttttaaataggcccagcctccctacccatctaagtctcaacttccatttttgcttctgttcattttataattgggatgaaaggatcaactatcataattaaattgcgttga

SEQ ID NO: 24734 - DNA, 638 bp, Glycine max
  Clone ID: PAT_MRT3847_122338C.1
gccttctccatttccacctctgtctgtgacatccctcatccatgttgccatcaccctcaatgtcgagtacctctgcgactccactctacacatgcaccgccttcgtgccaccaacgaccccaaacctactggggaaccatcgacaccctcgaaccttgagacttctgttgagagaaagaggacctatttcgagaagttgttgagtgaattagagagctatcctcttgggagcatagtggacgagttgggtgttgtaattcttgtgcgaatttgtgtgtttcgtggttttgatttgatgtctctaataacattgattaagggtttgttttagataagaaagagggtgaagaaaaacaatgatgtaaaagaaaactttttattttgtgtttataatttttaaaattaaacaaagataggagtgatttttatcactaatgttgttataagaaatatgaaaaatgaattaaaataaaacttttgaaaatataagaaatttaaatatatattttttaaatttaatgtatcaaaaaaaaattaaaaataaatttaatggactaaaagtgatattaaataaaaaaaatatactattttgttttaaaataagacaagtagaattaaaacctgtgtaaatcatgatt

SEQ ID NO: 24735 - DNA, 315 bp, Glycine max
  Clone ID: PAT_MRT3847_122339C.1
aacaacgaaaaaacggcaatccaggaggtgttacatagaattcattaatccatctaagacaaattatacgccaaaagacagcattgcctaaactaattatattttctttcactacaacaaacagctgtaaaaaaacaacgcttcccgccgaatatatatctgcacggtgtgcccagataccttaaatgtaaagaaggtaaggtcattattatacactagcaactacccaataacatagttaatagaataccatggcctacattaattcaaaaaaataaatcttaaaaatattggtcaatcattaatttttaaaaa

SEQ ID NO: 24736 - DNA, 765 bp, Glycine max
  Clone ID: PAT_MRT3847_12233C.1
ccacgcgtccgcaaaattatagaaatttctttagtatttttctacttgtttattggagaaaatgaaccgttaaataagacccactaattacattatcaaaataacaaaaaatgagaaagatcttttaataaaatactagacaagtagtattattatcgattttattgtaccttccaaacaaaccctgcagcgatttgtttttatctccgctccttccatctccgccgtaccatgtcggaagcaccaccgtctcagccaccgcctccaaccgccaacgcgtcaccaccgccgtactggtgctaccactgcgagaagcgcgtctccatcgaaacgctcgcgaatctccccgacgtcgtctgcggtgagtgcaagaacggcttcgtggaatccatccacacgccgtcgcgctctcgctccccctccgcctcctccgacgacccctacttcggctcgcagttcctccaggtccttcgcctaatcgctcagtcggcgcgtgacgacgacgcgtcgcctccgccgccgccaagccgctctccggagaacgatttcctcaggatcgagctcggtggctgggacaacgatgaggagaacgacaacgacaacaacgacgacgaggagttcgaggaacacgaggaggcagaggatcgctccggcaatgaggatccgcacggaagagacgacgaggatctgagaagaaggaggcgcgagctgcttcggcttcggattagggatttggcgacgcgcacgaggagcatgcggaaaccg

SEQ ID NO: 24737 - DNA, 1667 bp, Glycine max
  Clone ID: PAT_MRT3847_122340C.1
ttttttttttatgcatcacaaaatagagaatatattatagctgctaattggttcaagtatagaattgtattatatgcattaaagcaatgggaacgatattatatgacatctacatcttccaaaattcccaaattatatacgtcaaatcaaacgagatgccgaaggcaatggaaagtaaaaactttagaagttccccgtacccccttaggtgaaaaagagacactcattttgaatgtgaaagaattaattgaacaaacaatgatatatacatttgtttaattgggtactccaatgtatattcagtatctcggatgctggtttgaactagtagttttaccatcagatgatgtaagaggaactgttgagaactcagaatcaaaatgttcagaatgctgaaaataaccacgagggggacgactgatgttttgatttgttggagtaatttgaaaagcagatggtgttccagcatcaaacctccgattggaaaatggtggagtgacagggatagtataaggacttttatcggaagaattttccatggctttacctgtattttctgatgattctctcttctctctttcttctgtttccttgagaagaaaatcaacccacaaatctgcaaaagactggttatcagatcctgcatttgcagcggtgtcagtcgaatttcctcccaagaggcctccaaccaagcggctaggcagcccaagaactcctcgaacaacacctttacccgaaccttgttgagcaactccaatcctctgtttatcctcggtagagaatcccagcatgcgaaccattagatccaaaacctctttgctgtggtttctctggaaataagtgatcagtaattttatcacaatgcgcctgtcaacaagaaaatcagaatccactgacattctatttaaccgtgtcatactctgctcaagagctcgcctcaatctggaattgtcttcttcaagcttgcttactctacttctccattccgattgtaccttctcagattgagaaagctttgctaaaatttcttctttttcactgatcaatacatttgctctgcagtctgcatctttcaacagttgagaaagcttagatgtttcttcctttgcacgagccaaatctccttctaaatgttccttagcttcaatttcagcataatattgtccaagagctgtctgtagatttacaagttcagtattcttagcatctattgtgctcatacagtttgtaagcttcttgttgaggtcatcaatgatttccctggacttcagaatttcattgtcgtttgccatcttcagctcctcttgacttgcaagtgcttgcttcagagttctcccaagatgtgatacttgagcccttaaataattattgctatcgcgtagctcttcaatgattttgctgtcttcatccattttatctgagtcttcagatgccttttccagtaaatgctgtttgaggcggttcaattcctgcaccactttgtccctgtcctgttgtgtttccttcaaatctttactaagcttttgtaaggatctttccaagtcttcgttccctggaaaacttttggaaggatctggcctgtcgctacgaaagccaaattcggacgtgtgattctctgctgaagaagagtgctttctttcgcctaaggatcccctagtctttttagt

SEQ ID NO: 24738 - DNA, 339 bp, Glycine max
  Clone ID: PAT_MRT3847_122341C.1
aatttaggttcgacccacgcgacccgtcaccgcgttcgctagaaaaaaaaaaaaaaaaaaaaaaaaaatttttcttaaaaaaacaaaaaaataactaaaaaggggagggtagaggttgctatatggctcccaacttcagaaaccagaacgcccaccgtaaataactcctctatgtttcaatgctcgaattcatcctcatgttcgatttcttacatcccccaatacccaaaaaaccattaggatttccaaacaaaattagtcttagagaaaacccccctttccccccatattttattcgtgaagatgcattcacccttcgcccttacaaaaataagaaaa

SEQ ID NO: 24739 - DNA, 245 bp, Glycine max
  unsure (1)..(245): unsure at all n locations
  Clone ID: PAT_MRT3847_122342C.1
actatacaacactatgactgcacacgcacgcgtacgtgaaccctgtacatctaccgcccccccctttttttttttttttttttttttttaatgttnaacctgccccttaaatatttttttttagctttttgttcttttatttcccggggggaaaaaccccctaaaaacacaacacttttggaattgaccccccaggacacaccaattgaaaattgctttaaacacaccccggctccttatttttc

SEQ ID NO: 24740 - DNA, 1614 bp, Glycine max
  Clone ID: PAT_MRT3847_122343C.1
gcgtgaggtaggtgaagaggtagctagtactgctccctctgcgacttcgtttcgtagagggattttggccgccaaataaacagtctcaccataaactccaaagtcccaacgctaaacgaaaccaaacccgttgtctgttgtgtctatattgggagtgcccaagttcgaattcgaaagcaaaaacatgtttttggcgagacccattttccgaggaccctccctttgggcgttgcactcttcctatgcatattcctctgcctctgcagctgctattcaagctgagatttgatcaaagaagggcccagaaacgattggagccgagaccaagtcaaatccatctacgactctcccattctcgatcttctcttccacggggctcaagttcacagacatgctcataacttcagggaagttcagcagtgtactcttctgtctatcaaaacaggagggtgcagtgaagattgttcctattgtcctcaatcctctaagtatgatacaggagtcaaaggccaacgccttatgaacaaggaagctgttctccaggctgcaaagaaggcaaaagaggctgggagcactcgcttttgtatgggtgctgcgtggagggatacactaggaagaaagaccaacttcaaccagatccttgaatatgtgaaagacataagggacatgggaatggaggtttgttgcacccttggcatgctggagaaacagcaggctgttgaactcaagaaggcaggtctcactgcttataatcacaatcttgacacttcaagggagtattatccaaacataatcacaacaaggacttatgatgagcgtcttcaaacccttgagtttgttcgtgatgcagggatcaatgtttgttctggaggaattatagggcttggagaagcagaggaggatcgtgtaggtttgttacatacattgtcaacacttcccacccatccagagagtgttcctattaatgcacttgttgctgtaaagggaacccctcttgaggatcagaagcctgttgaaatatgggagatgattcgcatgatagcaactgcacgtatcgtaatgccaaaagcaatggtcaggttatcagctggcagagttcgattctccatgcctgagcaggcattgtgctttcttgctggtgcaaattctatattcactggtgaaaagcttctcactactcctaacaatgattttgatgctgatcaactcatgtttaaagttcttggacttctcccaaaagctccaagcttacatgaaggtgaaactagtgtgacagaagattataaggaagcagcttcttctagttgagttgtcaacggtttcaaaacaatatctgtgatccttcaacttctctaattgctcattagcatgtactgatgttaggtttcattgaatttgtctaatctcagctttgaagacacaaactccaacacttaaaaataaatattgaaattattgatttttccctaaatgggttttttcaagattaaaataaatgtaaaaaagatgttgtgttttttcagcgtgatcattcaaaaattatgtaacaatatcatggtggtggttggagttttgcgcgtcgtcattctaaaaatatgctccaatatcatggtg

SEQ ID NO: 24741 - DNA, 270 bp, Glycine max
  Clone ID: PAT_MRT3847_122344C.1
cctcagggaagaggatttgggacggggggcttgtgaacctaaacggcgatttttgacagactccagattgtagattgacagcttgcaaactgggcctaggccacatgaagggagaggatattaactccgttaactacaaggagctgatggccttggaggatgccttagagactgggctagtcagcgaccgagataaacagggggctgtctactggatgagcatgagacacgacaagatcttggaggaggagaacatggaacttactttta

SEQ ID NO: 24742 - DNA, 340 bp, Glycine max
  Clone ID: PAT_MRT3847_122345C.1
atcaagagttctacttttcgctgaaaagcaattgctacaaaaaggacatcttaaacttggcccatagccactgctgattttcatcaccaagccgtgtctcatgagatactttacacccgtctagggcctgttgaacctggctcatcttgaagtacttaggaaaaatgcagcttccacttgcacgggaaccacctgaggagggtaacaaaggacctcctcttggggtccttctcaggctccaaataccactcagctgcaccctatttttctcgatgaacacaagaggctgacctaccgcggctagatcaggctccacttcctcgtgctagggccgaaatta

SEQ ID NO: 24743 - DNA, 438 bp, Glycine max
  Clone ID: PAT_MRT3847_122346C.1
gggggaacacaaattaattttattcagggtacttgcaataactattgataacccgggggaatacttggagctagactaactagcgtataaaatttccccttaaaaacataaacatgggcttagcagattcctccttcataacattttccattatggaaattatttacataccccctttactggggcccctaccatgtttagggattcacccttatatttaaggggttcaaacatgttttgcatctacaggggaaaccattgagttcaccccaaatacattgggacctctgcaaaacttggaaaatcctttttttccccagattttcccccatgaaatctttttgatccaaaaaggcttttccttaaaaccaattggggccttagcgccagattcatttgccaccaaaagaaccccatgatccaaaagctttccccaaa

SEQ ID NO: 24744 - DNA, 512 bp, Glycine max
  Clone ID: PAT_MRT3847_122347C.1
acatattactgctaatccaaaattaaatataataacaactacctaattcataactgggcctatcaatgcttccccgtactaaagcggccaagggtgtcaaactcgatattttactcgaacttgggaaggggaaacaaaattgtaaatcatgttctcatttgttcttgcattgtccatcagcttcatttctctagaataacttggttggtgttttttgtgaacactgggtttgtcccagggtccttcaaaagttcctgtgttaacttcagaggatttggtatgagcaaagatgccagaaagctttggcattgttcttaggctgtggttttttgggcatatttggttggaaagaaatgctagaatcttctcagcacggcattcttctaagttcgtttgggatcagctagtttttctaacttctttgagttttctgctcatggtctttttaggggattgtctttgttagatcttcagagagattggcatgctttgttgcatgtttcttgatcttt

SEQ ID NO: 24745 - DNA, 471 bp, Glycine max
  unsure (1)..(471): unsure at all n locations
  Clone ID: PAT_MRT3847_122348C.1
tacggctgcgagaagacgacagaagggccgcgccgatggaggagtgaagacgttgtttgtgatgagaactgaaccatattggtggctcggcgagccgcgacagtccacgccgccatgcttcggtgctgaagctgaactaaacggattaatggagattgcagttgccagacgaatagaaaatgcgacaaagttgctatttttatgtaccagaaggatcggttcccttccggcagtaaaaattatttttagtacaatacaacgtacgtctagcatgttttaatttaccacattaaatgcttaattgcttttttctctctcactattttgttcaatttcgttcttattttaaataggggtttaatagatttattttagtttttttaatgcacagatttattttaatattatactgtttattgttattactacaaactntacattatttattcataatcattaattaacattaca

SEQ ID NO: 24746 - DNA, 613 bp, Glycine max
  Clone ID: PAT_MRT3847_122349C.1
gcaagagatgcttagctgaagcaacaacacctagtctaagcacaactggcctcttcagggatggcgtctgtggccctcacacctgcccctttcactgttgacaactcctgacctagaggccttccctccctctcaaggaactcctcttgattcaaatctgtggccagcggtggcaagaagatcaagactgacaacccttatggaatcaatggtggcctggctttgagggaaggacctcatgcatctggcaagaaaggaaagggaaagggcgattaccattctgcagacaatatccggtgctaatgtcgatggttacatgtcctatctacgacaccaaggactgctctccgaccggtgatgtgtactctcgcggtacgactggcttggctatctgggctgtgactctacttgctcttcttgctggtggagcacttcttgtctacaacacaagtgcttaggcgcagtacacttagcaaatcgatgatttaagctcaaacttaatccatgtaactatctaaaaatgaagaattatgcatgaagtacttcgaggatacgtgtaccttctgctgtataaatgtgtggatgtgaaaaatcccgtgcatgcaatcatgct

SEQ ID NO: 24747 - DNA, 1886 bp, Glycine max
  Clone ID: PAT_MRT3847_12234C.1
atctcggtatagggctggagccagggaaacttcactttttgtaaggaacttgtcaagttcataaatttcctttataatgtcatcaccaatagcatttttttaactatattgatatatgatcgatgatgaaacaaaatttgcaccagtgaggcgctgatgcaccaacacaatttgtttccgtacaccgtcaacacctgtgtaacccacccatgaatctgtgcaacttctgtgtcctctctgaatctgttaacaccaaccatgaagacagatcatcatcaggtcattgcctcatcacaactaagccacaccatttcacgaatcagcaaccatcctacgatcatcaggaggaggagcactgtccaaaggtttggctctgatttttgccgaaaatctcagggcaagagaactttggaaacacaaaatgtttgatgaggttctgattgaagacattatgcgtaatggacgcctgaataacatcagtgttgatggcagccaataatgccttccaaacacaaacaaaccctgcagcgatttgtttccttccatctccgccgtaccatgtcggaagcaccaccgtctcagccatcgcctccaaccgccaacgcgtcaccaccgccgtactggtgctaccactgcgagaagcgcgtctccatcgaaacgctcgcgaatctccccgacgtcgtctgcggtgagtgcaagaacggcttcgtggaatccatccacacgccgtcgcgctctcgctccccctccgcctcctccgacgacccctacttcggctcgcagttcctccaggtccttcgcctaatcgctcagtcggcgcgtgacgacgacgcgtcgcctccgccgccgccgagccgctctccggagaacgatttcctcaggatcgagctcggtggctgggacaacgacgaggagaacgacaacgacaacgataacgacgacgaggagttcgaggaacacgaggaggcagaggatcgctccggcaacgaggatccgcacggaggagacgacgaggatctgagaagaaggaggcgcgagctacttcggcttcggattagggatttggcgacgcgtacgaggagcatgcggaaccggatcttggattgggccgagattctgatgggcctggaggacaattccatcgagttccgcctccagctgccagaatccgaccgctacgtcgggaatcccgaggattacgtcgacgcggcggagtacgaggcgctgctgcatacgctggcggaaagcgacggcggaggtaggagaggagcgccgccggcgtcgaaggcggcggtggaggcgttgccgacggtgaagattgcgtccgaaagcgaagccgtggcgtgcgctatatgtaaggatttgctcggtgttggagacttggcgaagaggttgccgtgcgggcatgggtatcatggagattgcattgttccttggttgagttctcgaaattcttgccctgtttgcaggtatgagctaccaacggatgataaggaatatgaggaagagagagtggttaactctgcttcgagttccggtggaggtggaagtgccattgtttgattccgcttggtatgctccgtcttgctctgttctcttctgccatttgtgtaatatatttcgtggtttctgaatttcttctttttttgttgttggcattagtggatttaaatcaaagcttgcgccatgttattattaatttatttgaagcttttattatgtagttggcttcttagctttcagatgatgctaagatacttgtatatagcatttgaatcaatgtgaatgtgatcatatcacactacctcaatggaattttcactttctccctgtttctactttcgcatcatgcctaattggattacttgatgcatgctcttattttt

SEQ ID NO: 24748 - DNA, 396 bp, Glycine max
  Clone ID: PAT_MRT3847_122350C.1
ctacatgaaagaagaaatatttacacttacacaatctcaaatatattcctaatcatattatgtcacatagtctcactatgatcaccctatagactaaccacaagaaatcacagttctttataatatcacatattacccaaaatggctatacaacttgattggacatagctcatgaaaaaagtaagctcccaaagttatatatatatctatctaggcttatctccccttttaatttttgctagaggtaaaataggtatcaaacatgcgcattctaacatgcaaaagggaagagaattgacaagccctcaaataacggttctatggccttcaataaacaccgcgcgtaacaggaaaaacttgtctctcttagaatcgcctttctcgcataatagggag

SEQ ID NO: 24749 - DNA, 229 bp, Glycine max
  Clone ID: PAT_MRT3847_122351C.1
ttagtcttacgaaacaatacaagtgcggcctaaccaggcttctgtaactgaggtgcatacgatgagtactagctagctgataaagacgacgccagagtacatggactacacagtacagcaatggctaggggggctgcaagacaccgaggtgacgatcctagcaacgccgaggacgtggcataagtctatgctgaacaacatagagcgctaaggtgggtagctctaggaa

SEQ ID NO: 24750 - DNA, 646 bp, Glycine max
  Clone ID: PAT_MRT3847_122352C.1
attttgtacaacaaaatcgtagtcgaacatgtgactttcaggttattaacacgacactctaaccaattaaactaacggtccaattatcttataaaatgaataatgttattatatataacactaagtttttttaatgtatatttaatgtgtatgtaaatttaaataataaattttttgacaattagttttgatataactcatacgaattatttaatctgtatactttttttataaataaaaaatatttactattaaaaaaataatttattaatttttttttaaaaaaaacttacggatcacgtaatccttatgagttaactcatacggattatgtgattcatatgagtcatacggattatgtgatccgtaaaaataaaaaacacttaagaatatttttgaaattttgttttaatgttgggtgcacaagcaataatcctggtgcacctagcaaagcccataacagacctataaaaaaatttcatgggccagacccaacaaagatgtaacaacacagaaacctttccctcaaaaacaaaaagaattgtccccttggaaattggcaatgacagtggaaattgaaaatggagggaaagcaaaccctaattcattgcaccgatataaaattaataaaaaactaaaaagaaaa

SEQ ID NO: 24751 - DNA, 211 bp, Glycine max
  Clone ID: PAT_MRT3847_122353C.1
ccagaggacgaccgacagagacagttaaaacatttaattaagatgagtctgaataacagccagcattgtctaaatgaatgtgtgcttcctccttcccttgctagggttacaaatacacgcatacaactgaacttgcttaaaaatgatcaaccattaagctctgattttaatgaatattcatattcaaaccttcatctctacatttgtacac

SEQ ID NO: 24752 - DNA, 277 bp, Glycine max
  Clone ID: PAT_MRT3847_122354C.1
gatatatcggttattttgttcacccatcgagcggaggcgggcaaaaaaaacatctttgggacatggactgcctacacaaagaaacaaatggtcccgcagggccatgagtacgccagttgtacagacaccaacacatcatggctaggctatagggtcagcggggctgtcagactcatggcgaactcacgcgccagatagacgaaggttatccatttttgcgtttaaccagcagagggggacatgccctatccctgagataacgcagtcctgcaaggtc

SEQ ID NO: 24753 - DNA, 242 bp, Glycine max
  Clone ID: PAT_MRT3847_122355C.1
cagatttgattcagattatgctttgtcttcttccatctccttgtgccaattaagatacaatatgacacagatactacgatgaagagaggggacgacgaagacaagtccgggggggcccatgttcccaaggctgcatgagaatgatagcagagcaaggaggtgcaatagcactaccagcgtgcaagacggctctttatgaacagttcagtattccatctcagaagttccatccacgccttctt

SEQ ID NO: 24754 - DNA, 492 bp, Glycine max
  unsure (1)..(492): unsure at all n locations
  Clone ID: PAT_MRT3847_122356C.1
ggctcgagaaattaatggaggaggaagacaaccactcccacctccaaccactcataccctattattccactctctccttctcctcccattcactccagcaacactttgccgacaaaaatgcaaaacacttcacctccgacagcaacaacatcgttctccgaatcctctcaattctcttactagctctcatctcactatgggccaactacgaggcatccaaaaccttccacatcaccgtggtaaacgacgccaaggactcccccgcgggacgccgtttcgccctctcctatgtctcaaacgacgaagcctctcgcatactcctcaacacaagctcctacgtagaacactttctttatccaaatagtaataacaatgataacaattaccccaagaagcacatagatagtgtcacactccagctacctcgccggaatctcaacgtcaccgacatcgttgccgtctacaccgccgccggaaatcacctncaacgag

SEQ ID NO: 24755 - DNA, 805 bp, Glycine max
  Clone ID: PAT_MRT3847_122357C.1
gaaaggtttcgatgcttttacaaactttatttcgctccaaagttcctttgcaactgaaaaataaaaataaaaatgcaccgatatatcaccgtccatgaaagaaaagcgtgctcttcatttgaagcatccattttttcttttgaccccagcttcagctatctaggtttagggttttgcttcaactttactcattttcccgggaaacaccatttagaatgttaccatctttctttttaattatgttgctgactcgttctcaaaatttggtctttcgctatagaatcatgttaggaacagttttagtttctttttattattgtaaatttcgttacttctgaatgcgtaaatttgtgtttgtcttttggtgccacaattaaattattggaaaaaaaaatgccttgcttttgctgcttgatgtgggcccatccatgcattctgttcttcctgaaattgagaaagtctgctccatgctagtacaggaaaagctgatctatagcaaatatgatgaagtgggaatagtcttatttggaactgaagacactaattatgagcttactactgaagagggtggggatcaacacgctgcggctttgaaaactactaaaggaggggacggtgatattgcggaggctttacaacaactgcctacaggaacaactgatggtgatactcttgatgctgccattgacggcatggatgtgtaagtaaaaaaatttggatgaacagacaagggaaagaaacgtgtgtgtcttattacaaatgcacgatggcaaataaaagaacctgatgaaggaacaaatgaaga

SEQ ID NO: 24756 - DNA, 454 bp, Glycine max
  unsure (1)..(454): unsure at all n locations
  Clone ID: PAT_MRT3847_122358C.1
agtaataaaagacaaagnagaagaagcaggaaccgaaccggacggcattaatacaagtgaaaaaagacaaacacgcacaagaaggccgagggcaaggaggaaaacagccaccggtgaacccggcccaaaaaaaagacccagaaacctaaaagaccagaacaagagcgcaactataacgccctagcactcaaccagcaaacacaaagacggaggcaagaccattcggactaggacacgaaccagaggatccaaacggagctgaaaagaggggtaccctcggcggctacaagaatacggaagagagccccaccgagccgcgcacacgctagcacaaaatagagcccaaagcggtgagaaccctccgccgcgagcagacgccgtcaagaccagagaggaggagacgatgtccaagtcagaagcaacgtatttcacgggcacggaacgcgagccccct

SEQ ID NO: 24757 - DNA, 514 bp, Glycine max
  Clone ID: PAT_MRT3847_122359C.1
ttccttccttttttttaatgctaaatttaaacatttgataaaatgatgctcctagggggctataggaagcctcttacaaaaatatatccaccttttctcttgatcatccccaattacattggcattttaaaatccaactaaaaccctttatgcttcttctttccctattgatggctttgttatttacagagagtacacatgaccgtccattggctaaaacttcgtgctcttccaacccttcataagaaccttaccaacatgatgtggcgtgaaattcccattgctcgaacataacaaagtatgacccgccatattggtgctcatctttgcaccagaaaactggaactttcattttgttgagtaatcaagctttaagttaataaaccttgactcatccatgcctttgaaataactttggttggactgataacacacacctatttacctcaccggagaattcataaccatttccagcaccatacatttattcaccctatttaacaccgcctttgag

SEQ ID NO: 24758 - DNA, 538 bp, Glycine max
  Clone ID: PAT_MRT3847_12235C.1
cgttgacgttctcatcctattctttgtctctctaccattgccatggaaccctacaagcgcgggacatgcagcgccttcaattctgccttctggactacaaattctggtgctgctatttggaacaacaacttccttctaaccgttggagcttcaggtccaattctgctggaggattatcatcgcgcggagaagatcgcaagtttcgatagggaacgtatcccagagcgtgttgtccatgccatgggcgctagcgcagagggtttctttgaagtcacccatgacatttttgacctgacatgtgcagattcccttcgagcccctggagttcagacacctgacttcgatcgtctctcaactggcattcatgagcgtggtagccctgaaaccttgaaggaccctcgaggacttgccgtgaagttacacaccagagagggtttctttgaccttgctggaaacaaccttaccatgttctttgtacgtgatggcatgaaatttgcagatatgggtgatgctcttagaccccaaccccagaaccaca

SEQ ID NO: 24759 - DNA, 464 bp, Glycine max
  Clone ID: PAT_MRT3847_122360C.1
aattcggctcgagcaattgttgaaaatattcttaaatatccatactttgaaaatagacaatttagttcttgatagatttatgagacctattctgtatgttaatcttgggtatcatgttatcatcattatttttattattttacatgaatcttgggttgtagcatttgcgatcattggtttgttattggtgaatttacgtaaatgttggctgatggttgctgcatctcttttgatcttttttgtttttggactgtttgatgtttctttgttttcttattcgaaaagtctctctttttaggatgctgataaaggtaaatggggtgccctaagtggaaggaaaaaatataaagaaaaaagaaaaaagaaaaggaaaagagacatagtaagagatcagagatgtgataaataatcatgggaaagaaaaaggaggcataagaagaaaataagatggatgagaaaataaa

SEQ ID NO: 24760 - DNA, 125 bp, Glycine max
  Clone ID: PAT_MRT3847_122361C.1
tctagccgctcttcctcagtcacagtcgtccaaacaacacacaaccttggaaccacagaacctcatgcaagcctacaattgagcagtcctcctcatgggaattacaaatgtcacccacttatggt

SEQ ID NO: 24761 - DNA, 559 bp, Glycine max
  unsure (1)..(559): unsure at all n locations
  Clone ID: PAT_MRT3847_122362C.1
taataggggagaaggataatnngacttcccttttttatttctagactttttgaatgtctaagatacagtgattagttttgcgactgcaggtataatattgttattgccattgatgaagaaatacgagaaaaaaaaaataatgattcaacgtcggttattatgacaaccgatgttgaattatgaatatcctacatcggttatctggaaaatcgatgtagaatgactgacattctacatcggttaactagacaaccgatgttaaattatggaattctacatcggtccacgccaagggaccgtagtagaatagaagccaatctacatcggtccaaccaagcgaccgttgtagaattaacgtcattctacatcggtctccgcgaccatcgtagaacaccaaccccctttttacgatgtcttctacaacgtcgatccataattgatgtagaatgcgcttgttgtagtagtgtttgaagctcagcgagtccttttaatttcattgttctaggcttctagccacgagagggtcaagaactcgcctataaatgaacggacgcgtggg

SEQ ID NO: 24762 - DNA, 352 bp, Glycine max
  Clone ID: PAT_MRT3847_122363C.1
gtcttttttcttcttttttttgttacacctgtactgctgagctattgatatctttttttaattctggtgttatgctcagtctctctcggtcatcgcgttaatatgcttcgatatctatccattatgccacggtgtactacagtctgcaataccaatgtatgttgactcatattgtaatttcacctctcagcatcatgtctattatgcgatggttaaaacgtattctcaagaaccaatgttgctcttcgaaagctgatccagacaatggtcatcagaatgttcaattcacaaattagttatactatttaatggcatccactattttcatgggtcaacttttgttcatggtcct

SEQ ID NO: 24763 - DNA, 263 bp, Glycine max
  unsure (1)..(263): unsure at all n locations
  Clone ID: PAT_MRT3847_122364C.1
aactctnggaggtntnnnnnntnatnatgagtttatcaaaagtggngatacatcgcgtttngannccaangcaagaattttgcagcacagttggacacgagtnacaggttcaaactggccaagtccatcaccgcagatcagattctcccgccaagaaacgcactgcccactacaatgcaaganaaagttcgatattatcctggcaaccgcgttgccgtggcaaacaacaacgtccccttccccttcgggggcccaagganatt

SEQ ID NO: 24764 - DNA, 850 bp, Glycine max
  Clone ID: PAT_MRT3847_122365C.1
gtggaatgagtcaatgagttatcaaccctgtgattcagaaggagagcctcttccaaacacagaattgaaagaggtttggcatgttgctgatgttccccagaatgacaaatttcagtatacacattttgctcataaaataaacagctttgacactgcccctagaaagttgttggcatcagattctcgactacgcccagatagatatgcactcgagatgggcgatctgtcaaaatctgggacagaaaagagcagtttggaggaaaggcagcgtgctgaaaagagaagccgagaggagaaagggcatagcttcacaccaagatggtttgatttaactgaagaagtgacatcaactccttggggtgatttggaaatctatcaatataatggtaaatacagtgaacatcgagctgctgcagataactcaggaagcattgatgatgttgatgctaaatcaattgaattcaatccatggcagtatggtaatttggccacggaatgaactaatttcaatattcttctgttttcgtaaatcataattttgtaacctctttacttgcttattattatatttatactttacaagatccatggcagtatggtaatttggtcacggaatgaactagtttcaatttgcttttggtttttggatgatacagctagttcatgtaacttttttattgatacatagaataaatcaaaatcctctcccaatgcaactcccattacatccaacatgcccagttctttattcgtgccaacaaaataagaaagtttcacctaccagttctgctaaatttagagtgatatccaaattaagtagaccctcgctcgaccgaattcgagctacgta

SEQ ID NO: 24765 - DNA, 853 bp, Glycine max
  Clone ID: PAT_MRT3847_122366C.1
agtcaatgagttatcagccctgtgattcagaaggagagcctcttccaaacacagaattgaaagaggtttggcatgttgctgatgttccccagaatgacaaatttcagtatacacattttgctcataaaataaacagctttgacactgcccctaaaaagttgttggcgtcagattctcgtctacgcccagatagatatgcactcgagatgggcgatctgtcaaaatctggggcagaaaagagcagtttggaggagaggcagcgtgctgaaaagagaagccgagaggagaaagggcatagcttcacaccaagatggtttgatttaactgaagaagtgacatcaactccttggggtgatttggaaatctatcaatataatggtaaatacagtgaacatcgagctgctgcagataactcaggaagcattgatgatgttgatgctaaatcaattgaattcaatccatggcagtatggtaatttggccacggaatgaactagtttcaattttcttttggtttttggatgctacagttagttcatgtaacttttttttattgatacatagaataaatcttttttttttctttttgtggttttgttggcttgtgtacgttgtaatatctgcagttctctttcttttctgactacgttagtattttgattccatcacacagaatgttcttttgttttgaatggatggaaaacgtaagagttaccttgaacttgtatatatccgttgctgtcttgtgaatttttttaggcagtattaaacatgcaaaatattgaagggttctctcaatcttttctcttttttcttattcatctctatctgtattctttttcttttgttttttc

SEQ ID NO: 24766 - DNA, 232 bp, Glycine max
  Clone ID: PAT_MRT3847_122367C.1
ggggcagaaagggtctttttttcccggaaaaaaaaaaagaatcggggaaatcccgaaccccttttctttgggggggtaccccccctaaggggagaacccccccattttccccctggggaaaggaaaaaatagttttcccaggcttggcaatggaaacccttaaggcggtttttgggccgggcccttggtttctttttagcccctggcttgggggtttttttggaaagacttc

SEQ ID NO: 24767 - DNA, 569 bp, Glycine max
  Clone ID: PAT_MRT3847_122368C.1
atcaacaaatgttagtttgttagaatgtaagttttggacagaacaactgtaatggtagctcaccgtcttacaacagttacagtcagagatgctgatatcgtagcaagggtaaatactaaatacacttatgtgtagatactcagataggacattgggatgggtgttgtgactggatggagtggttttattatcatttataatttataataataggtccagggtgtttggaaagctacgaaggataggatcccatctaaaatgaatatggtccgcaggaagatgtgatctcatatgcagaattgttatgctcggcttgcggttttaaaagagattgtgcatgttcttatcaattacggataatttttgtatttttgtgctttaaaagacaaaacatcttgatacacaacaaaaaaaaaaaaaggcggccgccctttttttttagtctgggtctatacttataaaaagatcgataaccaaagttggtcttcgcaaagatatgcgtatcacattcatgcaattgaaaaaaaattttaatgcttatctaggtgcacgatctaaacttttacatt

SEQ ID NO: 24768 - DNA, 228 bp, Glycine max
  unsure (1)..(228): unsure at all n locations
  Clone ID: PAT_MRT3847_122369C.1
tttcatttcactncgtgcgaaagttgatagctcgaaaatagggtgggtatccaaagattgcaacagcgacgatgttcgacgcgataactcttctgacacatgcgccatcaccaaggacgccaaatctcactgcatcacagaggacgtcgaaactggactgttcgccactaagtgccatattacctactagattctcaggatttgcatcggatagcccgccgaactgtt

SEQ ID NO: 24769 - DNA, 1832 bp, Glycine max
  Clone ID: PAT_MRT3847_12236C.1
atcggtgggcaaggcatgtcgtggtcctctggttcagaatcagaagagtcagcgagccccaacaacctaatcccgtccctcccagacgacctcgcattgaactgcctaggacgcatccctcggtcccagcacccaaccctctccctggtctccaaacccatccgcaccctcctctcttccccaatcctcttcaccacgcgaaccctcctccaatgcacccaacccctcctctacctcactctccgctcacgccactcctctctcctccaattcttcacgctccaccgcacaaaccctaataaccccctcctcgctccccttcccccgatcccctcccccgccgtcggctggcaattgctcagggaaaatgatgtcgtgggcgtgtcgttcggaagagtcagagagccccaacaacctaatcccgtacctcccaaacgacgtcgcattgaactgcctagcacgcatccctcgttcccaccacccaaccctctcgcttgtgtcgaaaccaatccgaagcctcctctattcccctctcttgttcaccacgcgctccctcctccaatgcacccaacccctcctctacctcactctccgctcacgcgattcctccctccagtggttcacgctccaccgcacaaaccctaaccccctccttgctcctcttcctcccatcccctcccccgccgttggctccgcctacgccgtccttggccccaccatctacgtcctcggcggctccatccaagacgtcccctcctcccacgtctggctcctcgactgccgcttccaccgctggctccgtggtccccccatgcgcgtcgcccgcgagttcgccgccgccggcgtcctccacggcaagatctacgtcctcggaggctgcgtcgccgacacctggtcccgctccgccaactgggcagaggtccttgaccccgcctcgggccggtgggagagggtcgccagtccgacggaggtccgggagaagtggatgcacgccagcgccgtcgtcggggaccgaatctacgcgatggcggaccgcggcggcatcgctttcgagccacgcagctgcgcgtgggagagcgtggggggagaattgttgtgaccatggagggggaggaagcgtgcgttggagggaatcttatactgctacgactatttggggaaaatcaaagggttcgatgtggggcgcggggtgtgggaggagctgaaggggttggagaatgctttgccgaggtttttgtgtggggccaccatggctgatttgggtgggaaactgtgcgtggtttgggagtgccaatgcaatgggaaggagatggagatttggtgcgcggagattggggtgaagaagaattcggatggggaattgtggggtcaacttggttggtttgggaaggttctttctgttcccaaaggctcttctattgtcaactgttcttctgtttccttgtgattgtgaccatgcatgcaagcattctttgattttgcattgaattgccgccacttcctgctctgatgtttgtatgtgaaactatgaataattaaataaacaggagctgctcaagcagtactacgcctggaagtgaatcaagtgatgtgtttgtggaatgaaagtttgtgtacaaatgtctccgcgacattgaatttcagttactggatgattaagcaatactcttgttgcataacatggacattcatttgtcagttattcggataatcataggaaatgtgtatttatatctgaattccgtttcatatttgtatctgtatttacatttacatacttaatatatgatatattctcactcataattgaggaaatagatttggcaagtgaa

SEQ ID NO: 24770 - DNA, 240 bp, Glycine max
  Clone ID: PAT_MRT3847_122370C.1
acggctgcgagaagacgacagaaggggtagaaatagtgtataatgtgtaatacgcctttaatttgtacgtgcatgtgtgatcagtttaagagcaaattaacgtgatgaacatcatctattgtgcaaaaaaaaaaaaaaaaaaaaaaaaaaatatcgggccgccaaaaattggccccttcccccggggattaatttccggccggggccctgagggggtacaatgttccccaatagggagcc

SEQ ID NO: 24771 - DNA, 461 bp, Glycine max
  Clone ID: PAT_MRT3847_122371C.1
gagggaatcttttaactagataagttgggcatgtcagcttattgccctaaatattacgaaaatgaaatatattttctgactgaaaaacgataacaaaaaattaaagcaccatacttttcttttctttttctttttctttttcggggggcccatttctatccgatatttagtttttcttattttgtaattgcaatttttcattttgttgagaatctgatttaaatgtactgacaacataaaattcttccatattgtcatctaattacatattattatgaaaaattattaatttttataataatcatcttaaaattaatttttttattagttatcaggggaaaaaaaattatattgggtgtataaaacttaaactattttacccaaatattcgacaagtgttttattttattaggactcataaagtttaatgggtaccctttcttggactgaagaaagcatac

SEQ ID NO: 24772 - DNA, 262 bp, Glycine max
  Clone ID: PAT_MRT3847_122372C.1
aagggggaccccttgaaaaaaacaaccttaaatacccgcttcagccacaaactgggaaaaacccaaatccctgtatcctaaaaaaaaaaaaaggttccccttcttccccccaaaaaaaagggaggaccctcttgtaccccccaaaattttccttgccccctgcatgcccaaggggaacaccgtttcttttggaacacccctttttgatcccccctagggccctcccagcccggggaacaaacaccccgggaggggccccccc

SEQ ID NO: 24773 - DNA, 3596 bp, Glycine max
  Clone ID: PAT_MRT3847_122373C.1
ccacgcgtccgatgatgaaaagaaaccggagattgatgatttacccactgctgctgaagtcagtaaatatgctgaaggtccatcaacccctggactggaagagccaaatttatttggaactcagatggatcagggcaataatgaagttgattatcataattcagcagatttaatatcactggaggccacacagaaagaatcgctgaatcaccaaagggagaatgatgcaattgattgctccttgcaaaataatgggaatcatatttctttagatttgcatcatgaagataatgcctgcgatctggttgaaatggatagcaaaaaagagaagcaggagcatttagcatgtcaggttgtaatgaaggatcaagaaaatttgatacctaatgatcattgcttaactttgttacccttggtggactcttccaataaagactacacagaatgtgaaggtgggatgatcaatgcttctgatgtagctgagaaggaggacttacaagatggagttttgatgaacaatgacccagtttctgctgctttggatcaaactattacaaattgtgttgtttctgctcctttgatgaacaatgaaaatgttgcttcttctggttgttctcatgttacttctgatcaagaggacctctcatgtaaaccgttgtctaacatggatggatcttggggtccaggatttgatggtcgtttggaggatggtaacacattatcaaagcatgaagttctgaatggcattgaaatttccaagagtgaggggcaattctgtccatttgacgatgctcgagtatccaatgttattagtcctctacgatcacctggtagacctgaagttgttgatgaggaagctcaggcctctcaagaactgaaggaagcagagactttaaaccatgtatctcttgaagctgtgcagcccgctgaatcaatccttcagccatgcacctcccatcttggccagccttctcggtcatttattgaaggtgaaaaatgtcatgtaactgatgtttcaaatcctgctttaagttaccaagggactatagagccatctgtatttaaagaaacgcctgattcggggaaaacagatatgcaacttgagagtcagatatttagtgacaaagtagaaagtataaacaaatctgctgctgctgacatgccagagcctgaaaagttgctctcagcttaccagcatgatggtgaagcaaatcatttgctgatggcatctactcctgacaatcagggtgcaactgaaggccatacaggtgcggcaggagtaaaatgcatctctggtaaaaaacgtagctacacagaaagtactcttacagtgcagagtatggatttaattgaatcttacgggggagctcaatccaagagaactgctgagtctgttcctgatgatgatgatctattgtcatccatattagttggtagaaaatcttcagtcttgaaaatgaaacccagtcctgcagcccctgaaatagcatcaatgaagtgtgttcgttctgcttctgcaccacgtactagtgccttaaagaggaaggtgcatatggatgatatgatggtcttgcatggcgatacaatacgccaacaattgacaaatacggaagacattcgtcgcatacgcaaaaaagctccttgcactcgtcatgagattttaatgattcaaagacaatttttggaggatgaaattttccatgaaccaatatttatggatttgtctactgatttgactattctgcgaaatgagacatttgatctgactggaatcaaggttattgagtatggtttagatagttcttctgtagaaaaaacaaatgatcaagagtcctattctagaacacatactgaaattcatggagtggagggtaataatgaacctatggcagtccaactccaagaagatgcagaagtgcaacctactgaggtacctgttttgtctgagagtcatcagtctaaggttaacttgggatctcatgatattgatgctcatgggcacacgggtattatttctcatgtggaggagcttgacagttctcaaaatgttgaattgaacaatgtcagagcaaatattgaagtttctgaagcagggaattgctctgttggccctgggcatgaatcttcatccttaactgaagtcttcgaaaatgattttgccgcatcactggctcgcatggataaaaccaatgatctcgttgattctatccacacaaatatattgagcattccaaatgctgagaatttgaatacaatccctattctagaggatgactttgtggaggatcaaagtgatagaaatggagtaggtgctattaagtgtagcatggaaactggaacacaagttcaaacagatggtgtggatgccaatgatttatatacatccttggccattggttctacagaaactgatgaatttactaatattcaggcttcctttaatggtgacctaccattggaggaaaatggaaacagcttgctagggcagttaaatgaggatcaaattgttgcttctggcatggattgtgatgacaaggatgcaaggcctgactgcatatttattgaaaatgctaaagtagattgcttacaatctgaagcacttggattagatgaaaaagagagtttgttgaaagatgaagaaatccctgtctgtcaggaagctgaactacaaagtacaatgtgccctgaaattaggagtccttttgtagatcagaatgatgaaaatgacatgattgctaatgacacagtgtttttgaatgttggtgatgatgagataattgatgatgatgattatcaatcatgtgctgaaggaactaaccttgaaaatagtggatggtcttccaggaccagggctgttgccaagtatctgcagactgtgtttgataaggaagatctacatggaaggaaggagctgcatcttgacaatttattagttggtaaaacacggaaggaagcatctcggatgttttttgaaactctggttctcaagaccagggattatgtccatgtagaacagacaaaaccctttgcaaatgtcagcataaaacctcgaatgaagcttatgcagtcagatttctgaaacctcatgtaggaatgacagatatagttgtaaagatccattcggtggtagtttggctggtatctgcagggttgggataatattttcaacatttctccccgattctagccatatatggcttttcatttataattttttggagatagggtttagctgttcagttttagtttttgaagtggcacttgtataataatcatcctattgattattctgggtcttaatgtatatatttttgtaaaatgtcacaatctgtaagttgcagaggctaatttgtatgtcgtttaaacgcatccctcctagtaagaatgacattctgctttctctaggcatcatatttatgtaacagaaagcaccttgtaatttaactgtcagtggacaaggtacatcatttctgtacttttatttgtatagtatctaactgcatttatccttttaagtcgtaaatagttttccaataaatgccgactgccccagggtaaacgctgggatgattatggtacaagaaaaaaaaaaaaaa

SEQ ID NO: 24774 - DNA, 878 bp, Glycine max
  Clone ID: PAT_MRT3847_122374C.1
aaaggggaaatacagtgagatactatacaaataaaagtgcagaaatgatgtaccttgtccccgaacagttaaattacaaggtgctttctgttacataaatctgatgcctagagaaagcagaacattcttacatggagggatgcgtttaaacaacataccagtacaaattagcatctgtcagttacaaattatgacattttacaaaaatatatacattaggacccagaataatcaataggatggtacaagtgcccacttcaaccccccggccattgaagaactaaaactgaacagctaaatcctatctccaaaaaattataaatgaaaagccacagctagaatcggggagaaaatgttgaaaatattatcccaaccctgcagattccagccaaagtgccaaactaccaccgaatggatctttacaactatatctgccactcctacatgaggtttcagaaatctgacttcataagcttcattcgaggttttatgctaacattggcaaagggttttgtctgttctacatggacataatcccttgtcttgagaaccagagtttcaaaaaacatccgagatgcttccttccgtgttttaccaactaataaattgttaagatgcaactcctttcttccatgtgtaaaacacagtctgatggccagccggcatgatggaaaagcaacaggtactcttcacaacatatcagacagcaaaattgcataagcaagttgcttcacacatacattactgactaagtagtatcccggcgcaaacttatggccgattaagtgactaaagttgttggagctccatcaaacgtgatttgctataccctgttcggctcgatcaatttgactttcactctagaattcgttttctga

SEQ ID NO: 24775 - DNA, 412 bp, Glycine max
  Clone ID: PAT_MRT3847_122375C.1
cagtaaagaaacacatagattataaacaaaacaagtcaatatccttgagtttacgtcaatatcccagaggttactaatgtaaagatggccaacaaggaactgtttgcaactggtcaaatgtaaactatttaaataaaagtttacaggggggggaacaccttgtgcaggaggataagttttcaatcatttcaagcttctccccttcgtttgaactagtgttagtgcaaattgtcatggtctgcaaatgacttgcattctgcataatatatcttgcaaattgaaactcaccttttgagcccacataattggtaagacggcatgttttaaggtgtaatgaaacgcacgtgggaatagactgtgggtatgaccaatctgctccctcgttagcatgtagtcctagttccttcttatc

SEQ ID NO: 24776 - DNA, 284 bp, Glycine max
  Clone ID: PAT_MRT3847_122376C.1
ggacacccaaattatatttttcaaagcctttataaggggatcaaagggacccacataccaaccttactatatctatatctatattacattccaacttatgccattcattaatattttttcttcgattattttaaggttttttataacctggttaaagggcttggaaaatggggctttttttcaaaagtggacccaccaccccccaattggacttttattaagattaggggttttaatttttccaattccattaagtttatttttatggtttggaagcaaatttt

SEQ ID NO: 24777 - DNA, 628 bp, Glycine max
  unsure (1)..(628): unsure at all n locations
  Clone ID: PAT_MRT3847_122377C.1
gaaattagggctttccccattcccaattcttcttcttctacgccttgttcttacttggaaatgtcgtggtttgaaggttcttcatctggtgacattaaggaaatcgttcggtggtcgtggtgtgagcggcgacggtgcgaacaacagtggtgtcagtgatagagctccactgtcgcctgtttgcaattgaaagcagttggtggttgtgcaaacaacgttcacaacagcctcgggagaagattttggggttgtcctaactacagggtgagggttttattgaaagtgttgtgttgatccctatttttttatggccatggttgatttgtatttgtgtttttgtttgagaaacaacgtgggagtgcgagtggctgcaacttctttcaatggtgtccaaatgacattaatgacaaagatcttgttattgccagacagaggaggaagattaacaaccttgaaagttcattgaaggcaaaggaaaaatggctgaaaattttcattgtaatttgttgtgttctgttagtcatgattgntatactcatttgactaaacatggttgtcaaaggagttatccatggaaaggattatgtatctgtaatagagttcctttttacattgtaaaaaaaaaaan

SEQ ID NO: 24778 - DNA, 683 bp, Glycine max
  Clone ID: PAT_MRT3847_122378C.1
gaaaaattgtgatcctaagtgaggaaatacagagacagaggagaaccctttaaatcaaacagaaggggggaaaaatcagcaggagaaagtgcaagggacttctgataaggaagatgattctggtgttgataatgctgattccttggaacaaattaaaactaaatctaatgctgaacacatggacaagagacagagaaagaaatcaaacagcaaacagacttcaacctcaaagagcatatcaagtatgctaacaaaagatcaagttcttgatagcaagaagccatcaccatcttctggcagtggaacacatggcaaaccttcagttgcagtgacaaagaagagtaaatctacaagcacgaagtccactaacaaatcaagcaaaacaaatttggaactggtggaagactctgttagacttgaactttctgattctcggtttaattctgggggtaaagatgctgcccagcattcaacatgctctcctggagagaaagatgatgataacttggaagcaatatatggacatactcatgctgaggatgtaagctcctcacagcaattatcatcaaaggaaaagcttgatgtaaggagtgaccttggtaagaaggttccaaatgtacacaggactggacaagattcaaaattgtctggtagatctgacagggctgtgtccttaattggag

SEQ ID NO: 24779 - DNA, 408 bp, Glycine max
  Clone ID: PAT_MRT3847_122379C.1
cgggccgggccggaaaacccggggtgacccacgcgaccgccgggtgagggcggacgcgagggcggacgcgggggggggattttataagcaggacggccggaagggcccaggaccccaccaaagctgaagaggacggcctcaagcggaccaaacgagaaactgggggaaggacagggcggaggcacccccaaaaccagcgccgacgaagacgcgcaccgccaacgcggggcaacccacggcgccgaaggtctacgcggagaccgccgagccagggaacgaggacaaccccgacatcccgagcgaccaaccgcacgggtacggaaggagggaaccaacagcgtggaaaccaggccagaagaacgctagtcagagggaagctgaccggcaccacgaaaccgcgaaaagcac

SEQ ID NO: 24780 - DNA, 136 bp, Glycine max
  Clone ID: PAT_MRT3847_12237C.1
atcatgtggttgaagaagctggttcctcaggatcatcctctgacagtcagagattgacaaagacagtttcaccatcagtttcttccaaaaaatttggttccctttctgattggattccaggccaggctccatttca

SEQ ID NO: 24781 - DNA, 627 bp, Glycine max
  unsure (1)..(627): unsure at all n locations
  Clone ID: PAT_MRT3847_122380C.1
caggatttctcactcacaaattaaggtttaatgcaaaggatgatgatgccggcttgaaaagtgattctgtctctgcaaagaaaaaatcactgactttctcatcatcttttcattcaagatttcaacaccttgactctcagtcatcagtgaagaaattgtcagatactggtaaagagtcatccgaaactactgtggtagagactacatttggatcttcagtgaaacataacattgatactggatctcagtttaagactccaattaccttgccagcgaaacgtaaattatctgatttgaaggatatatcaatgttttcatcgtctggaaaacgattaaacgttggagatcaaggatttcgttctcctatttgttcaagtgtaattcgtaaaagctgcctgcagagtgatgctgttgggcttttctcaccaacctgtaacctgaaacagagccgttgtatgggtgacttggtggatgagaaccatagtatttcaaatctagttcagatgacaccatcttctcaagtattaaatgaccttcagcccatacatgctgagcagtgtacattagattctttggtgggtcaatatttgaagcatcagcatncgccatgccccagctctattacac

SEQ ID NO: 24782 - DNA, 472 bp, Glycine max
  Clone ID: PAT_MRT3847_122381C.1
ctgcttgggggcggggggggaggggtaggggttttgggggacgacgtacgccgcccaactgccgtcacccgcgcctgcagaaacataattgtcgaaataaccttactcaggttattattcagcacacctttcctttacgacagttacgccggccgttaccgttactgtatcatactacctttaaagcgtatactccccggtagccttctgttacacaaccttttatttaataaaagcggactcttcataagcaaattaagcctcagcccactaagaaggtttaaaggatttggtggccccgtaagcctacggctcgacattcgcggtattacattcaagcgtagtatcagtgttaatattaacctcggcttaatggtaatgttactccacacgttcaagctgccaatacgccagctccgcatcaagcttagcaacacccaactcatcagccacttcagcactgccctcagca

SEQ ID NO: 24783 - DNA, 267 bp, Glycine max
  unsure (1)..(267): unsure at all n locations
  Clone ID: PAT_MRT3847_122382C.1
gntgcttaagaatatttcagtgtcttttaggaacattgtcaacttatacgtagagacaagtggtagcattgtgcttttaacctgtgatttcttgtcccaaatacagaaaacattacaggtttttggtggaactctacttagtttggatgttatgacttcatacattagtattaacgtccatgatttgtttttatttcgtcagcactatgtacattagaaactctaaatatttctctcggttaatgtccctacttgccagattaacaa

SEQ ID NO: 24784 - DNA, 235 bp, Glycine max
  Clone ID: PAT_MRT3847_122383C.1
cccacgcgtccgcgaacagcatcttttccttctcagccatttacaggtctagttgaagctaggaatctaaagatggagatgtaaaccagatcgatcatccattataatttgttggtggattaggtcactcggagtgcctttgtcatgattttttcttttttcttttttcgagtacataacatatattggttgtatactgctccgtagaataaataagatcatattaatacctgtt

SEQ ID NO: 24785 - DNA, 318 bp, Glycine max
  Clone ID: PAT_MRT3847_122384C.1
ggctcgagattttagtttcaaaaaaattaattaactcaagcatgctcaaagccattgccatggggggggccaatgaatatttttctttcccacaaaaaattcatccacggacctttctctgcgttagttctcacctgttcttatacaaaatagtctaaactatcccagaaatatggccctggatgttgcttgctaaaagtggcatacggctgcactttaaatgaaaacacgtgccgttattcaaaagagtgcatcctgctgggcgtatcggttacagctcccaaatctacttgccttagtccctttgcctccttttcc

SEQ ID NO: 24786 - DNA, 116 bp, Glycine max
  Clone ID: PAT_MRT3847_122385C.1
ggcagctgtcgttatacactggagttactgttgttggtcttttaaatgcgtcaattggggatggaggctatctgatcatatgaatataatgcactgaaaagaggaattacacgcgt

SEQ ID NO: 24787 - DNA, 350 bp, Glycine max
  Clone ID: PAT_MRT3847_122386C.1
atgtattacgctgtcaggaacacattgaggtgatggcacacatatcagatatgaagaagattcatttgcgggtagaattgaaattgacggaacattttcagaatgccaatacaagtgagtcttaccggaaacgagggtcatgtttgccctacttctaaattggaaaacaggactacttaacggccattgttcaagtaatgtgcaatgctgcaaacaaatcaacgaatgaatagagaatgcacgtgggtccatggaggaagagcagcttcactgcacatgaagtggtcaagattcaatcaaagatgcaattctaatacatccttgggtacaattgcgacatagccccatgc

SEQ ID NO: 24788 - DNA, 183 bp, Glycine max
  Clone ID: PAT_MRT3847_122387C.1
gtatggtttgacatatgcattaattgccaagcatgtaaacaaaaaagtaacaattagttactttctaacatacataaaaggaagatgggacttaacctagttaagtaactatatacacacctcagattcaaattgacataacttgggcaaatctgaacctaaatctttgaaaacatacaaaac

SEQ ID NO: 24789 - DNA, 310 bp, Glycine max
  unsure (1)..(310): unsure at all n locations
  Clone ID: PAT_MRT3847_122388C.1
aacaatacgatttattaaatttgacataaatgaanatttttgagcaaaactcattaaagagatataatccccccactctcgaggtgagttttcacttgaagtaaaaataccgagcatttttatactcaacctatcgaaaccactcactactaaaaatcgtgttttttacatatatcaaaaatgggattcaacaacatttactaaccgttgttgtatgtaacattttttaaactacaaattttcaacaacattccataatttacccgttgtaaaattacatttatttctacatctgtgcctacccccacac

SEQ ID NO: 24790 - DNA, 448 bp, Glycine max
  Clone ID: PAT_MRT3847_122389C.1
gcctgtcctttttttttttttttttttttttttgagagcaagtgggatcctatttgagcggggggattctgtatatgtaccaagaaaactatttcactccatattatacaagaagcattggatgtacatgatattcttaaaaaaaattggggatatgggccgttctccgagactcatagctagagatagattttgacccaatcccctcccactaacatgagaccgatgtccccgggaaggaatatggttggcttccttaaaccatctttacaatttgagccctgctttgagtgggctcatgtgacagtccgcgtgggttgaaccgaatcaatcacggggactaatcgggtgaatttcaataaaggacagggctgtttatattggggcttgcccttgtggcatgttaagagccatgtatagccctaagtccgggcactggtttcaaaaa

SEQ ID NO: 24791 - DNA, 397 bp, Glycine max
  unsure (1)..(397): unsure at all n locations
  Clone ID: PAT_MRT3847_12238C.1
tcgcggacgcgngggaccggaaaaaggaatcgcaacttaagcacaaaatgccagaggacaaacacccaaaaacgaaaaaaaaggggcaggcccacacaacgcagaagaaccaccggaaaaagaagagcaagaaaaacccaaaaagaccgaggcccgaacgagacaaagaacagagccccaaaacaaagaggcccaagcccaaaaggaaacaaaaccgcacaaaacgccacgcgaagacgcagaaacacccaaaggcaccaggaaggaacccaaaaacccacaaccaaaaagggcaccaaccaaaaacacagccggaggaaccaaccagcgcagagaccaaccggcaacaccaacgacagagggcaacaccagagcaagnggagaccagcagcgcacc

SEQ ID NO: 24792 - DNA, 759 bp, Glycine max
  unsure (1)..(759): unsure at all n locations
  Clone ID: PAT_MRT3847_122390C.1
aaaggaagagctgttatgattagtgcaattgagaagcagaaattggtatatatcttgaacagagacgctgcagcccgacttaccatttcctctcccctggaggcccacaaagcgaacactctggtgtatcacgtggttggcgtagacgtgggatttgagaatcctatgtttgcttgtctggaaatggattatgaggaggcagacaatgatccaacaggggaagcagcagccaatacccagcagacacttactttctatgaactggaccttggcttaaatcatgtggttcggaaatacagtgaacccttggaggaacatggcaacttccttattacagttcctggagggtcagatggtccaagtggagtgctaatctgctctgagaattatatcacctacaagaactttggtgaccagccagacatccgatgtccaattcccaggagacggaatgacctggatgaccctgaacgaggaatgatttttgtttgctctgccacccataagaccaagtccatgttcttctttctggcccaaacggagcagggagatatctttaagatcactttagagacagatgaagatatggtaaccgagatccgcctcaagtattttgatactgtgcctgttgctgctgctatngtgtgtgcttaaaacaggcttcctttntgtggcgtcagaatttggaaatcattacttgtatcaaattgcccatctcggagatgatgatgaagaacctgagttttcgtctgccatgcc

SEQ ID NO: 24793 - DNA, 295 bp, Glycine max
  Clone ID: PAT_MRT3847_122391C.1
gaatctgtataatagaatttccaacagtatatcatccttgtgaaacctgtcacagatctaagaagaaaatcctgaccttcttctcacgtcaaaggctcatgacgatcatgggtttgtcatggactttggcattggcctggaaagtctgtgacccttggatcacatatctttggtctctaatcccaagcctccttttctctatttaagtatctctgatcaacctttttcgccattctgtgcttttacatatgatgaagatctgaggcaatacatgattccctcatcatgtaataca

SEQ ID NO: 24794 - DNA, 303 bp, Glycine max
  unsure (1)..(303): unsure at all n locations
  Clone ID: PAT_MRT3847_122392C.1
angagctgttttntnngnnagctcggaatangntcgagannncataggtctaanacntcantnttangcttcttnnatnantcagnaggannnccangtcngngatgntttgncaatgcccntgnactngntnatntnnntaaattcgagcannncatnttcantgttcagggtccgagcaagaanattccntanaganaagntnntnatgctcgntngnaangggngcatnanacagnanangtagggnngnganaaanngatnatgannngnnnagattnntggtgatcgnanagagtncc

SEQ ID NO: 24795 - DNA, 912 bp, Glycine max
  unsure (1)..(912): unsure at all n locations
  Clone ID: PAT_MRT3847_122393C.1
tttttggtttttttttttttttttttagggttgatgttcagatttgagatatatgatgtgttgacatctgttaatgttcaaaatgtcagaataggctatagtatgctatctgatgctgaagagattggagcaatttctcctgggaaggtacatcatgaatattttctgtgtatagatcaaatgcaatctttgctattccatatatctttaaacttactgtaatgttatgtaatagtttgtacaaaattgaggcattgaatcttggattttccttacattcctgatcctgtatttgtgcgaatggcgctatcttcattttcattaccgtgtttgtgttattgcacttcaacgctggttcccttcaatctcactcggctccaactggttagcctcaaaccctatactcgttctcaatctcagcacaccgccgctaaagctaaagtttcttctgctccgttagtgtactccaccagacaagggtttgacaccgtcaacattgccgaagatgtcacccagttgattggaaatacaccaatggtgtaccctcaataaggttacagaaggttgtgtggctaacattgctgcgaaactcgagtctatggaaccttgccgaagtgtcaaggatagaataggctatagtatgctatctgatgctgaagagattggagcaatttctcctgggaagaccattttggttgaaccaacaactggaaatacaggacttggcattgcttttgttgcagcaacaaaggggtacaaacttatagtcacaatgcctgcttctattaatgttgagagaagaatccttttacgtgcatttggtgcagaggttgttctgactgatgctgagaaagggctaaaagggggcagttgacaaagctgaagaaattgntcgcaacacacccaatgcgt

SEQ ID NO: 24796 - DNA, 1178 bp, Glycine max
  Clone ID: PAT_MRT3847_122394C.1
ggcacaaaattatgtaaaaattcacagggtatacccagcccaagtcccattgcaacataactttcaaacaagctaggaacttgccccaaatacacgctcaaaatataacaacaccattgcccatttcttattttcaagccaaacggtggtaaccaactatatttcagacattccaagagagattctgatgccaggacttagtttttatatatttatattatataaataacaataataattcctgaccatgctcgcaactcacagcatgtaatgtgagatttagtgagagaagtagtcccatgattaaaggcacaaaattatgtaaaaatttatagggtataccctgcccaagtcccattgcaacataactttttaaataagctaggaacttgccccaaatacacggattctctgttggatttgaaccctgcagcaaggacaaatagccttaccttttctttcatactcatcactggaactaccacacataacctcgtattgctagactcggctgattccttacagtgtcgttcctcctccacacatgctatgctttcctctttagcctttatttcttccttccactctacagattatccaattcttgaagcagcctagcaatggtctctctttggggctttgcacccttccagtcacttgtaggtgaagtgcttgattggttatgcaactcggcagactgagcagatgctttaagccgagaaagctcctgctcaagtcttagtagatcatctttgtggcgctggaaatctatctctatcttcagacgcaaagtctcgagcttcctcttattgttagactcggctgcttccttagagtgtcgttcctcctcaactagtgctagggcttcctctttagccttcatctcctccttccactttacctcagcttccttttgacattgtctaatctgaaccaatatttcttttgtcctcttctctcgtcttttcatcagaaatctcttgctgcagcttagctttctgtttttcccaagctagaagttttttcaagcattttttctccctttttgcaacttctaagcaagctgtcaccgattctgatgcacttaatttggaagcctccatctctgctttcatttctgcattctcagtttctagtctcctcacagctgcattcccaaggtccagttgaccactggc

SEQ ID NO: 24797 - DNA, 442 bp, Glycine max
  Clone ID: PAT_MRT3847_122395C.1
aacgactacatatcccaggtctcacattaataggaaagattacaaatatagagatggtggattgaggttctagcataacctaatagccatggttatcttgactagctaaggtacccttaaaagaactctagtacaaaaattatgtgggtctgttagctgaattaccagttaaaagggccaccatttagcttaaagaatggttcgagacataaactcgagacttcaccaccatctttccattttgaaaccctggcatgatcatgaactgaactttatatgtcactctttcttcatctgaaaggattggactctccttttcttcctcaacaaagtccatgtacaagctggaaaacacactttctctgctcaccgaaaacaagggtgcttcaggatctattggcacagcagatcccagtaaaaccccaacccattttggcatttt

SEQ ID NO: 24798 - DNA, 348 bp, Glycine max
  unsure (1)..(348): unsure at all n locations
  Clone ID: PAT_MRT3847_122396C.1
agctggaatcggtcgagctcagccgctcagccggcagcctaggcacattagtacaagctcttaggcgcacagttgataaccattgatgttttatacaatgtcactccgaatgagtcaactccaaaagatcctatatgactatccagagaggagtcagatagactcttgcgaatgtgaacactatctagggctacaggtaacagaccctacatctccagtggtctagagaggatgaagacctctatcagcatgagtgagctgccatactatccaagagctggctgattgcagnctgacaagatagatggaagaatgaaagaaggattgcgatgcatatagtgtgacatt

SEQ ID NO: 24799 - DNA, 199 bp, Glycine max
  unsure (1)..(199): unsure at all n locations
  Clone ID: PAT_MRT3847_122397C.1
ggncgcaaacagcgacctttaaagatcgaaactaccggacaaacccgtggctcgtggggtatacattaagacgagaatggtactttgattaatggattgaataatttgatttcgccttaaacaaaattaacgttatggaaacttttcactctccctacctgttccttttttttttataggcctgggctaaaaattcttg

SEQ ID NO: 24800 - DNA, 285 bp, Glycine max
  Clone ID: PAT_MRT3847_122398C.1
aggcacaagtgagtttgttgatcgagataactagaaacagtgtgatgaaaatgaaggtccttgttttcttcgtggcgacgattttggtagcgtgggaatgcgatgcgtacgatgtgttccctctccgaatgaacactggctagggtgcccgtactccggaggtgaaatgcgcaagttgggggcttgcggtggaagcacacagcatctttggctttgagaccagtcctggagagtggcttgaagcaggaaaggaagacatccatggggaacaatatagatcaggct

SEQ ID NO: 24801 - DNA, 868 bp, Glycine max
  Clone ID: PAT_MRT3847_122399C.1
gacccctcttccgcgagaacagaacagcctcagaaaaccctaaacccctccaacccattcccacattgtactaccctgttagttagtcaagtagcttcactcactctttctatttgcagaatgccaaatccaaatccaaagcccctttgctaggccactttacccatatccgatgcttttcaaggcgctgccttaatccacgatcgagcaatgctccacttccgatccctgcaacaaaatgtcggggaagagaaagaggaagttgaaattgttaagcgatgcaatcacagaggaagagaagccagcagaagagaaatcagaggagaaaactgaagaagtgaaagaagaagcagaggagcctaaagaaactattgaaacagaatcagcagcagcagcaccaccagcaaccacagaggaagagaacaaaccagctgagtcagttgaaaccccagtagaggttcctgttgagaagactgaagcttagacctatggacagtgtgagtgagaaaaacaagtttaaaaatggtcctagttgtggggatcaggtctaccattttgcatgccatgttgaaaagcctcttttttttttttctttttatttctttagtttactttattaatattattatatgatgcttaagtctttggttgtattatggagggtacacctacgtgtaagcacaacacttggctccacatcagcgtgcttgccacgtggtgacatgagaaattctgggagttgtgtattgaagtgagcaagctgctggtgctggagtttaggggtgatggtttattggcagggttacatgagtttgtgatggtgtgttactgtgtttctttaggtttgaataaatgatatttactttat

SEQ ID NO: 24802 - DNA, 353 bp, Glycine max
  unsure (1)..(353): unsure at all n locations
  Clone ID: PAT_MRT3847_12239C.1
cggtcttgaattcccgggggnttcccggnnaacccacgcgtcgattcgatgcgcaagaagaaaacccttctaccgttcaagagcaaatcttggagaccctactggtagaccatcactctcgaagcagagtcagatccataacatgtaaggccaaaattcagacaggaaggatcccaccagatcagcacggctcattttgtggcaagcagcttgaggatggacgtacccttgctgattatacatccaaaaggagtcactctccactggtcttcgtctcgggtgggatgcaaatctttgtaagaccttgcggnaaagacaatacccttgagtcgagagctcgacacattgcaacg

SEQ ID NO: 24803 - DNA, 294 bp, Glycine max
  Clone ID: PAT_MRT3847_1223C.1
gcgacacatgagatactggccgcgcatacttaaaaagctcgtgggcctctaactgatgctacagacattagtttattcaagatacggatgctatacatagtggccaaactgagagagacgacctcatcaagcccagactccgactcgaattgatcgtattcaacgaatatgtgccatattgcgcaagttgcccgatgcttcacgatctatcacacgcatgtattaatggtctgatcacaaatattgatcatctagacccatatggaagacttcgcctatctacttacggcttat

SEQ ID NO: 24804 - DNA, 402 bp, Glycine max
  Clone ID: PAT_MRT3847_122400C.1
cccacgcgtccgattttcatctgagtatatttaagaattgattggtattttttgtccacttgctcagtttcttatatgttatacatgatgtaactccttttgcaggttgttgtaacttttcaaagatcatgttgcagcagatctctaactttgtgcagcataataataagctcatgtatatttaattaaaaattataatcaacaaagtgtaattaggaactagttttattattattattatgacatttacctacagaagaccgtaggtacaagtaaattgacttttacctacagttagagattataggtataaattaatatcttttacctacacatttgaaatagtaggtgttacctatagttatttgtaaatatttttgttgaaccaaagacagtttcttc

SEQ ID NO: 24805 - DNA, 554 bp, Glycine max
  Clone ID: PAT_MRT3847_122401C.1
tcgatctatcgctaggaatgtgccagagtaccgtgcacgagtgaaacaacatcgaaattgggccccaatgtgcgaggcaggatatcttaggcaagtgtgaaggtcaaggtgagtctacatttggggtcgggcgttgtgtaaacgggtcggtggggcctttccaaggcagagaggtacgctaaaaggggtgggggcttgcagaagagagcgaaatacgagagctatagatagctttgaggggccgcgggcggggaccgcgcttaagccaccctaaaagtggccaggtgtccaagtacctctagcggcgccaaaagggagtgctaacccgggtgacggctgtttggcctcataacagagttgaggttcaggtgttgtgccagcagcaccgccggccgagcaccaacaaggtgcggatgaaacacgaggcgcaggtgggggttatgcagactatgcaaccctaggcgagaaaggtggtgacaggagagttgcaaggattgcaaaaataaagccaaaacaagaatcaccatagccacgtggtactgaagtggtacaac

SEQ ID NO: 24806 - DNA, 355 bp, Glycine max
  Clone ID: PAT_MRT3847_122402C.1
ggtgcactgtctcatctaccgcaagcggcacagctattccacctagtccaaccaacacatggttgttaatacctttggtgggaaactcgtttgtcagactaccaagaagagggccagctgactcacgtgcactgtcactggcaataggatgcaggggattccacacttgaggcttgctgagtacaacaggtctaggttacccagaaaccgtaagactgtcatccgcgcatatggtggagtgttatcgtggagttgcggcagggagaggattatccgagcctatttagatgaggagcaagagattgcgaagatggtctaggagattcagtaggcaaaggatatgcaggagtctagg

SEQ ID NO: 24807 - DNA, 336 bp, Glycine max
  Clone ID: PAT_MRT3847_122403C.1
aactgcagctagaagacaacaggagggcccagggtgctgaggacggcataaaggtactgtagcgaaagaacaacttataggcacgtattatcatccatacaacagaatacataaaccttatacaggtgatagaatgttgcacaagggggaagagagagagagaatgtgaggcacaatgaataactgcgatgggtgagagattgcgtgggataaacactagacgactctaggtcgtaagtgagtgttttagacataaaagtaatcacacatgtaagtgaagatctaaccaacagcacatagaagtgataagaatcaactgatcagtgaacgggattt

SEQ ID NO: 24808 - DNA, 322 bp, Glycine max
  unsure (1)..(322): unsure at all n locations
  Clone ID: PAT_MRT3847_122404C.1
acctttncngcgtacgtaagctcggagttcggcncnagatcgatgtatgcnnganncanncncnccacngtgtatcatannatccnactgncnatacatcatanatncncncaccaatatgcagcngaatcntgcttcaccagaancncattaaaggagcanttcaaangagccaaagatcaggctggctcatttcangggnactgtttcatggtgatganaatgangaagcnnttgancctgnngaggatcgngctntactggggcanncacgcntggctgtanggaagagcagngaannacaaattcaggaagcaatggg

SEQ ID NO: 24809 - DNA, 355 bp, Glycine max
  Clone ID: PAT_MRT3847_122405C.1
atcatatatatatatatatatatatatatatatatatatatatatattaagggaattaaattttataataactataggcatggcaaaaaagatttctgaatttttggaaaaaaaattaaacttacaggacatgggtattaaacccctattttttttactaagatttaggcgcatggggggggcaattaacaaggggggggggtcccctcacaaaatggtaaagggaagaaaaaaaaaatcggggggggggatggggctacaaaatttacttttccctctggcgggttcctttcttttttgagggggtatgcagccccaatttggcttttggaccgacttgatcctctttggcctt

SEQ ID NO: 24810 - DNA, 459 bp, Glycine max
  Clone ID: PAT_MRT3847_122406C.1
gaggatatccccctccccttagctttttcccttttaatttttgcaaattcattctgacttaagacttgctaagaccataattgtaactcaaattttgaaccttaattttccttaaaacaagtgtattagaagcagtaataagagaaattagatagtatcaacgcataggaactcatgctttttcctaaaagtaattagtcaatcatcaatcatataatacattttggcctaattagttgatatatcgatatagaatattggtgggaaagagaaaggaagaggggaagagagaatagtaacaggagagagagagagagagagataaagagagatcaaagagttgtgcactgcacttgttattgtttcagtctgtctaaaatgtacaacaccaatgcttatttataggcagaacccaacagcttctagttatgaaatcttaactaacaatagctgcctaac

SEQ ID NO: 24811 - DNA, 374 bp, Glycine max
  Clone ID: PAT_MRT3847_122407C.1
actccaaaaggatccctccgggaaatccaattccacaatttcaagaaataaaggaggcaaaatgttcaaaaaagaaattggaataattggtttcctaataaggccaacccgaaacccaagggaatgagattcggaattccccgggaaattcaaattcacaatttcaagaaataatggggcaaaaatgttcataaaataattgggattatttggtttcctattaggcctatcctgaaaccaaaggaaatgagatcggaattccccggggaattccaattccacattttcaagaaataaggaggcaaaaatgttcacatatgaattggcattatttgttttcctattacgcctatcctgaagccaaaggaaatgag

SEQ ID NO: 24812 - DNA, 168 bp, Glycine max
  Clone ID: PAT_MRT3847_122408C.1
acaggatctattatgttcttgtgaaactatgcaccttgatgtattgtgtgctttgcgggtggagggaccataatcattaaatgtgattcaaaacagtagaggatatattataccgttatgttatgtgccaaccaatattcctaattttggacaaaggttttttttttg

SEQ ID NO: 24813 - DNA, 350 bp, Glycine max
  Clone ID: PAT_MRT3847_122409C.1
tgacaacaaaagcatgcatcttttttttttatcagtacaaaagtatgcctcttaccaccctactgtttttttcaggaaaaaataataataattgttaatttgtggagcatcatctttgtcctaaagtaaaaggctaatgctggttcgggctttcatgatgtctgaaataaaagacacctttgaggtgaaaaaggatggtgtggtacgataccccttgtaaaatcaaagccaccttttgccgtgaaaagaaatgccggcacaataccctttgtaaaatcaaagccatctttgctgctacatcttttctcttctttggcatatatctgcattcaaattattcggacgcgtgg

SEQ ID NO: 24814 - DNA, 375 bp, Glycine max
  Clone ID: PAT_MRT3847_12240C.1
cgaccgcactcgtacgattttatctgctaacaaccagtccttcccctaaccctaacttgtaaccttctcccttgaggtacattcttaccgagggcaatctcacattattcagctcatattactcataccgagtttctacactttcatttataagatccacttatattaaccattctaccaacattcaggtgttgagttgtatgcttcctaatataaatgtacgccaaacatttcattcatctggtctatgagaagaacaacataattattaaaagaaaggaagctcctctaaaatatgaacataaactagaaaccactcctgaaactaaagagaggaatctgaaatgctcaaagcataaaaaaagatctgtctct

SEQ ID NO: 24815 - DNA, 468 bp, Glycine max
  Clone ID: PAT_MRT3847_122410C.1
ggatttctcgcagaggatcctaagcaaattttagaaaaataaatttttcgcatgttttgaagtgaaaagaaaacgtaatgggttgtgcagtgaaaagaaagtatatttaagaaagaaatgaaaagtaataaatgttgtagcttttgatcttgagaatttaaaaagtgttaatgatgcaaataaaaatgttggatcttgtcaaatggcattgtcataatccacatggcaaaaggtccattctggccaattcctcttatatataatatagattagtacatagacaagttacatacttacatgtcaatatacgtgtgcaaacacttgggagtaatcttcaactaattaactgtgcacagctgcacaagcagttccatccaagtatacttggagtaatcttcagctaattaactggtgcatacaaattttctctgcagttggtttggtttatattgctgatattggagtttg

SEQ ID NO: 24816 - DNA, 487 bp, Glycine max
  Clone ID: PAT_MRT3847_122411C.1
gatgaaaaaaatgaaagaaaaagaacaaaacacttcactccccccccccccctctctccatttccatttcttctttcttcagcttcttcttcttcttcttcttattctgtttgttcgctatagggttttctcgattccgattgcaatccctcttgtgttccttttgcaattccttcacccttacgcacggaacccagctcctcctccgcgcgtgatctgaagccaaattagggtttccgcatgagtcctcctccaactgaatccaacgccatggaagacggcaagcccatgaatggcagcgaccaagccgggtcttgcttcgtcgagttctgcacgaatgggctagcattggaagagaaaagctgtcaagaagcatagaatctgtttggtgaaaccaagcatattctactgtcaaaattttcgccaatggggatggaatgtatagaagaacttattcctttgggttaacgatatcttatgaaatttt

SEQ ID NO: 24817 - DNA, 367 bp, Glycine max
  Clone ID: PAT_MRT3847_122412C.1
gcaaaccccaaacacaaagggttcgccaaatgagttgccacctgctagtgctcagaatgctgaggagggttctgaagacacatcaaagcctatttttactcctctgcattgcaacaaagagaaggccatctctgatcgagagatggtgtgggatcagtcgaggaccagttctctcaagtggaatgacgaaatgattgaaaactggaatgtagtgaacacgccgaatgcgacacctaatgatactactccacgctctgttcttgcgccacaaaaccagcaggatagggtataggatcctaaaaagccctgaaaccttgctatctcgcaaagagcacttcatgtgcctatagaacaagggcgagaggcc

SEQ ID NO: 24818 - DNA, 414 bp, Glycine max
  unsure (1)..(414): unsure at all n locations
  Clone ID: PAT_MRT3847_122413C.1
ctcgagccgaatcggctcgagtacggctgttagaagactacagagagggctagcgtacgggttagtatcgggtaatctcacgtgatgcgatgagttacaagttcaatatttgtcaatagaaacatattgatgtagtgtgcctgatggagcctcgtgtacaatagtctttattgaacatcttccttgattatctatatagaaaaatcactttattgaactctctattatgcatatgaggtgtcaagcgcttgtgaatggggctagataacaaacggagtacttttgtcaatatagtgttcgcggataaaagaatactttttatgaangttcttgtgtatcatatgggggctcttgaaaaaaaaatgatgaaattgattgagttaccgacaagggtgacattaccgaggcttattt

SEQ ID NO: 24819 - DNA, 116 bp, Glycine max
  unsure (1)..(116): unsure at all n locations
  Clone ID: PAT_MRT3847_122414C.1
ataccatcttagaatttaagtttagatctaattaaggacctttggagtgtgcttctctactgtaaagaagctctcaaaagntatntnttntnnaacattgggtatccaaacnaaac

SEQ ID NO: 24820 - DNA, 262 bp, Glycine max
  Clone ID: PAT_MRT3847_122415C.1
tcctgatttagagagtaggactcagatattcaaaatacacacgagaacctttaactgtgaaaggaatatccgtttagaacttttagctcggctttgtcaaaattctaccggagccgatataacgatgcgctgcactgacgttggtgtgtatgctatcccagccacactgaacaccgtgacacataaagatttccttgacacatctgataaagtcatctaaggataccataagctcactgcaactttcacgtatatgcgttat

SEQ ID NO: 24821 - DNA, 247 bp, Glycine max
  Clone ID: PAT_MRT3847_122416C.1
tcgagcaaatactaattaccaaacaaactggtccatactgatttatttttatcacatattacttatattaaaagctgtgcactagtaaataagaggggctgggctataacacttaatcttacaagaccctttccaattataatctcttttattaagggaccaaccatcattgaaaacctaacacattaatttttctacataattataaaattacctctttatgtttttgaatgaattacttattaac

SEQ ID NO: 24822 - DNA, 384 bp, Glycine max
  Clone ID: PAT_MRT3847_122417C.1
gatcaacgaaaatgaaaaaaagagaaaacaaaagtgtaagaaagagagtgaatagagaagatggaggtggagcgttcttcgccgtgcaactgcgtggagcttctcgacgatggtcgccacgaccaggccattcgcctccaagagtacttgtctgatccacaaactcttctccaactcaaaaacgattccgaacacaagctgtccatcaccgattaccaacttcgtctcgccaaactcaaatctcaactctacgttgcttctgctggttccttccttcttaatcatgcaaataatttaatgataaattgattgataaactttacaacttaatcatgtaatcaatttgtaccttttagtttagatatcaatttgtcagatcatcac

SEQ ID NO: 24823 - DNA, 475 bp, Glycine max
  Clone ID: PAT_MRT3847_122418C.1
ttttttttttttggggaagagtttgatattcaaaaattagtttacatttttgaatattccgaattttggtggggaattagtttttgaagataaaattattctatagcttgcttttctaattttataatactgaaacataaaatttgactaataacttaaaatggttaattttaggttgaactataataaaaaaaatttaataagaaacttctattttttttactagctattaaaacgagctaatgaaaacttatatacttgccaacattcatgataagtaaataataattataaaagtagttatcaaaaatataaaaaaaaactataaaaatgtacttttgtacttgccatccgaaaacacaaaattctctacccctaaataaggataaaaataagttaggtcacttcacaagaatctatgtcttactctacatcatgtttagggtaagtgagccttttttcaaaaaataaatta

SEQ ID NO: 24824 - DNA, 264 bp, Glycine max
  Clone ID: PAT_MRT3847_122419C.1
acaaaattaattgttgggacccccgaaaaaggagattccagctatatataatactagaaaccctaatataggggggaaaaacccaaacatttttaaaaaaaacccattcgagtctttaaaaaaaccctcggcccgatagagaaaaaatcctccccgcgggaattttaagaggacggcgctttaaaaaatcgcctgaccacaaaaaaaaaaaaccggccttaagaaaccccgcattaaaaggtataggggctaggggaagggggc

SEQ ID NO: 24825 - DNA, 979 bp, Glycine max
  unsure (1)..(979): unsure at all n locations
  Clone ID: PAT_MRT3847_12241C.1
aattcggctcgaggaaacagtgagtcataagatagcataattgaacgaattggagaatgacgatgaccaccatacaatcgacgccaggaagctcagggtatttggatttgtttcctgagcgcaaaatgtcatttttcaagaatccttatattctgggactcagtgctgtggctggcattggaggcatgctttttggctacgacacaggtgtgatatcaggagcccttctatatattaaagatgattttgaaggggtcagagaaagtgagttggttcaggaaacaatagtgagcatggcaattgcaggtgcaatagttggagcagcaggaggaggatggatgaatgatgcttatggaagaaagaaggcgactctgattgcagatgtgatatttattatgggagcaattgggatggcagctgcaccagacccttatcttctgattctgggacgttttctcgttggtatgggtgtcggggttgcctctgttacctctcctgtctacattgcagaagcatctccatccgaaatcaggggatcattagtcagcactaatgttctcatgatcactgctggccagttcctttcctacatcgttaaccttgcttttactcgtgtccccggcacctggcgatggatgctcggtgtctctgccgtccccgcccattgttcaagtttctttctcatgccttttccttcccgaatccccaaggtggctcttcatcaaanataggaaaaatgaagctgttcatgtgctctctaacatctatgactttgctcgcttaaaagaataagttgattntctaaccactcagtctgaccaagaagcgccaacgaaaaaactctatcaaattcgggggatgtttttaaatctaaaaaatcaaacttgcattacttgtntgaagctgcctgcangctttccagcagttcacaggaataaacacagtgatgtactacagccctaccattgtccaaatggct

SEQ ID NO: 24826 - DNA, 584 bp, Glycine max
  unsure (1)..(584): unsure at all n locations
  Clone ID: PAT_MRT3847_122420C.1
gatcagccaaaataatatatatttatattaagtgagtaccaggggtactgaaaaggtacatgaaaaagattacaagtgttacatttctgtgatcagcccacttatcataccaccccatgatggggtacaaaacaggtcctaatactagtgattgccctgcactcctaatgcttactacataaaaaaccttgagtcagatttgaagaccactgattgtagtgagtggtgaaatccttctctaagtttttcatccgcgtccaaaccaaaaacagtgcatcctccatcactctgtttgcattgaaactactattggaaaaaactatatcatttctatgcttccaaattgtccaagtcagtgctatccaccatcctttccatctagatgcagccattccttccataatatacgacacatgctgaataaaatgatttcttggngtgtatagggaagacattcaccaatctcacccaagacaatgattcccaccaaagtggaattattttcctgcagtgaaaaacagatgtgacgcgctctcttccacacttccaaaaagggacatgtgaagtcctgcattcaatttgtt

SEQ ID NO: 24827 - DNA, 363 bp, Glycine max
  unsure (1)..(363): unsure at all n locations
  Clone ID: PAT_MRT3847_122421C.1
gcgccgnagctcgaattcggctaggattttttccctttacagtaacgcacatcaaacaacgtcccttctcttctcttcccttcttccctcggctctactctactctacactggagctggcgtgggtctctctctctaaaagtacaccccatttatctatactttttttcaatccatatgcctacaccgtatcacatttcacaacaaataactacatacttttttttacaccatacacctttttttctttttttgaagttctttatattctcaaaacctctgattctgattctccaccatgaaccaatatctacaacctcgtacttgtcgttcgtatttgtgttcgtgtttgtcgtgttacatg

SEQ ID NO: 24828 - DNA, 2892 bp, Glycine max
  Clone ID: PAT_MRT3847_122422C.1
gcttttgtgcaacttgcttctcagctgctccgcttctctttataactttcctttcccgatctacagcaataccccatgcaacatggtgtttatgcaatggaacttgtggatggaactgacattcttttctaacttggcaaataatactatgcttaaccacttttcagcagatcactttattccatgcttatggtaggcaggtaccaaaataatctgctccatgaatacatcttgtgcgtcaaacgttgctgctaccactcaaacaggcattgctgcctctcttcgcatttagaacacctccgcaatttgtttactaaaagtatcgtagccattatgtggcaatcacaataaaactgatgtttaatgtaaaaaaaaaaaaactgatgcaactatggcattaaatattagaaaatgggaaaactttgatattacgcgtcctacagtctattcgtttgtcatttagagtattgctttcactttgatagaaatgcttattcttcttcctgatttagttgaaacccatcttggttttaatgatcaatttgggattacttttaacggtagttttaatcagctaattacttgcggtggtgcactaagtgacatgtttagaaaagatggagtcaaagctgatgccccaatatattccattcagatatgcattcctaagcatactttgaacttgatcttttcacttacaaatggagtggacctgggaattgtccatttagactacagtttcgcggtcgctagtcacttctaagcaagcgaattcacttctttgaaaagttcctagttgagtatttaataaatgccgaagtttgcaaggattgaaaatttttttaaagaaaataatcatagatgaaaattgcaatgaaaatttaatatccataagcagtcattattagctttgttaagaattagggtaatgttgatgactgtagttgtcctattgtttttcaaacccaatcttcttaatggcattatactttaccaaaatatttgtttggatcataataattttatttgtatttatataaagtatagcttttaatcttctcttaatattgaattcagtaattacttatttttgtttttaaattccaatctttaatgttatagtcattttcgatatttggtctacgttatttcaaataatgtttaattgtaaacgaccattaaatatttcagtacaaagcagtttttaatcatttaatttgtatcttattctagtccattataagtggattttgctgctacttcttctggtaaccctgctggcttttgtaaagccttttatttttaggtggttcacgcaatttgacatgctctccatgtttcctctgatatgtcgcgacaacttggttgttccatatttggctttacttgctctctttgtcctgataatgaatgcacctggccaacacagagttagagagagtaattatttgggctcggcaaccatgttccttattttatgttgctattttgttcttcacatagtttacttgaccatgcatcctcctgagaagtatcctttcctttttgaagcaataattatgaatctgtgcttctctcagtttgttcttgtaactcttggctgcaatataaagcagtggctgttaaatagacctgccaaattagaagaaacagaaaagaagcaaatttgacattggtttcacttttttaaagttggatgggttgttcttgttagacagttggaagcggatgtgacattttttatgcatttgagcgatgatttatagaaagggaattgattgagagcttgagctgcattgacctcaagtgtaatgattttataatttttagtctttaatgttcgatgctctatatggttaaatgttctatttccgtcaccgaatttacttggattttgatttcattggtgctaaataaacacctttactatgtatatcgctctaccattatctattgttcagactttacaactaaggtatgctttacaatctacttctttaagacaagcccataattgttaacaaacctaaaagcgttttatgcatttcgtgaggtttaagaatggggaagcaattccacttgggcctctaccccttgatttgatatgaccttctgaagaaattgaggttattaatcaaaagatggatatgaccaggagacagttgaaattttaccagcagcagatgctaattccttggcaagagctggacctctcagcttcctttactaaatctaaatcctccatctcctggaaagccaactgctatctttgtaactctgtagttactgggtgagtttctggaaacttttcttcttaacctagttcacaattcctacttaattttttggttatctaaacacgaatgtaatttatttttatttgataaatttttatttgttatatatgtagacatggatgagttactgatccttagtgttgttaaatttttttttggcttgttttgaggtttaaatattttttctatattgtccctcttatgacggaacttgatctatttatccgatcgcaccaagttctctgcgtcgttattgttgttatgcatgttttcccgtttattctcttcataggctataccttcgatttctttagtaaattaacttggaacattcttaacacgatgtatgctgacaagaatttattcgtaaggtatgtagcctgcttgagtttcttttaaactttgtaatttccaataaattttcactaataataataggaagtgtgttagggagtgtgtcgctaacacttctcttacagcagagctatcaggcttccattcatacgattcaccaaagccagagataacctaaagtggtgtatttcactccatccaaattgctgctattcaaaaaatttgcataaaagcaattaca

SEQ ID NO: 24829 - DNA, 679 bp, Glycine max
  Clone ID: PAT_MRT3847_122423C.1
cccgcgtccgctcgtcaattccacttcatcgtccctatttaatattcatcactcacctttcaattttttcccttttttaattaattaattaatttcttccatctagggttttcaattaggttcctgaattacgattaggttcttattttcatttttccctattgaatttacgacttagggtttctgggtctacgaaaaaccttcctttcgcgctagaaatctaggttttatggagctggggtgacagggctatcccactttgtcattcccgcccacaaaaaggaggtaactttacgaacatccgaatgcatatgtcgttttcgtcattatcaaaggtcaacgtaacctgctacgattgttataaactggagttgttatcatcacaatgttggatgtgaatggtagttgcgggttttatatctctagttgtgttctccacttagctgaatggcacccattggaatagcaacgttgagtagggcttgaagccctggttttacttcctctatcaaattttttattttttagggtgagagatacgtcaattacatttaggattcaatctccagatgctcaataagactctttcttttgcgatagggggctgtaattgctttgggttcatcaggacacctaaccgtcaaagtcaaaggtctaagcctactactaacaataatct

SEQ ID NO: 24830 - DNA, 1134 bp, Glycine max
  Clone ID: PAT_MRT3847_122424C.1
atttaatattcatcactcacctttcaattttttcccttttttaattaattaattaatttcttccatctagggttttcaattaggttcctgaattacgattaggttcttattttcatttttccctattgaatttacgacttagggtttctgggtctacgaaaaaccttcctttcgcgctagaaatctaggttttatggagctggggtgacagggctatcccactttgtcattcccgcccacaaaaaggaggtcaacgtaacctgctacgattgttataaactggagttgttatcatcacaatgttggatgtgaatggtagttgcgggttttatatctctagttgtgttctccacttagctgaatggcacccattggaatagcaacgttgagtagggcttgaagccctgtttttacttcctctatcaaattttttattttttagggtgagagatacgtcaattacatttaggattcaatctccagatgctcaataagactctttcttttgcgatggggtgctgtagttgctttgggttcatcaggacacctaaccgtcaaagtcaaaggtctaagcctactactaacaataatctctgccaggagcctctgttggatgatgatattgaggatgaagagggtgagcctttgtacaatgatgaggttactaacaatagtggagatgaaggtgcggaggaaactcgtcccaagcgatctgaagaaattttgaacttcagagtagagaatggcatgatttgtaggcagtttccagttaaggaaactcgcaaacttgttcgcagcgaggatgaaaatgggaacaagatgataaatgagtatattcgtgagtgtaaaattggttctggtagctatgggaaagtggctctttatcgaagctctgtcgatggaaagaattatgcaattaaggcctttcataaatctcatttactgaagcttcgagtttcaccctcagaaactgccatgactgacgtactacgcgaggttctcattatgaaaatgctggaacatcctaatatagtcgatctcattgaggtgattgatgacccacagtcagataacttctacatggtacttgaatatgtggaaggaaaagggttatacgaggagtcggaggccgct

SEQ ID NO: 24831 - DNA, 3484 bp, Glycine max
  Clone ID: PAT_MRT3847_122425C.1
tgaacactcgttacacttgtctcctcgtcaattccacttcatcgtccctattcaatattcatcactcacctttcaattttttcccttttttaattgaattaataattaattaatttcttccatctagggttttcaattaggatcccgaattacgattcggttctcattttcgtttttgcctattgaatttacgacttagggtttattggtctctgaaaaaccttcgtttcgcgctagaaatctaggttttttggagctggggtgacagggctatcccactttgtcgttcccgcccacaaaaaggaggtaactttacgaacatccgaatgcttatgttgttttcgtcattatcaaggttctatgtaaaaaaaaaagtatcaattttattttctcccatcgtcgcccatttatcttttttaattaatttctatgtttttgttttttgtttttctattgttaaaattttaccctgttcgcttttcatgccaaaaggtcaacgtaagctgctacgattgttataaactggagttgttatcatcacgatgttggatgtgaatggtagttgcgggttttatatctctagttgtgttctccacttagctgaatggcacccattggaatagcaacgttgagtagggcttgaagccctgtttttacttcctctatcaagtaagaaccttagcctagtatttcatctggttgacaagatgattgattgaggatttgattttttattgttgttggcgtagtaaattgtttttttcctttctttttttagattttttattttttagggtgagagatacgacatttacatttgtcctaagattcatcttcacatctaataggaatcaatctttcgtttgcgatggggtgcgacatctcgagtgtgaagtttgtatgactaaacatttgcaggtggtccgataacggcccaataattggtggctcgataggcccaacaacaattgctaagataggtattgattatgaaaatggtggaacatcctaatatagtcaatctcattgaggtgattgatgatccagagtcggatgacttctacatggtacttgaatatgtggaaagcaaatgggtgtgcgagggtacaggtcatccttgtgcattaggtgaagagactgctaggaaatacttgcgtgatatagtctcaggattaacatatctccatgctcataatatagtgcatggggatataaaacctgataatctgttgattactcgtcatggcactgtaaaaataggggatttcagtgtcagccaggcatttgaggatggcaatgacgaacttcgtcgatcacctggcactccagttttcactgcaccagaatgttgtttaggtcttacttatcatggtaaagcttctgacacgtgggcagtaggagttactttgtactgtatgattttgggtgaatacccatttcttggagacacacttcaagacacatatgacaaaatagtcaatgatcctttagttctgccagaggacattaacccccagttaaagaatttaatagaaggattactatgcaaagacccagaactaaggatgacattgggcgatgttgctgagcatatctgggttattggagacgatgggccaattcccgggtacttatgttggtgcaaacgtaagagcatggttactgaagattctgatgggagcgatatacttgattgacccacactgattctaagttggatttcttatgtacagtgaaaaggcccattaatttttccccacggagacatgttatgattgtagagggagtctccaaagaatccttgggaattaagaaaatacagctcatgttgccaacgataagtagtcaactaagtcatgtttatttttgtgttgaggagcattttgtgtcttctacggacttagaggtcttgtatatacagctctttcgcatagaatgagttttttttgtttgttttttttatttctcaaacacgtgccgaattgtgttcagttcatactctttatacattccttggagtgtttttatttacttgcgtgatatagtttctggattaacatatctccatgctcataatattgttcatctggatattaagccagataatctgttgattactcgtcatggtacagtaaagataggggatttcagtgtcagccaggcttttgaggatgataaagatgagcttcgtcgatcacctggccctcctggttaagctgcagcccagtgcctcgtaggtgtgaccttgtgtggtatggtattagccacatacgcgctccgaggtgccgcccttcacgctatatagggccaatccttttacatggcacacatacttaaacttccacctgcaccaccagcgaatccccccgctgacgtcctgcgccagatagtcaataatcctttagtactccccaacgatatggtccctcccttggaggtctttgttgatccactgtcggatgacttctacatgggacttgggttggcggtaagcgatggggcgggtgagggtacaggtcgtccttgtgcattaggtgaagagactgctaggaaatacttgcgcgatatagtctcaggattaacatatctccatgctcataatatagtgcatggggatataaaacctgataatctgttgattactcatcatggcactgtaaagataggggatttcagtgtcagccaggcatttgaggatggcaatgatgaactccgtcgatcacctggcactccagttttcactgcaccagaatgttgtttaggtcttacttatcatggtaaagcttctgacacgtgggcagtaggagttactttgtactgtatgatattgggtgaatacccatttcttggagacacacttcaagacacatatgacaaaatagtcaatgatcctttagttctgccagatgacattaacccccagttgaagaatttaatagaaggattactatgcaaagacccagaactgaggatgacattgggcgatgttgctgagcatatctgggttattggagaagatgggcctattcctgggtacttatgttggtgcaaacgcaagagcatggtgactgaagactctgatgggagcgatatacttgcttgatccacgctgattctaagttggatttcttatgtacagtgacaaggcccattaatttttcccccactttggccccacggagagatgttatgattattatagagggagtctccaaagaataattgggaattaagaaaatacagttcatgttaccgacgatatgtagtcaactaagtcatgtttatttttgtgttgtgaagcatttggtgtcctctacggacttagaggtcttgtaatacggctctttcgcatagaacgagtttttttctttctttctcaaacacgtgccgaattctgttcagttcatactctttatacattccttggagtgttttgtttttacatttgctttggtttaacattcaaagaatttgattattcaac

SEQ ID NO: 24832 - DNA, 364 bp, Glycine max
  Clone ID: PAT_MRT3847_122426C.1
gtcgttcttttttttttttttttttttttttttttttttttttttttttgggttttttggaaaaaaaaaataaaaccccaactcatccgtttttaaaattttttcaaaattaaaaaaaaattaattaattgtttttaacaggccactcttttctctactattttgggcctttgatttttttcggcgtcaccatcatcgtttgtatggaatcaaacctggttatagcgattctctggcaaccggttttactgtggataaatcgggtcgttcggtcgttcgttcgcctcaggggcgggaataattggagggggggcctcgggtcaaaaaccttaggcttccatccaaccgcgtgtttcaagaagct

SEQ ID NO: 24833 - DNA, 469 bp, Glycine max
  Clone ID: PAT_MRT3847_122427C.1
gaaatttttgacgctgaaggaaaggacagagctaggatggaaaaaaagacaaccactgggtgagtagggctggttctagagggctggttcaaattgtaaagtacagaaaataagatttaagtagccttgttcctcaaactcctccccttccttttcctcattgtgcccatccaactgggctttcttcgtcactctgctacttcctcctccagaccttccccgaatccaagctcctcttgctccaggccttctaagagcttgctaccatgagagaaaagtagttgattaattctctctatagtgttaatgactaaggaagccctaaaatattccctttggaaggtgaggggggcaactttcagtccagcagcaggcctgaagggaacccattttggccagtggtgcttctggaaatgtttctgagcagatgcttggaaactcagctctgtctgccactggcccttttctc

SEQ ID NO: 24834 - DNA, 441 bp, Glycine max
  Clone ID: PAT_MRT3847_122428C.1
caaatgtaggaccagtgagaggaacatagtggaactgctgtttatgtttactttgctcattatattatgcaattggacagagacgcatatcattttcgatgaatactgtcagctgcgcatgcctctgggacacctattcaatctttatgcattgcctggataaatttatggagttccatgctccatgacgggctgggagggcattcttcatgagactatgcattgatggggttatacaaatacgttatgtatgggcgctgatgaaatcattagtcctcataaattgcacactaattttgtacgctgctaagcttgatgctgttactattgccttcaatggatgggagttttatacaaatttactcgtggacgggatataacacgggaaacgcctactggaacaccgaaccataaggcgtcctataaagtgaaatgaaaatg

SEQ ID NO: 24835 - DNA, 299 bp, Glycine max
  Clone ID: PAT_MRT3847_122429C.1
attatattttttttttttttttttttcctacctataagaaggggactttaatcatttttattttggcagaaaaatatatagagagacagagatagagcatttaattcatgttacaatcaggaagtggtacaaggaaaaaagctttggaacaaatttggtgcacaaatttccattcccttacccttagcatacaaaatccactctactcggatcttattcttttaagcttgttcagtgcctgttacaaattgttttacataacccaaacaatctttgtggtaaccacaaacaacaaaagc

SEQ ID NO: 24836 - DNA, 709 bp, Glycine max
  Clone ID: PAT_MRT3847_12242C.1
tacggctgcgagaagacgacagaaggggcaattaacttcaatgaaaagctcaacaccacatctcagaacttaaaaaatatgcttccaggcctcaatttggtcgtctttgatatctaccaacccctctacgacttggccaccaagccttctgaaaacggattttttgaagcaaggaaggcttgttgtggaacggggttgatagaggtatctattttgtgcaataagaagtccataggaacatgtgctaatgcatctgaatatgtattctgggatggttttcatccctcagaggctgcaaacaaggttttggcggatgaattgattacttctggcatctctcttatatcctaatcaaacacttcacgagtcatactttggatttcctacacttgtggttgctgctgctgttgcatgaagatggcttgtgaaaaagactaaggatattctagatgttaaatcccaaagatcattgtgtggttttaggttccgtgttattgaacaaagactttttcgtctaaggttgataataaagtgaaaatgaacgcttatggcattttaaatactattactaaattataatttttccatctttttttacactaaattttaaatatttaaattacaatttttctatctcttccccatgttttaagtgcttgttgttcaagtataaacaattgtgatatttagtaatgaagattatattttt

SEQ ID NO: 24837 - DNA, 337 bp, Glycine max
  Clone ID: PAT_MRT3847_122430C.1
caatttgtaatttcacagaccacacctaatacatagcggctttgtgaactttctacacgctcattgtcacaccgatgcccttcaaaaccatccatccaattccatttcttaactcaacacaactcctaatccaaaatcaattaaaactgaacaacttgataacaaaacgctatttccaacaccgtatataatcaaacaccaaaataaacaaaactgcaaatcaaacctacaagagccctctggtcagaacttcttccagattcgctaaacgtaagtccaatcaaacatattgtaattagataattgacaaacatgacccaatccttctacttttatt

SEQ ID NO: 24838 - DNA, 274 bp, Glycine max
  Clone ID: PAT_MRT3847_122431C.1
gcaaaaggaaacattctttaattgaaataacaggggatagtgaagaaataaaaacaacagggcatgaatgttcaaaaaaagccattaactcatttaagacaaacaccggatactacgaagacacaagatcccaacatgagtcttaaaaacatacaggctttacattggccctagttcaggaaagcctgtctgcaaactcctggataaacctaaagagggcttaacaatggccgctttcgatcgccacgtgatgaaagatgcatggctcttcaat

SEQ ID NO: 24839 - DNA, 105 bp, Glycine max
  Clone ID: PAT_MRT3847_122432C.1
aattcaccaaacaggcactaattcatcctagcaacggtgtctaataccaatgacttaatgcaactacttacaatgcttctatgcaaccacccagcaactgtcctg

SEQ ID NO: 24840 - DNA, 342 bp, Glycine max
  Clone ID: PAT_MRT3847_122433C.1
ctcgagccgaacacactaccctaaacatactaaagcagctggtgcaagtgaagcaatggctaataccatgccgctcatgtctcatagctctagcagatattgccatgacttgaagaaagaccttatactacaattgtacagtaaaatctctaggcctacagtatataaggtctcataccaaaaagttccgaccatcaacttgtaactttttttcacccagaacatacacagcgctgatctatatcattatctaagacagacaacgatcctgataagactaaagtgaccaaaccacacagaaaagatgaaactgaatctgacctcactactggagacttccat

SEQ ID NO: 24841 - DNA, 346 bp, Glycine max
  Clone ID: PAT_MRT3847_122434C.1
gtagagaaagatctaaaggttatagcaagacagtgaggaaattcccatgcatcaggaaattctacagacttaagaagtcgaacaacttttcactcttaaagaagacgttgatattttttctgaattctattgataggcagaggactacaaggcccaataggaagcatttggaggattatgtctgaaggaattctgttataggatctgttatgctggcactagaatctgttagaataattctgttagtgcttattgttatttggcctttgcttttgtcctttagcaattgcaaaagctatgtatatggcctgtaatgaagaaatgaaataagaacatattagccttc

SEQ ID NO: 24842 - DNA, 223 bp, Glycine max
  Clone ID: PAT_MRT3847_122435C.1
gggggtcgcaaagggggtgaggggggagccacaaggccagtgaggggagaggaaggtcgtgaacgcgagaggggagagcaatgttgttaatggcggatggcgattcatggcagaaagccaaaaatccgccatcaaaatatgacggatggcgtacggaaaatggcggacaacaaaagaaaaaaaaaaaaaatggggtgccaaaaataaaaagggggccaattgg

SEQ ID NO: 24843 - DNA, 1475 bp, Glycine max
  Clone ID: PAT_MRT3847_122436C.1
gttaaagggctttgcatgcatgggaacttgaaccagagcttgcagcttttggataggttgacgaagaagggactcgtcccaaatgcattcacgtattcgttccttctcgaagcggcatataaggagaggggggtggatgaggccatggagcttttggatgatataattgccaagggtggggagcctaatttggttagttacaatgtgttgttaaccgggttgtgcaaggaagggagaactgaagaagctattaagcttttcagggaattgcctgcgaaagggttcagtcctagtgttgtgagtttcaacattttgctgaggagtttgtgctatgaagggcggtgggaggaagcgaatgagcttctggcggagatggataaagaggatcagcctccctcggtggtcacttacaacatattgattacttcgctttcacttcatggaagaacagaacaagctttcaaggttttagatgaaatgacgaggagtgggttcaaagcgagtgctactagctacaatccaatcattgcccgcctctgcaatgaagggaaggtggatcttgttctccagtgtctagaccaaatgattcaccgacgctgtcatcctaatgaaggaacgtacagtgctatctcaatgctgagtgagcaaggtaaggtgcaggaggctttctttattattcaaagcttgggtagtaaacaaaacttccctatgcatgatttttacaagaatttgattgcaagcctgtgtaggaaagggaacacatatccagcctttcagatgttatatgaaatgacaaagtatggattcactccagattcttacacttattcatctcttataagaggaatgtgtagggagggaatgctagatgaggctcttaagatattcaggattttggaagaaaatgaccacaggcccgatattgataactacaatgcacttatacttggtttttgcaaagctcagagaacagacttatcaatagagatatttctgatgatggttaacaaaggatgtgtgcctaatgagaatacctataccattcttgtggaagggcttgcttttgaagaggagacagatatagcggctgacctgatgaaagagttatatctgaaaaaggttctgagccaaagtactgttgaaagactttgtatgcaatacgacatcaaggaattagtagcaacagggtagtgaagtgacatatactcccatagtatacaacagaaagtaagtagaggtatatgaatgccttcatatatgaatggagttttctcagcttgattgcctttagacgttgattagtcaggtaaaacaaaatgttcccaaatgcttggaattttggttgaatgtaatgtttagaaatgattaatgaaaaggttcaagcatataaattaatgctgactaaattctctcccatgctttatatttaaccccattttggagaattgagttcttttaatgattttgtattgtcc

SEQ ID NO: 24844 - DNA, 422 bp, Glycine max
  Clone ID: PAT_MRT3847_122437C.1
cccacgcgtccgaaccattctgcgtagcgatctattggcaaattttttgacagagggcattattagagcaggggttgattagcagagcactcatcggattaaaggaatgattaaaagggtggacacaggcggtattcctgagaagacatgtatagacatggcctgtgctatgaataggctttttagggggcgtgccaatactgatattcacactgtctgctctaaagactgagaataatggaatcctgcttgcacaaaagcgatgactatgatattgaatgcaaaccaccgtgctgatgcatggagcttggaatatatagagcgtacccgatatcattgcgatatcatatgcgtcagtggatggactgccacctcaatgcgagatgctcatgttacaattgaatgtggtatatactctcacg

SEQ ID NO: 24845 - DNA, 386 bp, Glycine max
  Clone ID: PAT_MRT3847_122438C.1
ccaaggtaaaaattttattgcccaatggaaaggcaaaaaaaattgaggggtttgtttttcattccaagtttaaaaaaaaaatgatcccccaagggttgtacagcttgtagcgggaaacagcctccaaaattcccttgggctggaccatacctgataattaaattcccattgaaaatttgggtgggtctaacttccatttgtgggcaacaatgtcagccaaatccaaaaccctttgggagtacccccattcattggaatcccaagcaatgacctttaccatgttatttcccatgaccctggtcaacgaggagtcaacggttggggacccattagggcacctgaagtcaacggacccaaggggttatttccacacaggaaggattccc

SEQ ID NO: 24846 - DNA, 686 bp, Glycine max
  Clone ID: PAT_MRT3847_122439C.1
attatctaaaattaatttccatttttcttttatctagaatacatgtatttactatttgatataaatttggtcgacgtaggcaaagcatacatccaaattcagaggttaagggaattcaaaattaaaaatatattgctaattcctaaacaacttgttgctacaaaagactgattattggggaggtggtgaagatcgttggcttttccacgctcctgctgtcttgtcccccattatggcaaatacttttccttcttggctttgcctctccaagcattgggacgatgtctctcatgggtggtctttccttgggaagctttgcagtacatagaagtgcaatccggagcacaagcagcatttcttcttggacatgcttgcactgactagctatagcaggatccaatgcttctaacaaggctttgttgcttttcttcttccttatccattcgactatgtcaattgattcttcaaatgaagggtctaaaggcatttttccagttaggagctccaaaagcaccactccatagctgtatatgtcaatcttctggtcaaccttgagagtgtatccatattctgaacaccaaaacacataagcatgatgttaatcatcttttgcctcattttcacttgtttgagctaagaaggtacaaaaacagaaattggggcatacattgcatactaatatgggc

SEQ ID NO: 24847 - DNA, 509 bp, Glycine max
  Clone ID: PAT_MRT3847_12243C.1
tatcgtacattaaatatcgcaataacatcagtacaagtgacatattagttcaagaatcaatgtcgttgtaatctatcaaagatgctttgtgggaaatacatttgaacattgctacagatactgggtgtcggttctgtattctgctcatagctcaaccttctaatgaagctgcagcatgatcattgtaacgcccaccgacgacgtcggcgctgtcgaccacctcgcggacctctttgatatcggcatcgctcaaattgacttccaatgcttgcaggctctctttgacgccttctggtcttgtagatcccgggataggatagatatatttcgactgcgctatctcccacgccagaattaattgtacaggtgtaacacctttcgcctttgcgagcgcccccagcttgtctaccaccactaggttcttttcaaaattgccaggcttgaagcgatcaaaggctcggcggtggtcgtccttgtcgagatcgtcgatggacctgatggcacctgtg

SEQ ID NO: 24848 - DNA, 309 bp, Glycine max
  Clone ID: PAT_MRT3847_122440C.1
cgcttctctgctccttggttgtctgctccttccctggtttcggtttttggcttggccctcttgctgtgtgttgctccctgtctccttcgctctcctgttgctgggcccttgtgttttctagctccgtgatgtgcgtcttctggccttgtttcgcgcgtttcctttggtcgtggccttttggtgcttctttgttcttctgtgcgtggcctctctttggtggctgcctctctccacttctccgttcttgctgccttatgcttgcccggtgcttctggggaacgctcctctccggctggtgtatcccctgct

SEQ ID NO: 24849 - DNA, 264 bp, Glycine max
  Clone ID: PAT_MRT3847_122441C.1
attgtaaagaatctttgtcttgttttccacatttttatctgcctatatatagatatatatataatatatatctatcatttttctaattttctgccattttttttagtttcctatactataatatagaatagaatatgaaaaagaacaaaaagcttctaaagaaatatcactaatattctttagactaatcaaaaagaatattagattccaatacattttagatagaacaacgacttaaacaggcggatttgacatgcgagatct

SEQ ID NO: 24850 - DNA, 352 bp, Glycine max
  Clone ID: PAT_MRT3847_122442C.1
gggaggggaggttggggtgtgtgtttttctttggtgaaagggtgagactgattttttagactgaccctaggtgaatagatttccggaattaagcaggaaaaatgatcatgggagggtttcatcagcccatttattgttgtcgtccaattaattataaactttctttttaacttggtgacccaaagcggatttttttataaataaaagggaagaaggctcaataaataggagaaccctttctagatataatagagtttgcttagcttagctttcccgggttttgtttcccgataaaggtaattagcctccttttagagggtcttaaaaaaaacatgcttttggacattttttt

SEQ ID NO: 24851 - DNA, 471 bp, Glycine max
  Clone ID: PAT_MRT3847_122443C.1
acaaaatacaactttgtggagcactccttatttaatattgctatatcataaaccatgaatagagccttttgtttctcttattggaaattgattaaggaaaatgctagagctcataaatagatttagcatacttgcttccagactgagctggcttgccagcttgctattgagcacctcaccccctcctaaatgtatgcattttgttttgggctgagtaaatggtatgtgttttggtaaacctttttgttgaatagcatgggtctgattagcatatgtacaggttgagatttcttctctccgttttgtcatttgtgaactattgagaatttgtttactgaacccaagaatctgggttgagctgaataattgtgtaatattagccggagcttgtttttgtgaatatttagtttctgcttttgtttgcttgggagggcataggtgcggacattatctgatttgcatttattactt

SEQ ID NO: 24852 - DNA, 271 bp, Glycine max
  Clone ID: PAT_MRT3847_122444C.1
acgaaccaacaaaaaaattaattataaaaacaaatactcagaatcaaacaaagcatctcaacacaaacatgacccttggaaccgcttaaataatataaaaaaccacttataaccgaaatgacttgcctccaaaaaaaactagcaacccgggcggtacaacatattgccaaagatcttaacgggagctgataaggagagctcggaaaagaggatgaaagggcacggaataaggcgacaactggccatcagcataaaggggcggaacacctga

SEQ ID NO: 24853 - DNA, 462 bp, Glycine max
  Clone ID: PAT_MRT3847_122445C.1
tcgcgaatgatctttttttgctcttgtaggcaatgcttttcagtatatgattttgcttatgaataaacggttttatggtctattttgttaaaaaaaaaaaaaaaaaaaaaaaaaaaaaaaaaaaaaaaaaaaaaaaaaaaaaaaaaaaaaaaaaaaaaaaaaaaaaaaaaacaaaaaaaaacaaaaaaaaaaaaaacaacaaaaaaggggggggcccttcaaaaggacccaagtttcgttcccctggcttgcaacgcaataccttttttatggggcccccaaaattcaatttccggcccgtggttttacaccggtgggatgggaaaacccctggcattccccaattaaatgcctttggacaaaagccccttttccccaattggcttatatccaaaaaggccccaaccaaacgccttttccaaaaagtggccccactttgaagggacaaagtggacccccccc

SEQ ID NO: 24854 - DNA, 435 bp, Glycine max
  unsure (1)..(435): unsure at all n locations
  Clone ID: PAT_MRT3847_122446C.1
gtcaacgccaggatccaggacaaggaagggatcccgccggaccatcagaggctgatctttgacgggaagcncctggaggatggccgtacccttgcggactatatcatccaaagtgagtctacgctccacctcgtgcttaggctccgcggtggaatcatcgagccctctctgcaggcgatcgctcgcaagaaaaaccaggacaagatgatctgccgcaaatgctatgcacgactgcaccctagggctgtcaactgccgcaagaagaagtgtggtcacagcaaccagctgagggccaagaagaagatcaagaactgaggtgctgctcctagtcagtttcatggacaatgttgggctgtattgctgtgtggttgttgaacggtgtttgtttacccaacatttgggccttctgttatgttttcccttgttgtcgatgac

SEQ ID NO: 24855 - DNA, 206 bp, Glycine max
  Clone ID: PAT_MRT3847_122447C.1
gaatggtcgtgactggggacacggatgtgcgaatgcgcggcgtacgacccggagacgctagaaatagtgcaacgggtgcacataacatatttgaatggtcatcacttataacaaggttgtgcaatactgggtcataactcatcgagacgctcgaaattgaccaacaggaggctgtcgtgacataccaatgggcagaagcttgacac

SEQ ID NO: 24856 - DNA, 114 bp, Glycine max
  unsure (1)..(114): unsure at all n locations
  Clone ID: PAT_MRT3847_122448C.1
gtcgtaaaagtttctacaagtgaggaaccnggggcctttattaagaagcttcgtcttatacaccattgggtgtatacagatggtgaagatgccaatgccacagagtttcaagag

SEQ ID NO: 24857 - DNA, 2559 bp, Glycine max
  Clone ID: PAT_MRT3847_122449C.1
cacgcgtccgctcgcttagcattgtatgtggcgagtgagtgagtgagtgagtaagcaagcatatggcgagtaccttctgcttactccactctcccctctatcaattcccatcttcatcttcttcttcttctgggcccataaaattgcgagcttccacaacatcttgcttggggcagcaagacaaagagccactctgcaacagaagaaccgttcttttgaccagcatcgctcttcttccgtttcgccgtttgaagcgggccccagctctcgaatccccacctccacctccaccccctacagaagaaaccgacgtgaagacacaagaggataaccaggaagccgagaaagcacctgaagtggaccaaccgtcaaattcctttctgcttctcctgaatggaattggaatattttcttctggtgtgttgggtgctctctatacacttgctcagaaagaaaagtccactgctgttgcaacaatagaaacaatgagcagcaaactgaaggaaaaggaagaactgattgtttccttgaagaagaactatgagttgaagttactaaacaagcgggaggaacaagccaagctacttgaaaaggcaaaggaagagcaactgggccactgataaaccaactagaaattctgcaaacagtactattaaaccgctttggggacaggaactttaaaaacgagagaagtttgattgaggacctgaaacttcaaattggccaacttaaaactgagctttcaaagactgatactgataaaaaggatcttgaaaacaatttgaaagaaaagatagattccattggagttttacaggaaagaatcaatctgctgagtgtggacctcaagggcaaagaagatgttgttcaaaatcttaattcattccttgcagaaaaggagttgcaattgaagagtttgaagtctacctatgagcaaaccaaggatgacttaataaatgttcaattgcagattcaagggttgaaagatgaactactgaaaacccaagaggaactagaagcaaaagattccttggtgatagaactaaattcaagagtgagttccttaactcttgagaacaataattttaggagtaaatgtgatgtcatggagaaggaatacaatgtcctaaagttcagtgctgaaaagaaggctgctttggactctaaggttttaagagaaaaagatgaggagcttcatcagctaaaggatcagttcgaacttgccctaggtgaagcaagcaaaagccagatcgtcattgctgatttatcccaagaaagagatgatttgaaggaggctctagataatgaatctagcaaggtgaatcatttgaagcaagaactccaagttacccaggagaatcttgcaaaatcaagaaatgagtctgctgaattggaaaaccttctaactttgtcaaacaaactgtgcaaagagctcgagctcgaggtctctaagctctcgtctgagctcactgaggttaatgaatcgctacagagaaaccttgatgatgcgaaacatgaggcagaaatgctagcaagtgagcttacaactgccaaggaacacttgaaggaagcacaagcagagctgcaaggtgtgtcaaaagaattgacagctgctcttgaaaagaatgatagcctacaaaaagaattagttgaagtctacaaaaaggctgaaagcacagcagaggatttgaaggaacaaaaacagttagttgcttctctgaacaaagatttacaagcattagagcagcaagtctcaaaagacaaggagtcccgaaaatctcttgagagggacctggaggaggcgaccatatcactagatgaaatgaaccgaaatgcggtgatcctttctggggaactacagagagctaattctcttgtttctagccttgaaaaagagaaagatgtgcttattaagtccctaaccaaccaaagaaatgcatgcaaagaggcccaagacaacattgaagatgctcataaccttatcatgaaacttggcaaagaaagagagaatttagagaaaaaaggtaagaaatttgaagaggaattggcttctgccaagggtgagatattgcgcttgaagagtcgaatcaattcttcaaaagttgctgttaacaatggcccagtgcagaaagatggaggtgaaaaaaaggtcaacccttcaaaagttgcggtaaacaatgagcaagcacagaaagatgaaggtgaaaacaaggttactgtaagtgcacggaagactgtcagaagaagaaaggctaatccacaataacagagaaattagagagttttctattaaaaatattccgattaggatcatgatattctgtaataaactatttggaagccagttgattctattcacttttggcatgcaaatattttcatgttttgcaatagtattgtacaaattaaatgacactgtaggaattgttaagctaagctttttggagagttgatttctgatagtaaacctaaaaaaaaaggtaagaatactattaccaaccttagtctgcaacattatacattagtgtatatacagctacttttccatgtctatgaagc

SEQ ID NO: 24858 - DNA, 767 bp, Glycine max
  Clone ID: PAT_MRT3847_12244C.1
gccgccgccgccccggtgttgcggatgtatctgatctctcggccaaccccgtcatccgctggcagcaccgcttctacctccccctcatcttcggcatgggcttcgccttccctaccctcgttgctggcctgctctggggcgactggagaggcggtttcttcttcgccggtgccgcccgactcctgttcgtccaccactctaccttctgcgtcaactcgctcgcccactggctcggcgagactcccttcgacgacaagcacaccccacgcgaccactggatcaccgcgctcgtcaccgtcggcgagggctaccacggcttccaccaccagttcccatccgattaccggaacgcgatccactgggcgcagtgggaccctaccaagtggttcatctggacgtgctcaaagatgggtctcgcctacaacctcaagaccttcccgcacaacgagatcgaaaagggacgctacgcgatggagctcaagaaggtcgagaagaggggagccgccctcgcttggcccgtaaacccacaggaactccctgtctacacgtgggacgagttccaggagatgagcaagaactctggccgtgccctcatcgtcatcgctggcttcatccacgacgtcacgaccttcatggacgagcacccaggtggccgtggcctcatcgcgtacaaggtcggcaaggatgcgacacccgccttcttcggcggcgtgtacgagcactctcgtgcagcacacaactggcttaacatgctccgcgtgggagcc

SEQ ID NO: 24859 - DNA, 618 bp, Glycine max
  unsure (1)..(618): unsure at all n locations
  Clone ID: PAT_MRT3847_122450C.1
cccgcgtccggaagaaaccgacgtgaagacacaagaggataaccaggaagccgagaaagcacctgaagtggaccaaccgtcaaattcctttctgcttctcctgaatggaattggaatattttcttctggtgtgttgggtgctctctatacacttgctcagaaagaaaagtccactgctgttgcaacaatagaaacagtaagcttatatgcactctaatgattcttggaaactggtaagatgtgtgttagcctttgaggaatgtctctcttccaaagaatcatacagtaaaaaagggaaattagggagtattctcctccttctgctactaaaggataaaaaatgattgttcattttccatttaatttcatttaattttttttcttctaaaaatcatttaagcagtatattttactggttaatctgcacagatgagcagcaaactgaaggaaaaggaagaactgattgtttccttgaagaagaactatagtttgaaggtacttaaacagcgggaggaacaagccaagctacttgaaaaggcaaaggaagagcaactggcactgataaaccaactgaattctgcaaacagtactattaaccgcttgnggcaggagcttaaa

SEQ ID NO: 24860 - DNA, 406 bp, Glycine max
  Clone ID: PAT_MRT3847_122451C.1
ggactcaatttcataccttcgacgacctaccaatatcgggaggttgactcagtaatcaacgactgttaaccagtaacgacaatcaacatggcggtaccaggcgaacaacgccagatcaacaagggcgttccacccgccacggcttgcaaccctcccggcgcggacttcggtaccaacgttctcgagcccaggcaagctggggatctcgttgatccgtcagagaagcatatgcgcaatcagcacttgtcggcttcggatgagaagcctcacttgggcggagaataccccaaatacctgggattcagcggggatcgtttgatctgggcaattaccttttttgccacactcggattctccctcttcgggtatgaccaaggtttgatgagtggtatcattgctttcgatc

SEQ ID NO: 24861 - DNA, 343 bp, Glycine max
  Clone ID: PAT_MRT3847_122452C.1
gaaggaacacaagccatgctttggaactcattttagatggaaactttaattgtggagagaaagagaggaaaagggtctctctcttaaattgccattttccctgcccttcctgccagagggaggggaaaagaaaaagctgggaaggttgttaattagtttaatatgttggggtagaaagttagaactagctagagggtgtgtgttttatgtgtggctgtaatttgtgatgtaacttgattttggggtgcatgtgcccgtttttctctctcatatggttttggtgactgttaatgctatatatacacagaaagatttccctttcattgtcaacaaaaaaaaaaaa

SEQ ID NO: 24862 - DNA, 1148 bp, Glycine max
  Clone ID: PAT_MRT3847_122453C.1
gtttctataagtacagccatgtcaaatccattaccagttctaccattccctttaccatttcaaagtatttcaaataaccctttacatttacagggtggagcccatccacctttacctcctggtcgccctcctgctccatctcaaatgataccccatccaaatgctggtgcatttatgccaagccaacagccaactgttggatatactaatttaattagttctctaatgtctcaaggcgtgatctcattggctaaccagctgcctgcacaggattctgttggaactgagtttaatccagatattctgaagattcgtcatgagtctgcagtcaatgccttatatggtgatctccctagacaatgcacaacttgtgcgctccgattcaaatgccaagaggaacacagtagtcatatggattggcatgtgactaagaatcggatgtctaaaagccgtaagcagaaaccctctcgtaagtggtttgttagtgaccggatgtggctcagtggtgcagaggcattgggaacagaatcagctccaggttttttgcctaccgaaaccatagaagaaatgaaagatcatgaggagttggcagtgccggcagaagaagaccagaatacatgtgcattatgcggagagccttttgatgagttttacagtgatgaaatggaggaatggatgtatagaggagctgtatacctcaatgcacctttaggaataacagcaggcatggataggtcacagttaggccccataattcatgctaaatgcagatcagaatctaatatggccacctctgaagatcttgggctggatgaaaagggtgccgatgaagagggttcccaaaggaaacgaatgcggagttgaccaatgtaaccagttttgtgcattgtaacttatgattttccattagtgtatcttagagtagagttgaatcttgcaataccatgaccattctgccaaagtcatgtacatgtatagttggactggtaacgcgcatattttcttacagtcaaaggttacattttaacttgaaattattttgtctcttgcaattttgtccccaaatcaaaaactattagtacattgttatttctcggatggggcgcaggattttaaactatgcagcgatatactatcaggttgatcag

SEQ ID NO: 24863 - DNA, 837 bp, Glycine max
  Clone ID: PAT_MRT3847_122454C.1
atggctctgaaaaagctttccgcgaagagatctaggagggacaccgcggctgaagggaccagttccgcccccgagtttgatagccaccgtttcaggagcgccgagcaccagcagcgctttgaggccatcaaaggatggccgttccacggagagagacgcgtccagctcagggacgatgagtacacagattttcaggaggagatagcttggggtcagtggattccctttgacgcagatgccctcgaccagttcctgggtgacccgctagtgttggaggaaggccaggagtgcgagtttagtcagaggaggaacagggccgatgggttcgacgaggaggccattgcccagctattatgcacaccgaggcaggatttcgcccagaccgctgcagggaggcggctggtgtatgccatcctgacacggatgaacgtccatgtggctcagttgattgctgacgccatctatttatttgtaggtatgccacccaccaggcaccctctagacccggataagtctaacagggccctggggtttccggcattgatcacgggcctctgtcagtcattcagggttcccgtcactcctagcaaggcggccaaccactgggggcaggcacaaatacatgagtgtctctaccagctcagcctcagtcagcaggggcagggtttcgctccttttgcgtgccctactccagagcattttagggctgaggtcgcatggcccaaggcccaggcaggggaggcgcctgtaggagctcccggcgatgcagaagaggcccgtatggatgaggagatgacggacttgctcagtttcttgggaggaagcagagccacgtga

SEQ ID NO: 24864 - DNA, 352 bp, Glycine max
  Clone ID: PAT_MRT3847_122455C.1
gtttgcttccataattttgtgtggagacatcaggtacactgaaacaacaatatttaattgcacagatttgaacatgttggatgtttattatacactagccacttaatttacaatgattctaccgcattacatgtaggtggcatcatgtataccttgttgatctacattctcccatcttttctcacgtgctgagattaaatataatcggaatctgagttatatacatatttccggcttattgtacgacggcggatacaaattctggactaaacacgagaaaaatcttgctttcacagaagaggaaaagatggacttgattacaaatagaggcattactgctgatgtacttgca

SEQ ID NO: 24865 - DNA, 1169 bp, Glycine max
  Clone ID: PAT_MRT3847_122456C.1
cgcgtccgacggctgcgagaagacgacagaaggggattggcattgccagatgcacttgttctctctgctgatctctgctccttcttccacactgtttcgattttccacttccaaggataagcatccttatctgttatttttttctcgcctgctcaaagtcattttcttagttcctggtggaataagcattttcaactatggcgctttacggaaccaccttatccttcaatggactttcttctactaccaaggagtttaatatcttaccgtattcattaaccggtagctttcggaagctccatcatgtttgtctgccttcctttactccaaacagattagttttgggcaaaagttttggaagaggagaccaactgtggcttttgcctagtcattttccgaagttgcaaatgggaagattgagactgggagtaaaaagtgaagattctgagagcatattgagtagcgacaacatagcattggatgagcagactttggaagaggagctacagcatgccattgctgaagagaattaatagcatgcagcagaaataagggatactctgaaaaaccttcagaaagatagcaagacaccggtatgtggagcaaacagtcggttttacgagtcattcaggacgggtgaccttgcagccatgcaagccctgtgggcaaaaagggatggggtatgttgtgtccaccctggtttgagaggaatatctggttatgatgatgttatcgagagctggaattttgtatgggctaactatgaattcccgctagaaattaagctagaagacattaaggttcatgctagaggggatatggggtatgtcacttgcatggaatttgtaaagacgaaagggggcagatggggaggtcaatttgtaacgaatgtgtttgaaaagattgatggacagtggtttatttgtgtccatcatgcttccccagtagacttgtgaattcatcaaactttgcaatatatagatagataggaagttcactctgtagctcatccttgatccttctcactttctatgtttgtatccatttttgttacgttggggccgaatcgtcactcatctccaaagattctgagttgtaagattacaacttgactgtacaacaaataatctgtagaagttgggatgtggattaatgaaattttgataaag

SEQ ID NO: 24866 - DNA, 1355 bp, Glycine max
  Clone ID: PAT_MRT3847_122457C.1
caactcgggcggcgtggtgttagacaacggagcaccacggggcagctgggagcaaattattcgaagccgccgctgaaggtcggcggcgtggtgttatacggcggacttccacgtggcagcgtcgtgcctctgcttctcagccgccgctgcgattctctctcctcagcatcttcttcttactcctccatttctgaccacgtttctttcgtcaagtatgtagctgcgactcagcctcctcagcatctttcacaactcctcagcattttgaaaaccagaggtgaatctattatctctccgggtgccaggcaaggattaattcctcttgctataccactgtcgaaaagtagctctggtaatgtgactgcactgctgcggtggccgacggctccacctgagatggaaatgccagtggtggaagtcagaaactatggagtatggcttttagctaagtatgtagaccaatttatacaccgaatgttagttgttacaggaggaatgattgtacagagtcgggatgaactaatatattattctatcttttatgcagggaggtctatttcaggaaggctgattttgcagagtctggaatttctaacctagatgtctatcttttgaaaaaggttggtctatttccagatatcatagagcggaaagtggcacgacattttgaggaaggagatcttgtttcagcattagtaactggggaattttataccaagaaggagcattttccaggatttgctcgaccttttgtgttcaattctgaggttttgttgagggttgggcgtaaagtagaagctaaagatgctgccaggggagctttgaagtcaccatggtggactcttggctgcaagtatcaggacgtagctaatatagcacaatgggatgatgagcaaattgagtacgttaaagagaaggtaactgaagagggaaggcaagaagatcttaaaaaggggaaggcccctgcacaggttgtattagatgaagctgctttcttgttggatttggcttctatagagggagaatgggatgagtatttggagcggattgccaaatgttacgaggaagcaggacttcatgatgtcgcaaaattcatactttatagagattaatattagcagatttctttccaccaacaggcttctgtacatttccatttcggcatttccagtacttcatagttcatatgaagttttgaaaataattagaggaaaattatacgatttattccgcaggcttggatatttttccttgagttctcatttgttgcaatcaatttaacctgaactcctcatatgcctattatgtgtcatgctctacatataagaataatgatatttttacagtctttttta

SEQ ID NO: 24867 - DNA, 831 bp, Glycine max
  unsure (1)..(831): unsure at all n locations
  Clone ID: PAT_MRT3847_122458C.1
tggagcaagttcggggttgagctacgaggaaaaaccgaagccggagcggttttcgaagnaggtgttgcggaagtacctgaagctgataaagccgctatatgttaaagtttctaagaggtatagtgataaggtgaggttctccggtgagggttatgcggcgtcgccgtcgtcgtcgccgtcggtcgcctctgtttcttcgaggacggagaaacaggggaaggggatgagggtggtttcgaagcatttaggaaagagtaggtcggcgtcgtcgacggtggcgggtgttagttctccggcgaagaagagcgatgacacgatgcagcagcagcttgatgggatccaaagcgccatccttcactgcaaaaggtccttcaactccagagaaggatcaatgtattcggtgaggaaatcatttgatggtgaacatggggaaaaagtgtaatcttgaggattttgttgtgaaagaagaagctcaagctgatacaacagaagagaagagaaaaaaatgttatttttttgtattatctatctagtgcattgtaaagaaaagggaaagaggggagagggatagttgtgatgattagtgagtgtgtgggaggcaggctcccctcccctggtggtcagtgaatgtatgtaaattaatggttaatggggcattatgaaaagaatcaaagggatcttctatgtaatctctgtctgctgagtgtgggatttgcacttttgcactctgcgttgaggcttatcttgatattgatttgatgcccatcatatgattcaaggcaccaacattttatttctgtgatcattgagatgacttccaaaaaataaaaa

SEQ ID NO: 24868 - DNA, 446 bp, Glycine max
  Clone ID: PAT_MRT3847_122459C.1
gttacaactggacaaagccaagggcgcatgcaagtgatctatggctcactacgtctgcctaacctgctttttggtgctaattaccataggcaccctctgccgatacggtgacttctaccttgaagaagaatagcccaattcgaagacacattatgctccaaaaagacgctagtagttcatgctctggagagttgcaactcgccaaagacgagagccacggcgtgcccacctttggatcagacactcgagacctttacgctgaccgaaaacaaagacgtgaccgccgaaccggcgggggagacgtttggactacccacttgagatggacaatctagggaccctacgaagtgaactgcgatggcgtgactagtcttattggtggaagccggccgttgtaatgcccaggcctatcatggagtttgtggtcttgctaacagaaccttaag

SEQ ID NO: 24869 - DNA, 705 bp, Glycine max
  unsure (1)..(705): unsure at all n locations
  Clone ID: PAT_MRT3847_12245C.1
ggttggggataccannnngggtacctataccttttggtataaagaccttccagggaagagcccattgggctcaccacgaaaccaaaggaaataataataggaatagcaacgcatttcgcggttaccgaatttttacacttcacgggtcaataatttggttttaattaaaccacattattatttattggaaacatcctggttgaataagggtgaacccaaaaagggtattggcccaatcaataaaaaggattttaagaaaatggatagagaatattaaaaatggccaaatggcacatgactttatatatattaaacaggtggtcaaacataaaccctaagaaatgcaagggtaagaagtgacttttctggaaatggacccgaactcttccttatacccaagaagaaggtttaaggtacccatcttaaacatggggacacccaaatctcttaccaaagcctaaagggcataactggataactggacccaactattacttttaccaccattattaccacccttgaataactcttggacaaaaaggaagaaaacctttttgggccacaaaaccctggaannaggggtggccaaatgggaaagnnaagaaggattccaagggggtaaggtannngctcnancaacggtnnnttgaaggcatgaaacgcgcaaagggggtgggaannnnngggctannnggggttcaatgg

SEQ ID NO: 24870 - DNA, 303 bp, Glycine max
  Clone ID: PAT_MRT3847_122460C.1
attataaattttttgtttatttttaatttctttttttgtatggaccaagatacttcttgatctgtgggcaaaaacccaaaaggaaacgcttgttaattgaccgtaaaccattgggggggaaaaaggacactacctatgatagcacggagcgttaaaaaacgggccttacctgttgaaaagtgctggaaaactcggggcgctaaagggagaggggattcaaggaactgggaaaaaatgaaccttgttcttgcgaggacagaaaaagtccacatagtccgcggaaaaggggaaccttttgtaaag

SEQ ID NO: 24871 - DNA, 469 bp, Glycine max
  Clone ID: PAT_MRT3847_122461C.1
gagactacactgagcatcgtctagctatctcgatcgaactgtccaaggtcctgtcaccacaaggcggttgtgtggtgtggttaggtcgcgatctctaaaacaagtagcatcacggttgtgctgcgttctgtgtaacaagtgcacgaacaggcttgctaagacatgttacaaacagtgtcgccacgcctaccgtaaggttttttatccgggtacgtataaacgtatacataagtgttacacacccgccggcaacgtatgccagtgttcccgatatgggatgtgaaccacattgattagtggtaccggcaggggttgcacaaggatttaagccacgtgttgtaccgcagaggtgcgtagttcatgttctgcgtagttttagagtgatacgaatccttatagggcgggacagagaggcgagcaggtagccgtgttcatcagcatacggacggtgagtgctagtacgaggtgt

SEQ ID NO: 24872 - DNA, 381 bp, Glycine max
  Clone ID: PAT_MRT3847_122462C.1
tttccggttatgcgcccgggggccccagagagaaaacactggggcgttggagcaaatgactgccacacgaagattctctggagacaacagggtcactgagacaacatctattaacagcagagacttggacataggggcagctgatgatgcaatgccaccaaaattcagaagaaatgtaccacagcacattaggtgagatccgcataccttggtgatctacggagacgcagctcaagtcacaggtggaaatggatctaagtcggaatcagagccagagtcaaattcccggctgagtatacgacgggggacacaagctgtggactaaacacgagataaaaacgagctttgacagaagacgaacagatggaagtgattagaaaa

SEQ ID NO: 24873 - DNA, 1143 bp, Glycine max
  Clone ID: PAT_MRT3847_122463C.1
tttttctgcgacaaattaaatctatgatatctaaaaatctggtatgacagcggtctgagacaggctaattcaagtatgtgaaggaatgttgattgataaataaatcggaagtttccattgtacacaacttaacctatatgaagctgatgtatcatgtatatttctaattgcaaatgaccaaaaatgtattttgattctgttcaaactctcctctgttgcaaaagtaactcaatattgtcattcttgagtccgaaccgaaggctgctgcaagaaaatacgttccgtcccatttgtgacaaattcatgcattaggagaactagaatacttggggaatttctggagatcaagataattttagtttgatccttgattcatcatataaagaatgaccattattacttaatcaatttctccctcttctatatcatttacaggaggatttggaacacacagtggatctccttcctcctcttcatcatcatctttaatgtacaatcctagttgttccaagggattaccacccccaaacttgaaactacccatgccatcctgagagatatcaggactggtctcatctacagaaactcggtaatgctcagcaggtacggcactaagcaattcaaaatcttcaagaaactgagagttctcattgatttcgacagatttttccatctgcagcagtacttgtcttgcagcttctctctcaagctccctctgcgtctggcttctgcagcagcttctgcgtctgcccgcttccgagcatcctcagcagcctttgcctctgcttgtagccttgccctttctttctgtcgctcgatctctagcttttccctctgctggcgcaatttctcaggatcacccttctcaccctttgtcagtgtcttctctcgagctttcaagatagtatcagcaaatcgattcttcaataaggcagctcgataaagtttatcaggagagacctttctctcagttggaccacattctccatcttgatggcaatcagagctgaaagaactaggcttttgctgagagttatcctcaagtttatccaagccaccaacagattctgcaagaaagagtaagattgtaagagtacaagacatcaagggtcaagaaattgtatcaggaacaatattaaaggg

SEQ ID NO: 24874 - DNA, 469 bp, Glycine max
  Clone ID: PAT_MRT3847_122464C.1
gaaggtttcccgtcatcactgtatgacgtcctccttctttgggggggggggggggggggggggggggggccaccaaaaacaaaagtaagatacgacccaggggagagagttaatagctagcgtgaaggaaaacaaaagaaaaggcccgtactagcgtgccctgtgggcccaattgttgtgaatggttggtgaccgttagcgggtttgaggggtggatcttgggggagttgaaaggcgataaaaaccacatagcctgccatgccaattaacattaagttataattatttagatgatcccccaaataaaaaaggaacaaaccaataagatcctcctaggaatagcgtaataatcggatacgcaccaaaacgtgaaaaaaacgaagaaagcgttaaaaaggacggataatattacagaaaaggtaggtgagacgttaatgcgtatgcgtggtgttagtaggcaacggggagg

SEQ ID NO: 24875 - DNA, 208 bp, Glycine max
  Clone ID: PAT_MRT3847_122465C.1
accaggcacacactaaaccttagcattcagatgcacatccccaaccttgcctacaggcatggcacgcatgtctgccaagaccgccaacgaacacacctgtatacatactatactacatgaagattactcagatctcaatactaataccaactcaaacccctatgacaaatgctataactacaacctgccctacctcaacaccaaggcc

SEQ ID NO: 24876 - DNA, 357 bp, Glycine max
  Clone ID: PAT_MRT3847_122466C.1
aaatacacatatcaaggttgatagtatatttgtccagacctgctttgacatgctttatgatagtaaccccatgcttatcagctctggacaaatacacaatcaaggttgatagtataactgagagaagaggaggtctgaatccaagttctcttcaccagttgcaattacatggtccacatgtcggacaagcagcaaaaattgggttgatttgttctgttattgccctcacagaagcaatagcggttggtcgatcttttgcttccatcaagggataccatcttgatggcaacaaagaaatgttgtcaatgggaatcatgaacattgcaggatctttgacttcatgctatgtggcaactg

SEQ ID NO: 24877 - DNA, 336 bp, Glycine max
  Clone ID: PAT_MRT3847_122467C.1
gggcattgaactgcggggcggtgttcaaacaccgtcggaattctgcaactttttctcatttggattgaactctctgtctcaatgaggacattcttccactcttcactcttctcttaaactgcttaatcaaaaaatgaagcgcccgacgctaaacatgacaagccattgctctgcttcgactccctcacaataatctgctctttatctttaaagaaactgctgtagacattctaatctgccctcacttattacaccaacgcttcaaccctttgcttcatctggacagcattgtgagagcagtgccgcttacttctcatggccaacccgcttgaatga

SEQ ID NO: 24878 - DNA, 307 bp, Glycine max
  Clone ID: PAT_MRT3847_122468C.1
tttttttttttttttttttttttttttttttttttttttttttttttttttatggaaacgggttaagaaaacttggctttaaatgaaccttcaccaatggttcaactttcaacaccccgaggaaagcctcagacttgtgattgaatttcaaccccctttagaccgaagctgcttagggccttggtaggtggttacctaccttggacctttaagaggtctttttttggttttttttacaaaatagaccgggggtttaaattctaaaagggtttgggtggtgaccctaaattaggggaccgcctggggt

SEQ ID NO: 24879 - DNA, 362 bp, Glycine max
  Clone ID: PAT_MRT3847_122469C.1
ggttcgggggaatgtctttttctataggggggggggctgatccaaagaatgctctcatcatgaatatgcccaatgctgctctttcaatggggagatattttgtcggagatctcgtcgctgtagatgctaagcactactatacctacatctagcgcacaggctatgtgctcatagcataaggaaaattggctgatgacacgactagatgagaggctgttacgcacatgctggcgcagtttggagagattcatgaaataggcgtgtcgaaattatcacagagaggaatttcttacagtttggacaactcaagtgcgtaccgtagcgactctgatggctgatgggtgcccatatttgtatgctat

SEQ ID NO: 24880 - DNA, 478 bp, Glycine max
  unsure (1)..(478): unsure at all n locations
  Clone ID: PAT_MRT3847_12246C.1
gtcaccatattctacgattgtccccccttcacatatctaccgcctccacacagcattacgtgcgggtatgctgtccccagtattggggagggatttcaggatccacgtttagagcagtgcgagcgacgtttgcacgtgccgactgacgttcctgaagtagattatggtggtggtaaaaattctgctgtcgaaaaggctcttgataaagggtttgaggtcaagtatactgtttctcaagattgcacaacatgcctgggaagtgaaagaaattgctcgagacatgatgctcatttttaccaaaatttatgccattattgccccgatggatctcacgccctgcactgttctaaaagtatgtcttctatcctatcctcgctcctcttttctctaaacaactgactggtgtagcanaatcctcttcatactttgccatctctgtgctcttaaatctgcatctggttcccgtaggaagtacgaa

SEQ ID NO: 24881 - DNA, 160 bp, Glycine max
  Clone ID: PAT_MRT3847_122470C.1
cccacgcgtacagcgggtctcaaaaaagcccttttctatataatcactcaatgcttcaccttgtgcccttatgctgcaaggtttgcaatcacaaacctatgcacatacactggctggtctacgtctgtgcctgttggcgatagccttcaattaaacccgg

SEQ ID NO: 24882 - DNA, 530 bp, Glycine max
  Clone ID: PAT_MRT3847_122471C.1
attaaaataaatgagattggacatgaagcccttgttgacccttgagtggagaagaggaaagcccatatttcgaagcccaataatatcatcgattagtatttaaaagaatatattccatttttcttttacttattacttaatattttttatgatacaaatttttagtaattagtaaatctatttatattttttaataacattattattattattattatttaaattctttgaagaactgaataacgggttaatactacaaataattaattaaattcatacttccattaagcctttcgccagaaaaaaaaaaagattcattcactttttatatgtacaagaagatattcaagagacaaaggggaaaataaactttagaaaaacaatggtaaacacaaaaaatggaccgcttattgagttaatgtaaccctgtggctttaacctgtttctatccagtgttaggtgtcaaggttaccgacatgcatgcattggacaaacctgtatatacaaggagaataagattagcaatttag

SEQ ID NO: 24883 - DNA, 429 bp, Glycine max
  Clone ID: PAT_MRT3847_122472C.1
gaagccaacaacacatcaattctattgcattgaactttaaaaaatttggaaaaaactttaaggaactcaaatgtatttaaagggaaaacccataattgtttataataaacacccttaaacaagactaccaaaaacttgggggaagttaaaacttccccatatttttaccaaaaagcaacctatgctggggcagttggttttgccccactggaaagttgggatctccgtttaaccaagttttaactggggggaattttttggtccttataatctggaagcaaggagttttggaaaccctggggcttttgatttggccttaacaattcttttttttttgggggcaaaccttgctcgtttcctttggagggtaaaaggagtgaccaaccgttgaaactttggagcttccctcacttttttcccagtttttgt

SEQ ID NO: 24884 - DNA, 140 bp, Glycine max
  Clone ID: PAT_MRT3847_122473C.1
aaaaaagcccttctgaaacccaaacatcagcgacttatacaaaaaccagaggcaacccatggacatccgtaaacatatattgatacaagccctgcacatgatgcccaagataacctaggcggggtaatattctaccagat

SEQ ID NO: 24885 - DNA, 965 bp, Glycine max
  Clone ID: PAT_MRT3847_122474C.1
gacagagaagtgacttgcacttttggaatttctctgaagaatgatgacaattgtttcgtccctatgccattaaataactttggatcttctagaggtcccatacagtcaagtaaggaaaccatacaaaatgtcaaaaaaataaaaaatggcatgcacatattgcctcatgatgcaaatgagatgaaaatgatggtattcacaaacatctgtcaagccattacttcagacgttatgaaaactgctagcacaaaagtgaaaggaggaacataggatttgtagtaacaggaacagctcatgtgtttgccactgtgatgagattgcaagtggcattaaacaactgatcatgataagagctttgcagttgctgaagctgcaacattttgcaaatcatctaagtcaagtattttgatggaaaccaaaagcagcattccattgctgttcagtatgacttgcaaaaagttttcaacttttcaactgtttcaatttctcaagaacatgtttcattgatggtcgaatagaaagagtctcttctgtgcatgttaacgcgagctttaaaagccccaacaatttttccttaggccctgcttcccacaaagtagatacaaatagctcggaacaacgcctttctgtcattagcagctctgcccatggtacaatattgaatccatttccatactcagaaaaagatggatcaagtgactttcttccagacatcaattctaataacactacaccaaagctgtagacatctgctttgtcagaaaccctgcaagtggtggcatattccggtgcaacataaccaaatgtgccagccacatcagtggtggcatgcgtttcggatacttcaagtagtcgcgccaagccaaaatctgacaggtaggcattaagatcttcatcaagtaagatgttgctaggtttgatatcccggtgaacaatgcgaggaacacaagagtaatgaaggtaag

SEQ ID NO: 24886 - DNA, 1299 bp, Glycine max
  Clone ID: PAT_MRT3847_122475C.1
atggctccgaaccttgaatgtcgtatgtacgaagcgaagtacccggaggtggacatggcggtgatgatacaggtgaagaacatagcggacatgggggcgtacgtgtcgctgctggagtacaacaacatcgagggcatgatcttgttctcggagctctctcgccgtcgtattcggagtgtgagcagcctcatcaaggttggccgcatcgagccggtgatggtgctccgtgtcgacaaggaaaagggttacatcgatctcagcaagcgcagggtctccgaagaggacatccaggcctgcgaggagaggtacaacaagagcaagctcgtccactccatcatgcgccacgtcgctgaaaccctcaacatcgatttggaggagctctatattcacattggatggcctttgtatcgcaaatatggtcacgctttcgagttactgagtaaacttcattccatgcaggctttcaaaataattgtgactgatcctgatactgttttaagtactctcactcgtgaagttaaggaagttggccctgatgggcaagaggtgactagtgtggtgccagctgtatcagaagaagtgaaggactctcttgtgaagaatattagaagacgaatgaccccccaacccttgaaaattagggcagatattgaaatgaaatgttttcaatttgatggagttcttcacattaaggaggcaatgcgtaaggctgaagctgtgggaaatgatgactgccctgtcaaaattaaacttgttgctcccccactttatgttcttaccacccagacactggacaaggagcaaggaatattggttctcaacaatgccatagcttcttgcactgaagcaatagaacaacacaagggtaaacttgtggttaaggaggcagctagagcagtgagtgaacgtgatgataaattgcttgccgagcacatggctaagctacgccaagataatgaagaggtcagtggtgatgaagacagtgaggaggaagaagatacaggaatgggcgaggttgatgtggataatggtgccgggataacggagtgacaaaaaacttgtaggtatagtaaggcatagatagcagagtacggctttactaattttgtcttttttattattattctttacaaaactgtctttaaatgcggttgtataatacaagcttgaattactttatgttgagatgtcttgtattttattttttgatgtcaagtgatgtcttgtaacttgcgaagcgattttggagtttcttgacgagggtgttcaacccaaactaatgagatttacagttacttc

SEQ ID NO: 24887 - DNA, 1368 bp, Glycine max
  Clone ID: PAT_MRT3847_122476C.1
caacgtgcggaattcccagtccagagtcccacagaagaaaaacaaaaccctcactgagcgctggtaatttgagagacagatggctccgaaccttgaatgtcgagtgtaggctgcgaagcttgaatgtggtatgtacggagcgaagtacccggaggtggacatggcggtgatgatacaggtgaagaacatagcggacatgggggcgtacgtgtcgctgctggagtacaacaacatcgagggcatgagcttgttctcggagctctcccgccgtcggattcggagcgtgagcagcctcatcaaggttggacgaatcgagccggtgatggtgctccgtgtcgacaaggaaaagggttacatcgatctcagcaagcgcagggtctccgaagaggacatccaggcctgcgaggagaggtacaacaagagcaagctcgtccactccatcatgcgccacgtcgccgaaaccctcaacatcgatttggaggaactttatattcacattggatggcctttgtatcgcaaatatggtcatgcttttgaggctttcaaaataattgtgactgatcctgatactgttttaagtactctcactcgtgaagttaaggaagttggccctgatgggcaagaggtgactagtgtggtgccagctgtatcagaagaagtgaaggactctcttgtgaagaatattagaagacgaatgaccccccaacccttgaaaattagggcagatattgaaatgaaatgttttcaatttgatggagttcttcacattaaggaggcaatgcataaggctgaagctgcgggaaatgatgactgccctgtcaaaattaaacttgttgctcccccactttatgttcttaccacccagacactggacaaggagcaaggaatattggttctcaacaatgccatagcttcttgcactgaagcaatagaacaacacaagggtaaacttgtggttaaggaggcagctagagcagtgagtgaacgtgatgataaattgcttgccgagcacatggctaagctacgccaagataatgaagaggtcagtggtgatgaagacagtgaggaggaagaagatacaggaatgggcgaggttgatgtggataatggtgccgggataacagagtgacaaaaaacttgtgggtatagtagtaaggcatagatagcagagtccggctttactaattctgtcttttgttttttttttttcttaattcttttcaaactgtctttaaatgcggttgtacaatacaagcttgaattactttatgttgagatgtcttgtaacttacgaagcgatacgagggttttttgatgagggtgttcaacccgacctttagagatttacagttacttcaaatttaccat

SEQ ID NO: 24888 - DNA, 195 bp, Glycine max
  Clone ID: PAT_MRT3847_122477C.1
gcacctcacacaggaagcggcatacaaagcacacataaagttcatagcggatattaacgagcggtggcgacggtgtgagtgacataaataatagcagcaccataccatgcggcgagacgaagcagcacgagtccaagccgagttgtccgacgacaacgaaagcgatcgcatcgacgactacggtatgagcgagag

SEQ ID NO: 24889 - DNA, 489 bp, Glycine max
  Clone ID: PAT_MRT3847_122478C.1
ttccaaggaagcgtttcccgtcatcactgtatgacgtcctccttcttggggggggggggggggacggcaccaagagtgggtagtggtggctaaggagaaaaaacataactgtaacgcagggctaaaaagtgtaaggatgatagaggagacgaaacagccaagccaatgtagagggaccttatacccaatatgagaatggcagtaataatacccttataaacacaattagacgtagtaaggtgccgagccgacaaccagtgcgacaaacgcacgtgacggtggccggtaaggctgggcaatggcaagtggatacgtggcaagcggtttggtttggtacagggcaacccagtgggcaaccgagtggccgtcctaaacgtggtaattagtaggcagttagcgtatttaggggccatagtgttaatgcacaagcgcagcggcgacatgggcggccgaatgcggtgcagcaggcccctaagcctatgggtttga

SEQ ID NO: 24890 - DNA, 279 bp, Glycine max
  Clone ID: PAT_MRT3847_122479C.1
gttcgttgagcaagattgaaagggaagacgaaagaaaaccgaggttaggggaacttcgaggccaaatccgcaactaacattgagggtttcgtcaaacctcgagaagggtaaggcttagtcgtgaacaaactgcagtttgaatgtcgggtttggcttaccgccgtgtttgggtttttacgtttgttttaccttgttcggtgttggttggtgattggtgatgcaaatggcaagcgcgtcatgcttaaggcagctgtgaggagtcatgtaaatctggtcatt

SEQ ID NO: 24891 - DNA, 355 bp, Glycine max
  Clone ID: PAT_MRT3847_12247C.1
tttttgtgcagaatcgtacctaaaaattaaagagccattataaccatagctcatattcacaagcatactgacttgatagtcattcgataaccttcaaattcttacatgtatttttaaaggtcaagcatatttttatgacactttattacagctggtggagactcttcccactatagccacatatgaagtctggctcatccactgtaggcaccacatgttcagtagtctgagataccaactctagtattaccaaaaagttatctctcttgttaatgagtggagcaggaacgtataggtggcactgtggtgctctcaacggtcaatatctttctatattgaagtgattgacaaacac

SEQ ID NO: 24892 - DNA, 304 bp, Glycine max
  Clone ID: PAT_MRT3847_122480C.1
caccattattgcagacacatggacagattatacatcagaggccataatttatttcttagtctcatcaccgtccaggaccgtgttccataaatgtgtggatgcctctgcatatttcaagaacaccaagtggctggctgatctttttgattctgtgatacaagagttcggctctgacaatgtagggcaaatgattatggatggctgcgtgaactacactgctattgctcatcatattgtgcagatgaagagaactatcttcgtatcttcttgtggctctcaatggttaaacctattctatgacgaa

SEQ ID NO: 24893 - DNA, 387 bp, Glycine max
  Clone ID: PAT_MRT3847_122481C.1
acgtacgtaagcacggaattcgggtcgaggatgcacccaccatcgacaatgaccctttcattacgctttttttttaaggggtgcaggggacacacactggggcaaatactgggagggctacacagatagcactcaaccttggcgaaacaaaaagccaagtttctctgatgaatgacagggttactgaatggtggttgaagcaatccgactgcatttgaaacaacatgacttaaatttgtgctgttttgggacaacatagacattgcaaacacagttgagagttagcttggaagacaagctatatcttttaagtacttggagagaaaagactactatgggaagaagccaatttccaaagaaggctgggaggggatttggaacaagatg

SEQ ID NO: 24894 - DNA, 462 bp, Glycine max
  Clone ID: PAT_MRT3847_122482C.1
ggaagcaaaaaagcagggcctccaaataaaacccacatggggccggggccccattggaacatcaaacccaacaaaaaacagcccccaaaaacaaaaatcggaaggatttttttttagtcttaatccttttccgggcccccaccaaactaagcacccattttttaaaaatccttttaaagggcggaagggcccccacgggcttaaaaaaattaacctttttccataccatcccccacgtaccaggggaaaaaagccccctgggcaaacaagaaaaaaaactggggaaaaagggggccaaacacttaaaccacacggggggggttggaaataatgcaaacggccctttgcaccttggaaagggcccccccaaaaacaacggggggggggggggagttaaaaccccccttgaaaccaggggggccccaacccacaaacggaagggccctcttggccttgaggggg

SEQ ID NO: 24895 - DNA, 333 bp, Glycine max
  Clone ID: PAT_MRT3847_122483C.1
ttgttttttttgtttatttttttttttattttttattttgtatactgagccatcacaaacaaattttcactcttcatttacatttaacccgcacccaaacccttcggccgattgttcctttgtgcgtttcaaatgattgccggggaccgtttgttggaaaccttgggcagaatctggaacatcggaaccgggtccttttttttggctgttaattgaccgctaagccttaggcgtgaatttttggaatccgtgaaaccgaaaggggagcctcacgaggaactagaaagcgtgcattcccctggccgatatgcccaagctgggggcaagcgagcg

SEQ ID NO: 24896 - DNA, 1495 bp, Glycine max
  Clone ID: PAT_MRT3847_122484C.1
aaaagaaaaagcccggcgccccgcgcggcaagaaaagaagcgcggcgacatcacatcccaaagttatagagagagagagtgttaaaagagagaaggaggcagcaattggaagggaactaggcggggacgagcgcagattccgccgcgcggctggcgctcgctccataagacggctgtgagcccttgccgattgggattcccaacgaaccgacacagcctcacaagtaacaaacttataacacacactctctctctctctctctgcaatggctggaatggttcccctttgcattgcatcattggtcactctttttgttgcaacaagtgctagaattcctggggttttcaatggtggtgcatggcagggtgcccacgccactttctacggtggaaatgatgcctctggaacaatgggtggggcatgtgggtacgggaacctatacagccaagggtatggcgtgaacaccgcggccttgagcacggcgctgttcaacaacgggttgagctgcggcgcgtgcttcgagataaagtgcgaccaagatccgaggtggtgcaacccgggaagcccttccatcgtcatcaccgccacgaatttttgccctcccaactttgcccttcccagcgacaacggcggctggtgcaaccctcctcggccccacttcgacctcgccatgcccatgttcctcaagatcgctcagtataaagccggcatcgtgcccgtcagttaccgccgggttccatgcagaaaggtcggtggaatcagatttacgatcaacggttttcgttacttcaacttggttctaatcaccaacgtggcgggtgcaggggatatcgcgcgcgtgagcgttaaaggttccaaaaccgggtggaacagcatgagcagaaactgggggcaaaattggcaatcaaacgcgaatttagtgggccaggccctttccttcagagtcacgggcagtgacagacgcacctcaacctcttggaacgtggcaccttctcattggaagttcggccagaccttcacgggcaagaatttccgcgtctgaaaaaaataacaaaatttaaacatggatgtttgtttttgtagttgcgttttggttttttagttttcccgcgttcaactttccctctattttcccgggaaagtttgaagccgtgttttggtttaagtgtgtagtaggggacagaaagtaagagaagggtagataaggtaaaatgaaagtgactttactataaatgctagtagtgggtgtgagtagatgtttctaccaccttttgttattggagggtgaatttgtgtgatattaattattactaaagtgtattgggtgttgctggcaatatttattacccagcaatgctttttgttgacttggtgggggctgaggaggctgcaaggttcatgtagcccgcatctcctttattatgaactagaaacattatattatgtaatatctttcagttataatgcatgcccctttaaaattggtgaattaaa

SEQ ID NO: 24897 - DNA, 452 bp, Glycine max
  Clone ID: PAT_MRT3847_122485C.1
gcgtacggctgcgagaagacgacagaaggggacggtgacggcgctcgacggcgacggcactctgtttcagcgttctaacttactgcacacatcccaatcccctctgttttcgtttggattgattaaggttgtcacagcaatcaagtaagcactacacaaccacactcacttttcctgctaaactaaacaaaaatgttatcctttggtagaaattgctgcttcaaatatcctggcacctacttcaggagggggaatgcctcaaatcatactaatactatactctccacaaactcattttgccccaaatttgctgaccccaattacccttttggaaaaaatccacggagtactcatttctttcaccatgcccacaaacttgacctctttttattccaaatcaacactagttacactcaatttcccatcccatttgcaccctttaattctcacta

SEQ ID NO: 24898 - DNA, 213 bp, Glycine max
  Clone ID: PAT_MRT3847_122486C.1
cattactctgttactaactcacatggctcttcctttgtgatcatggacaacgtgattagctaactccttatgaacaaacttgctatacacaaaatcatagaatatcacaatactcaacatgttaacataaaggccatgtaaaaggccaaataacctttaaaactatcctaaatctatcgaaataacatgaatcattctccccctctgtctagt

SEQ ID NO: 24899 - DNA, 1113 bp, Glycine max
  Clone ID: PAT_MRT3847_122487C.1
gcacgagaaaatatcaaatcgtgatcagacagcagattttagagagaaatcaacatccacaggatagacctttcacgtagcaaataaagccaccactttatttcccacgtgaaacaagttcaacctggccaatccaccaaacaaaggacatgctagtaatttcaaacagtgaaaaataaaactaataatagtaataataacatgttcacccaaaaatagaaacaaaaacacttccaataaaaaaagataaaaaaaaaagctttccgaatgatttccttcttttttaattttcaatttcgaaccttttctttttcttcttcgggtttgggtcgcgcaaactatgatttattacccttaccgtcaccgtcaccgtcaccgtcaccgcacattccttcgctgacagacgccagcttctgcagattcagcttcacaacagtatcagcaaacagacgcgtgtcctcctcggtgttcccttcgggcacgtccacgacgtacgattccagaacaacggtccagatctttccgtcgcactcgaacccgtgcaccgaggtgactgaccggtagttcctgagcctgtggtcgcccccgacgatggtgaagccgatgacgtgtctgtcgtcgtcgagcaggtcgaggcgctcggtgctggtggcagccggtagccctgagatgacgtggacatcgcgggtggaccccacggcgagctggaagccctccttgacgtggcagctcttgatgaagtgcttgtaggcctgtgggttgtcgaagcagcgcacgacggaccacaccgcgtgtggtggcgcgtggatgcgctgcgcgaggagggaggagctttggcgggtgggtgtgacggagtaggtgtggtgctccagcacggagggtttgaggtcctcgaactcttcagcagttaacccgggtgggggatccaggtggcgccgggtcggatcctgctcctctgcgctggagctgtgcgttttttccatagccaagcgcagagaggagtgagtgaaggaataagatagttgttgggaactccaagctcgaaaagggtaattttgaaaataaaagagggttttctgctgttttggtccctcttcaaatggaatggtcgct

SEQ ID NO: 24900 - DNA, 433 bp, Glycine max
  Clone ID: PAT_MRT3847_122488C.1
ggcacagaacactagcctattattacgcctgacatgttacagctatcttgaaagcttgaaagaggaaacacacatgatttattttgccaaggacaccttttggtattccgtgggctgaaaaaaaacccctactccgaagggaaacaaaatttggtccctgaaatattcaggtcccatgatacaaatttaccctacatagtttaacaagaagataggctgcgatcttccttggggtatccggatagatcctggactatggctgtgaatgcgggattaccagaatgttggtacttggctaacattacttgtgtgaccgcattgaaacctgaacactgggaacctctgtagaaaggccagatacatcggggcttaagcaagggggacaaaggccggtattactgactcatggaccaccgcctaaggacttctgttt

SEQ ID NO: 24901 - DNA, 771 bp, Glycine max
  Clone ID: PAT_MRT3847_122489C.1
caggaataaaaaaaatattaaattacagaattaaaaaatatatttaggtttttcttcttccggtttgagtcacgcaaactatgaagacttattagttattacccttaccatcactgtcaccgcacattccttcggtgacagacgcgagcttctgcagattcagcttcacaacggtatcggcaaacagacgcgtgtcctcctcggtgttcccttcgggcacatccacgacgtacgattccaaaacaacggtccagatcttcccatcgcgttcgaacccgtgcaccgaggtgactgacctatagttcctgagcctatggtcgcccccgacgatggtgaagccgatgacgtgtcggtcgtcgtcgagcaggtcaagcctctcggtgcttgtggcagccggtagcccggagatgacgtggacgtcgcgtgtggaccccacggcgagctggaagccctccttgacgtggcagctctttatgaagtgcttgtaagcctgcgggttgtcgaagcagcgcacgacggtccacaccgtgtgcggcggcgcgtggatacgctgcgcgaggagggaggagcattggcgcgtgggggttacggagtaggtatggtgctccagcacggagggtttgaggtcctcgaactcttccggggttaacccgggtggtggatccaggtggttccgggtcgggtgcgtcggattcggatcctgctcctccccgctgtgcgttttgtccatagcgaagcgcagagaggaagatagtagggaactcaaaagct

SEQ ID NO: 24902 - DNA, 280 bp, Glycine max
  Clone ID: PAT_MRT3847_12248C.1
cgctacgcctcgatccacctccatcccccctccccccccctcctccctttccccttctctcactcccccatcccccgccaccccatttcgcacgctccctcgcccaactgcgacgccgccgccgaggctgtcgtttccaccgtttcccgccacccacattcccgatcaagttgccgttttgatgcctcccacgcgcccctaccaaaaaacgaatcgtgggtttcggttcccagcgcccagcgccaaatgcagctatcgaaacgaatcgcgggccctggaa

SEQ ID NO: 24903 - DNA, 250 bp, Glycine max
  Clone ID: PAT_MRT3847_122490C.1
tgagtgggactgactaagaaccaatctaggtgggggtttctgtgttttaaaacgcggtcttcttataaaaccagccgctgtagaattgtatgtgcgagtttctctcggaccaacactagtatgtgaccggatataaaaaggcgtggaacaaccatagcagcagctcccggcccgggaggaccaggggaacacggcgacgatcaagaagccttctctggtgcagcaaagatctttgtaggcatggtacatc

SEQ ID NO: 24904 - DNA, 253 bp, Glycine max
  Clone ID: PAT_MRT3847_122491C.1
ccggaatgaccgcatcgacgcacactttccactagttatatatcattcactatcacggttgccctgaaaccttcaacgaccgcttcatggggcaccgtgaacgtttacaccggataggctaactctgatcttactggaaacaacctttccgctttaattgcacgttacgtgttcaaatacccagatcttgttcatgctcttacacataataaccataaccacatacaatataattgtacgatccctgacttct

SEQ ID NO: 24905 - DNA, 178 bp, Glycine max
  unsure (1)..(178): unsure at all n locations
  Clone ID: PAT_MRT3847_122492C.1
gttatanatttatggaaaggagaatgatgaaanaaatataatggaggattattttggaggagatgaggttttgttatttggaaaagggaaagatgtaatnaatgatttcgaagatgtggggnnaagtgattntggtagagatatgatggaaaaaaaataaattggagagattgatgga

SEQ ID NO: 24906 - DNA, 998 bp, Glycine max
  Clone ID: PAT_MRT3847_122493C.1
aattcggctcgagaacctttgctgacttctgtctttctctctcttatcatcataattcacaatcatcagagacagagagagatggtgaacgtggtggaatccagaaacagttgcagaggtggcagcagagtgggaatgtgaatgtgaatgtgaatgttgatgccaacggagaactcatgtatgtcaaggtcatgactgatgaacagttggaaactctgaggaagcaaatagccgtttatggcaccatttgtgagcaacttattgagatgcacagaacactctcagctcaacaggatcttgcaggggttaggttgggaaacatatactgtgaccaattgatgacatctggtgggcacaaaataacctcaagacaaaggtggacacctacacctgtgcagctacaaattcttgaacgtatatttgatcagggaaatggaactccaagcaaggaaaaaatcaaggaaatcactgctgaactgggccagcatggccaaatttctgaaacaaatgtgtataattggtttcagaataggcgtgctcgatccaaaagaaagctgcaaaatgtggctccttatagcactgaatcagaagtggacactgaggttgattctaagaataagaagacaaaagctgaggaggagtttcagtcccaacataacataacaacttctggaggggctgaaaagttgtgcttccagaaccctcaagtatactctgatcacttgcactacttgaaccctgattccaacaaaccatattccatgtgccaatcagattgcaatctgaaatccacaagaaattcgagtcatgtgtctgtttttaatgagatgctgtcaaactcaaggagtgagtatgtaggtggaaaaatggaagttgctgggagtgtgagctacaatttattccaccaaacaggagactgcaatctggcgggttgagatttagtgtgagctgtaaagaaccctgagttgtgtggatgggcttgtgttcatgtttatgac

SEQ ID NO: 24907 - DNA, 412 bp, Glycine max
  Clone ID: PAT_MRT3847_122494C.1
actgagcatcgtctagctatctcgatcgaactgtccaaggtcctgtcactgaggttgtattataaggggaggttggttgtggtgtggtggtctgtatgagagaaggtaggtagtgtgtgtggggtgtggggtactgatgggacttcctgaggtaccaagtaccatgacccggggcctgtacgtgaggaagcgtttcgcgtgaggcctgcactagacctagccgtactaaaaccaagtaccaaaaggaaaaacagtcattaaaagcagcacacatgggatcaataaagccaggaacaagcgtaccgggtgtaccctggtcgatgggtaagttggcccagatgagcggcacaattgccaagacaggggtaggtgaaccgagttagcgtaatggtggtatctcacgtacactgat

SEQ ID NO: 24908 - DNA, 391 bp, Glycine max
  Clone ID: PAT_MRT3847_122495C.1
ggccgcaaagtgactgacataaccttttaaaggttcaaagaacctccctcgccgccgccgcggaactctagcctcagctctctcgccgccgttcgccggagtatcaccccaacgccgtcgtcgctgagaaatcatccaccaaaaggcctaacgctatgaagacgccgcaatctgcctctaaattgaaaaggtaatacaaattgctttgtttgttctaattggagttagtgcgtgttttgctagcttattttgaagaaataatagctttttgagtgaatgttttaaggacaagcaattattcctagaaataatctgttacgatactgcacttattagggtgattattaatagggtcaccttgggaaagctctcttgtttgatattaatgatg

SEQ ID NO: 24909 - DNA, 258 bp, Glycine max
  Clone ID: PAT_MRT3847_122496C.1
caattctcttcttttatcttacccccgacggggaggttgcttgactcttcggaaaatcttcccttgatccaacaaaaaataaccctgtttctcttacaatggtccttttatcttttcttcaaaatattaccatgtacccttcacccaacattggttaaaaaaattaacaaaaagcccccccctgagcaagacctaaagtgtttgaaagcaagaaaagcccccctcatatagaggaggggcttatttcctaaaaccccc

SEQ ID NO: 24910 - DNA, 765 bp, Glycine max
  Clone ID: PAT_MRT3847_122497C.1
ctcgagccgatttcaattccttccctcacccaaaccgcactatcgtgggtcgatacgctccatctttgaataggtcctgtttattgagcggttgtggattaagagtaaaagtgtaaaatggccttcgtagcaaatcaacctcagggtttgtgtgtgacatcttcctcaaggcatttgccatggagcaaaaggctaaaggtgaagcagtgtttaacaaaacatcacatgattggaagaactgactggcattgcctagtaaagcggaatgcttgtttaagtgtagggcctcctttcttttgtgtagccaagctcaaacctttgaggatttcaggcttcaaaggaagcacccaaaataaaaatgttgaaagaattgcaggaatggatagtgcacctgtatcttgattatgtggaatctagattgccctattattgtcgaacaatcagatttttgaagagggctaatcttatttaggtttggaaattggaaatattcttaggggtagtctccagaaaggctgaagagggatgaaggagggaatactccgtagcgttgaaatttttaaatgagatatggccaatcccattttctgttggggttttggtgttgagcaagtggtcatgagggttaagttcctaattcatgttatattgaaaacgtcactttattcttagattaggttgtattttttatttatttatttattttgaatcactgcttgtgtttcgaggttctatgtgagattgattctattctgtaactaaaaa

SEQ ID NO: 24911 - DNA, 426 bp, Glycine max
  Clone ID: PAT_MRT3847_122498C.1
cccacgcgtccgcccacgcgtccgtacggctgcgagaagacgacagaagggggggggaatcattgattgtggcatgccatcgcgcaagcctaacgagagcgaaaccctcttgaccatcaacttcttggatagagcagccatcgttgtctggggacaatttccaagctcgtagtgcccaataatcggtaacattatcgttgtcaaagcaatgacttcctcatcgagcgtgaacagcgaatgccaatgtagaaaggccaaacacaaaattgaagtataggtcgacaattgtctcgagttttgccctctgaggattctgagctcctaacttgttaccaacatgtgtggacattttgaaactcaaagaagacaaaaaaatgtatatcaaagttgttgtttgaatcaaaacccccattgatgcccaagaag

SEQ ID NO: 24912 - DNA, 239 bp, Glycine max
  Clone ID: PAT_MRT3847_122499C.1
acgcgagggtgcacgttggcatcatcaagctataaaagaaaagaaaagaaaaaaagaaggttggagttagatacacacacatcacaaaatgattaaaaatctaatgaatctacattgattctcgttggagacatcaaacatggcatctggtgccaccccagatggataattctggtaaaggtatgaaaggtgcatatcctgctacgataactgtgtctagctacgaccttaccaccgta

SEQ ID NO: 24913 - DNA, 140 bp, Glycine max
  Clone ID: PAT_MRT3847_12249C.1
tggtgagggaaaagagggtgcaaggtgcatcttctttttgttgttctctcaaactttaataatctcataaattagcagaccgaagaggaccaaacacaagaagaagattggtattcaaaaatcgtcgcgtcgcgtgggcg

SEQ ID NO: 24914 - DNA, 503 bp, Glycine max
  Clone ID: PAT_MRT3847_1224C.1
tacggctgcgagaagacgacagcagggcctgtcacttcctgatactttatgcggatgggtgtcaaattatgatgatagtctcccaattcattcattggaatatcctgttgtagcaaagaaagtacacaaatgaaatatagttgtcaaaaatggtaagtaactattagaattataccttgcgctggcagggttgacaacatataagggtgatcttttcaggaagagtaagggaaaattcttgaatggcatttcctggaatatgctgcaacagggaggaatcaaatcattagataagtgaagaaggaacatgcagagagattaaaagggcttacaaaccaaaccaaagggaagcaagatttgaaacaaatggactaattcatctaacagtgctttcgtgtctgaaaagctaatatctagatacaagttaaaaggacagaagaaatataagaattctaaccaattcgttgggtctagttctgtagagctttgctttaaaaaaatga

SEQ ID NO: 24915 - DNA, 233 bp, Glycine max
  unsure (1)..(233): unsure at all n locations
  Clone ID: PAT_MRT3847_122500C.1
actgaacaagggttnctctntctctttctcngtcngcttcttcacnttctctcgtttcaatcgagaatcatcatgggcagaaaattcttcgtcggtggcaactggaaatgcaatgggaccactgaggaggtgaagaagattgntantactttaaatgaagctaaagtccctggagangatgtngtagantggcngtaagcccnccttttgngttcctncctttgtaaaaagnt

SEQ ID NO: 24916 - DNA, 246 bp, Glycine max
  Clone ID: PAT_MRT3847_122501C.1
ccacgcgtccgcacctggtgcgtacattgcatagcacttgcctctacttacgagaaagtccaccagtattatatctgagtgaagcatgtagtacttgccaagattgcatgttgctaaatattctaatctgtctgactagtactacatagagggaccttcctctctagaagcacttcccaagagggaagccctactggctatgaccatctgaggcggcacactactcagtgatgactcttcgtgctt

SEQ ID NO: 24917 - DNA, 748 bp, Glycine max
  Clone ID: PAT_MRT3847_122502C.1
tttttttttttttatttttttattttttatttttttttttttttttttttttttttgggttattttatacttttaaattctatatttttttaacaaatttaaattattcctttaaatttatcattctaaaaaaagccccattatggccaaaacaccacaaaaaagaggatccaaaaaaaaacaggccccctaaatgtaaaaaaaacaaaaattccaccccggggggacccccggggttgcccccgaaaatacgaaacacaacccgggggggaacaattgtttcattaaagggggtaacttaaaacaggggatacaaaagaacaaaaacagttccctggaaaaaaagaaaaaccgcccaaaaagccaaaaaaaaaaggccccagacaaaaaaaacaaacaccaggggggccacaaaggacagcaacaccccaaacaaaggctggagaaaaacccacactttcacaaggaaaaaactattcatcaaccttccaaaaaaaaacacaccaacccccgggaaagaagaccaatgccataagggcaccaaggggaactcttttttaaacaaaagaacaggcaaaaaaagtttgccaacaaaccccttaaccaaaaaaaataagtcaaaaacccaccccttggggtcccccaaacaaaaaaaaaccttcaataagggggcaaaacgccaaaaaaaacaaaagggaccttgaaaaccaaaacccccccacaaaaaattccaaaaaaccccagccat

SEQ ID NO: 24918 - DNA, 317 bp, Glycine max
  unsure (1)..(317): unsure at all n locations
  Clone ID: PAT_MRT3847_122503C.1
ttttcaagtagtttggaaccgggaaagaaagggcacttattgagctaattatcaatcttcccactctaaacactttaaataaatgaacacttgctactagccagnntatataatcagaggccttaatttgactaatgttataacaagaaaacactccataaccttagattcattccttgccacggtcttcnaagcaaaatttagcccatttgagaccaaagttttaaacaatagcattagatacttttattcccaataaaactttatcattcacaactcagaaaactttttataatccttttttaccaagggatgct

SEQ ID NO: 24919 - DNA, 351 bp, Glycine max
  Clone ID: PAT_MRT3847_122504C.1
gtggagaatagcagtcatctcacgccacgaagatttctttggctctgtgctttgcgtccgagtctctcccagagcgacagcatccatcttctttcacagtttgccactacattatggttcgtcgtcatttcggattgaatgattcaatagcttagcaaacgatgccatggcaactctgcaatctctgccaccttctttccgtcgatcaatcctagccccaaattcccactcattcacagccactccctttaactagtcccccaaattcattgcctcaaagggtgtcatcgttaggctcaggatctccatcagttctcccagggtttcggtttccagttcggagtatagtcc

SEQ ID NO: 24920 - DNA, 175 bp, Glycine max
  Clone ID: PAT_MRT3847_122505C.1
tcggtactgcccgggaggcagcggcaaaactgccaagttgcaaataagagacggtggctgacaatcaccatacggagggggggcaaaggaaaagcccgaagaacccataacgaatgatgccagattgaggcaaagaagagaacctgcatagtaggaggatcagagcacagatgga

SEQ ID NO: 24921 - DNA, 821 bp, Glycine max
  Clone ID: PAT_MRT3847_122506C.1
ttcctctcggctagtgattgttcttcatggttgttattgatctgatgcgaaatgccaaacggaagaattgctaccaaaaataatgctaacaaaaagagaatgattattacagtaaaaatggggagatgtatgttagaattttcctatatcaatttatgacggctacaattaattgtaatgttttctttacgaaaaataaactaatcttatgatgtatttgatgatacttaagtcctactaataatataattagttgtttatatactttaaacacctaacacctaattctcataggaaataatgtgggtctaatcactaagttcataataaaaggtatttatgattaataaaaagtaaaattagctttcatttattgtcacgacaatcaattagtcactaggtttgtcttacggaaaactctaaacttttaaagtatgtgatcaagtaaaggaatgcttagcttttggatttctgaatgttaccccccaacaaagttttatattcttgatcatgtttggtggtattctaaattcatataaatccgttcgtgataaattatttattttacatttaatatcagagcctacttgtatgatttagaacttggtatattcttttgatttcaattgaatgatgcgttcttgagcctttttcatatctctatttttgacgatttacgccgctgccgtgaattcatatttgatcagatacgaagaatattgttttaccgcacttctaaaattgttcgagttttaagtgtcaatattaactattattgttacgcgtgaatgatctcaattatctttcattatgtgtcttga

SEQ ID NO: 24922 - DNA, 361 bp, Glycine max
  Clone ID: PAT_MRT3847_122507C.1
aaaaaaaaaccgaggcggctcaagatcaagcccaacacaaattacaattttttcatctccacacaaaaatacactccctgcctttttataaactctcccgcaccccacaacaaaataaaactatctcccttacacaactaactcactacacatctacaaaactcataaaaaaatacattaatcatacatacaaaccttcactacccgtctatatattatccacaaccccacctaaatccaataataaaacaccattcatacactatcaatcaatcacaataacccacatacattaaaatccttactcattctctttttcattctcctaaactcaatacacaaatacacttataacccatcc

SEQ ID NO: 24923 - DNA, 227 bp, Glycine max
  Clone ID: PAT_MRT3847_122508C.1
gccgtgtttgcacttctttcatggccttcaagcctggaccgaaccacacacttgctctgattcaaagcatgtttgatgttttgcctggtgacatcacagttgaaggcaccggttggggttacatgttcatcaggaagaactgttcttgtgctgctggcataaaaaattacgtgtccaacaccactttcactgtgaaatccaatgaggggttgctgtatgacatggtg

SEQ ID NO: 24924 - DNA, 495 bp, Glycine max
  Clone ID: PAT_MRT3847_122509C.1
gaacgcttgggaaaaagagaatttccacttcaagggggaggttttgtacaagtatttacatcatatgggaaagttctgggcataatactcatcctaaattacctataagggaggatccgggtgagctacacgaaaaaaaaacctcgaacttaaaagcaaaatgtcggaaaaacatagacccattcatgaccctcttggaccccttgcaaatgaaagagttgctttaatactagaatagtgcacaatatgaggcttggcaacctctttgcaaagtccaaagaccttgtcatgacaaattacaagcctcagagattgtattgaccctggagactctggtacatttataaacatggagcagtccctaatgtcaatcttctccaagcttaccagtttaccaatcttttcaggggaacatgttaggtctacacattgagaaatgtcaatgtactgtaatcgcatcatgtcacacatgctatgaggaagtgttttcagata

SEQ ID NO: 24925 - DNA, 580 bp, Glycine max
  Clone ID: PAT_MRT3847_12250C.1
agttcgtaatgcttccattatatatctcttagatatataagatacatagtcggataatagtaaataggaaaaagaattttaacaaccctgtaaaacatttgaatactactcatcattgacgactggggaagggaaagtgaagaataatgaaaagaatagacaatgctagattaccagtaaaaaaaaaaacattgtacatcatgtcagtccccactttagcttcctgaaagacctcagcttcaagaattgtgccttgtccgaatgatgcatctatacaaagcatgaggcagctgccacttctaccaatggtaacgccatgagagcagcttcaatctccaataggcaattgtcctcattaaggtagaatctatgctttacattttctgaacctcttcatagatagaatggaagagagcagtagaaatatatctctcaccaaaacttggaaaaataaccacaataagtttcccagaatgctcaggccgtcttgctaaatttatggcagcagctgctgcagctcctgaagaaatcccaacctagacagaaattgaaataatatgatagaacctattctaaaagt

SEQ ID NO: 24926 - DNA, 403 bp, Glycine max
  Clone ID: PAT_MRT3847_122510C.1
cccacgcgtccgaaaaaaaaaaaaaaaaaaaaaaaaaaaaaaaaaaaaaaaaaaaaaaaaaaaaaaaaaaaaaaaaaaaaaaaaaaaaaaaaaaaaaaaaaaaaaaaaaaaaaaaaaaaaaaaaaaaaaaaaaaaggggcggcctttaaaagaaccaaagttaacgtccccgtaaatgcaacgaaaaaccttttttaaagggaaactaaaataaaattaatgggccgaaatataaaaagttgggaaagggaaaaaccttggcataaccaaattaaatcgcttggaagaaaatcccctttaagccagttgcggaaaaaccaaaaagcccgaaacgaatcccatttccaaaaagtgcccaacctaaaagggaaaaggaaacccccctttaacgggacataaaacc

SEQ ID NO: 24927 - DNA, 1226 bp, Glycine max
  Clone ID: PAT_MRT3847_122511C.1
atctcctctcgctatcttttcccttcacttcacttctcccatcctctccctccctcaaatcccaaaccagcaaaaacctttcttcacaaaatggcctcaacaactctaacaaccctcaccctccgcacgctatcttatcctacaccctcctcttcttaccctacgcacctctccgccaaaccctcctccctccaattccccaatctctcccaccgcgccgccaccacgcgccgcccccgtgtcgtcgtctccgccgttgaggcgccggagaaaatcaccaagctcggcgacgaaatcgccggactcacgctcgaggaggccaagaacctcgtcgacttcctccaggacaagctcggcgtctccgcggcggcgttcgcccctgtggcagtcgccgcgggtgccggcggcgctgtggcggacgcgccggcggtggttgaggagaagacggagttcgacgtggtgatcgaggaggtgccgagcaacgctcgaatcgcggtgattaaggcggtgagggcattgacgaacctagcgctgaaggaggcgaaggagttgatcgaagggttgccgaagaagttcaaggaagggatttcaaaggacgaagctgaagatgcgaagaagcaactcgaagaagctggtgccaaggttaccattgcttaaacactgtttagctgcagcatatatgttctgcttcttcttttgttggttgtagttgagttcaccagtacactgtaatttcatttccattttgtctggatttcaatcttttatttgtaatgaggaaatatgagttcttatttttatattattttttttaatgcgtatgaggtgtttgttgaaatagaggtgaagggttttaaattgctgaattggaaattggaaattggaaacatggtacttaactacttgctgaatacctggagtgacaagacttcatctgtctggactatgatgtttggctacgctccatagtccatgttaatcttagtggacattgctttgtagtggattcttcaccttttgtaggaactagaactaggaagctactcaatttctttgtttcactctcctcgttcattcttttccatttgcactatcgtgctttactctgtgcttcgggactttggttctgaaatcctaactgcacaaagcttgcaatgtgtggcgataaagattaaaatcattagtgcttattacaaacaaaagttatcagtctaataaaccaaaaa

SEQ ID NO: 24928 - DNA, 188 bp, Glycine max
  Clone ID: PAT_MRT3847_122512C.1
tcgaacacacgtatacttctctctgctacttacttcaaatgcccttgtgtctcactggggctttcttaacctcaaaatttttaagaatctctaacccatcctgaacaatcaattccttctttcactcaattgccgacttaatttcttaaattttgcggaattagggtacactttaggaaaattccaaa

SEQ ID NO: 24929 - DNA, 411 bp, Glycine max
  Clone ID: PAT_MRT3847_122513C.1
actacttctaatgcaggattcatagaatttgggattgggcggaatccaactaccaaatttaataccactattgtttcacaacattcaactttccggtgacaccacaatcatttactacccaatccaatttgaaaccttcacctcaactcttaaaaatctaactaagatatgcctaaacagcttcccctccccacattctcctattaaatatcatacattacacttattgtgcactccctaaccctttatactcaagaatatacccatttcataaacaaaacaaaaaacattatagtccaacctcctactaatcatctcttcaaccccagaattaataccacacctcatccttaaacttaccagctttctctatagaaaatcaatttacaacttatcgtaatcattgttata

SEQ ID NO: 24930 - DNA, 477 bp, Glycine max
  Clone ID: PAT_MRT3847_122514C.1
gccagacaacagctcctccggctccctcccgcaagccacagtcagtcccctagccacgatggcgctgccaagcccggcgagcgaggaagctgaggggccctgtcaggaggcaaaccaggaatatcaggagccggtgtgtagtcctgtgcccgagccggagccagagccggagcccgaaccggagcctgagccagagccggtgccagtgcccccacccgagcctcagcctgagcccgagccccagcccctacccgaccctgcacccctgccggtgctgggctttgaggctgagccagtgcaagaacccgagcccacgcccacagtggagacccgaggcaccgcgcgtggctttcagcctcccgaaggtggcttcggctggatagtggtgtttgcagccacctggtgcaacggctccatcttcggcatccataactctgttggtatcctctactccatgctactagaggaggaaccccc

SEQ ID NO: 24931 - DNA, 1182 bp, Glycine max
  unsure (1)..(1182): unsure at all n locations
  Clone ID: PAT_MRT3847_122515C.1
tgccctggaaaaagtgagaagcagtgaggaaatgaaaaaagtgacaagaagtgaagagaatgcgggttgtttgttgttccaattcaggcgtgagtgctttccctagttgtcttagattccctccactgatcgcaatttcaacaacaccctcttcgatccgctttctaaattctccacccctccgttccactgcttcgtcgcaacacgttacaataatggcttcgaagaattctcaacaagacacgcgcttagcgagaatcgcctctgcaatccgagtcatccccgactttcctaagccaggaattttgtttcaggacataaccacgctgcttcttgatacaaaggctttcaaagacaccattgacttgtttgttgagaggtacagagatcaaaacatcaatgttgtcgcaggagttgaagctagaggctttatatttggtccacccattgcattagctattggagcaaaatttgtccccatgaggaaacccaataaattgcctggggaggttatctcagaagagtattctttggagtatggaacagacaaaatggagatgcatgtaggggctgtacaacctggagaacgagccctaatcatagatgatcttattgccactgggggaacgttaggtgctgcaattaagcttctagaacgtgttggggtgcatgttgtggagtgtgcttgtgtgattgaattgccagagttaaaggggcgggaaaggttgggagacaagtcgctatttgtcttgattaatgggggagcctgatcttttttccaagtgattgtgtttttattagctggctcttgttaggagctttattgatgactgcttagatttccttaagatacattttgatgctgcggaaacggaaagcgtgctttgtttgagcgcgctcagttctgctcaattattattattattatcttctgtgagtcccgtttggtaatgacgattgagagaacgatgtctataatataggacttgcttgccacttggctgcggaacatcctaagtggctaaggtttactgcttgcttgccaactggctgcggaacatcctaagaggctaaggtttacttaaaaaaaaaaaactccatctgatgctcaaaannnnnnnnnnnnnnnnnnnnnnnnnnnnnnnnnnnnnnnnnnnnnnnnnnnnnnnnnnnnnnnnnnnn

SEQ ID NO: 24932 - DNA, 1068 bp, Glycine max
  Clone ID: PAT_MRT3847_122516C.1
ggctcaagtgaagagaatgcgggttgtttgttgctccaattcaggcgtgagtgccactcttccatctttcccttgtcccagattccctccactcattgcaatttcttcgatccgctttctaaattccacacccctccgttccactgcttcgccgcgacaagttacaagaatggcttcgaagaatgctcaacaagacacgcgcttagccagaatcgcctctgcgatccgagtcatccccgactttcctaagccaggaattttgtttcaggacataaccacgctgcttcttgatacaaaggctttcaaagacaccgttgacttgtttgttgagaggtacagagatcaaaacatcaatgttgtcgcaggagttgaagcaaggggctttatatttggtccacccattgcattagctattggagcaaaatttgtccccatgaggaaacccaataaattgcctggggaggttatctcagaagagtattctttggagtatggaacagacaaaatggagatgcatgtaggggctgtacaacctggagaacgagccttaatcatagatgatcttattgccactgggggaacgttaggtgcagcaattaagcttctagaacgtgttggggtgcatgttgtggagtgtgcttgtgtgattgaattaccagagttaaaggggcgggataggctgggagacaagtcgctgtttgtcttgattaaagggggagcctgattttgtgtttttattattttagctggctcttgttaggagctttattgatggctgcttagatttcctcaagatatatattttgatgctgcggaaacggaaagctcagttctgctcaattattgttattatcattatctgtgacgattgacgaatgagagaacgacggctataatataggacttgcttgccccttggcagcggaaacttaaatttaatgacacatgtaaaaggaacggaactccatctgatgctcgtttggagtgtgcttccttaaaactgatatgctcataacgtatagccacagatatgcatcaagtcacacgatcaaattaatttaattaatc

SEQ ID NO: 24933 - DNA, 262 bp, Glycine max
  Clone ID: PAT_MRT3847_122517C.1
tttagttgtgaagttggcatgatcccatactggatggaatggacgggtgcggccaatagatacctgagaaagggcgacgatgatgagcgtagcgatcatgctgatggggaggggtagattgccaagcatgttatgggctagagggttgaaacgatagacagtcatggtggtggagaaccaaaaatggcgcatgaagagactcacccgcttagggcttgttgttcaaggacggcaatgggtagtaaagatagcaggagtgatg

SEQ ID NO: 24934 - DNA, 172 bp, Glycine max
  Clone ID: PAT_MRT3847_122518C.1
ggctcgagctctcttgaggtgtatagttctgacaccatcgactacggctagggcaagattcaagacacggaacgtatcccgccggaccagctacgtctcattttcgccggaaagcaactagaggacggtctgacctttgctgactacaacattcaaaaggagagttcttttt

SEQ ID NO: 24935 - DNA, 888 bp, Glycine max
  Clone ID: PAT_MRT3847_122519C.1
gaaaaaagtgacaagaagtgaagagaatgctggttgtttgttgttccaattcaggcgggagggctttccctagttgtgtgagattccctccactgatcgcaatttcaacaacaccctcttcgatccgctttctaaattctccacccctccgttccactgcttcgtgtaatttccattcaacatctctctctccaatcttcaatcttcaatcttcaatcgcgactattttaacataatacgatttcttcgtttgtgtttggttgcgcagcgcaacacgttacaataatggcttcgaagaattctcaacaagacacgcgcttagcgagaatcgcctctgcaatccgagtcatccccgactttcctaagccaggaattttgtttcaggacataaccacgctgcttcttgatacaaaggctttcaaagacaccattgacttgtttgttgagaggtacagagatcaaaacatcaatgttgtcgcaggagatgaagctagaggctttatatttggtccacccattgcattagctattggagcaaaatttgtccccatgaggaaacccaataaattgcctggggaggttatctcaaaagagtattctttggagtatgcaacagacaaaatgtatatgcatgttgtggagtgtgcttgtgttattgaattgccagagttaaaggggcgggaaaggttgggagacaagtcgctatttgtcttgattaatgggggagcctgatcttttttccaagtgattgtgtttttattagctggctcgtgttagcagctttattcatgactgcttagatttccttaaaaaacattttaatgctgcggaaacggaaagcgtgctttgtttgagcgcgctcagttctgctcaattattattattatt

SEQ ID NO: 24936 - DNA, 2228 bp, Glycine max
  Clone ID: PAT_MRT3847_12251C.1
tctaaatgcagaattacctgcatgccttcctgtgcttgttgatcggatgggaaatgagataacccgacttactgctgtcaaggcattcgctgtcattgctgcttctccacttcgggtggatctatcatgtgttctagagcatgtggtagcagagttgactgcatttcttagaaaagctaatcgtgctctaaggcaggctaccttgggaaccttaaattcacttatagttgcttatggcgataagattatgttgtctgcttatgaagttattatcatagaactgtcgggactaattagtgattctgacttgcatatgacagctcttgccctggaactctgctgcacattaatgggtgacaagaggtcaaatcaaagtattggtttggccgttagaaacaaagttcttcctcaagctttaacattaattaaaagctcattgttgcaggggcaagcactttcggctttgcaaaacttttttgctgctttagtctattctgcaaatactagttttgattctctgctggagtcactacttgcctgtgctaagccttctccacagtctggtggcattgctaaacaagctctgcattcgatagctcagtgtgttgctgttctatgccttgctgctggtgatcagaagtgttcatctacagtgaaaatgctcactgacattctcaaggatgacagcagttctaactccgctaagcagcaccttgcacttttatgtttgggggagattggtagaaggaaggatctaagtacacatgcacacatagaaaatattgttattgaatctttccagtccccttttgaagagataaagtctgctgcctcatatgctcttggtaacattgctgttggtaatcttccaaaatacttgccatttatcttggatcagattgataatcagcagaagaaacaatatctcttgcttcattctttgaaagaggtaattgtgagacaatctgtagataaagcagagtttcaagagtccagtgtggagaaaatacttaatttactcttcaaccactgtgaaagtgaggaagagggagtgcgcaatgtagtggcggagtgtttgggcaaaattgctcttattgagcctgttaaactcatccctgcactcaaggtaagaagaaccagcccagctgcatttactcgagctactgttgtcattgctgtgaagtactccatagttgagcgtccagagaagatagatgagatcatataccctgaaatatcttcatttctgatgcttatcaaggataatgataggcatgttaggcgagctgctgttttggctctcagcacatttgcacacaataagccaaatctcatcaaggggcttcttcctgatctgctgcctcttctatatgatcaaactattgttaagcaagagctcataaggacagttgatcttggtcctttcaagcatattgtggatgatggacttgaattgaggaaggcggcttttgaatgtgtagacacattgctggatagttgccttgatcaagtgaacccgtcatcattcattgttccttatcttaaatctggtttggatgatcattatgatgttaaaatgccatgccacctgatactctccaaactagctgacaagtgtccttctgcagtcttggcagtgttagattcattggttgatcctctccagaagactattaattttaagccaaagcaagacgctgtcaagcaagaagtagatcgcaatgaagacatgattcgaagtgcactccgagctattgcatccttgaaccgcataagtggaggagattgcagtgtcaagttcaagaatcttatgaacgaaatatcaaaatcacaaactctctgggataaatattattcaatccgcaatgaatgattcacatacagttttaatttttttctcagttctggaaggagtgttaaaatattacctgccaagacatctccgctagttgatgcaaggggtctggaaaactagttaatttcattgtaacataggagatttcgattcaagcaatcggaatactagtggtgatttcttgtataggatgaaagattttgcctttttctgtatttatttttcttttagctacattatcttattgccggcccctattggccagggaaaaaattggaaccaaaaagaaaagaaattaacatattaaggaatcatttgaatatttctgtcataactttacttgaaagtcttcgtaatagcttgaagttatgtt

SEQ ID NO: 24937 - DNA, 255 bp, Glycine max
  Clone ID: PAT_MRT3847_122520C.1
agaaaaaaaaaaaaaatggcttggctttattgataaatcacaatataaacgactgaaactacatagtacaatcaaatttccaaacatcacctcacaccttatcctgactgaaacttaaccaccccctttaaacaaaccctctcattcatcttcacctactaactgttgactaagcctaccatgtctcaccaacatcacagcatcatattttaattccgaataaacaggaaacgcctcaattcatacaccccttct

SEQ ID NO: 24938 - DNA, 422 bp, Glycine max
  Clone ID: PAT_MRT3847_122521C.1
cgcagaccagacacgacatcgaaatgtggtgatcatgctttgtaggaaagtgatatgatcattgatcttggatgcgagggttatcatatttgccacatcttaaagtgaaggattcgatgagaaagacatggatcctgtttatggggatgccagttcactaatgatatagaggactatatttataaaggtatactgttgttaccgatagtctttagaaagggatgtaatattgattctaaccttaaggaagaattttttttttactgtaggacatactcctgccactataaattgacacctgactttgatggggtaatttatttgctgttttaatttgttttaaaattaaaatacagtttttttttttttataaagttagaaaattatttgtggataaggaggtactttagtaggggtgaaaa

SEQ ID NO: 24939 - DNA, 346 bp, Glycine max
  Clone ID: PAT_MRT3847_122522C.1
gaaaaagtgggtgggtttgtgacagtcaagaagaccattttgaacaattcaggcagcgtcggtatcgttccgctagggttttggaagaacaatggctgctgctgcttctccagttctccctcaggaactcatagtcgaaatcctgtcatggcttccagtgaagcctctaatgcgattcaggtgcgtttccaaggcttggtattccctcattttccacccttcattcatcaaattgcaccttcaaaggctacccaagaacacccatgtcctgttaactttcgataattaccaatgcctaacctgtttcacaccctgctctattcgccggttacttgagaacccatca

SEQ ID NO: 24940 - DNA, 184 bp, Glycine max
  Clone ID: PAT_MRT3847_122523C.1
tcaaaggggaactcacgttttgcatcttttaatatgcctcagaacacctcctcaagagaacattctaaagctccaacctctgcaccctcaagatctgctctttattgcacatttctcatttcactgccatctcttaccactgatacgtttcccttcagctctttactctcattttcaatatgca

SEQ ID NO: 24941 - DNA, 1103 bp, Glycine max
  unsure (1)..(1103): unsure at all n locations
  Clone ID: PAT_MRT3847_122524C.1
ccacgcgtccggtggcgtctggtccataactggggaggtaaactgattgcagtatgaagaagaagagcagcataaaggcggagctgtggcacgcttgtgcggggcctttggttaagcttcctccctccggcacgcacgtcatctacttccctcaaggtcacagcgaacaagtctctgcttctctcaacagagatgtccactctcaaatccccaactatcccaatctcccctccaagctactctgtctcctccacactctcactttgcatgctgatccccaaactgatcaagtctacgctcagattactcttcaacccctcccttcttttgacaaggatgctctcttgagatctgatctcgctctcgaatccaccaagccaccacctgacttcttctgcaaacaactcaccgccagtgatactagcactcacggtggtttctccgtccctcgccgtgccgccgagaagattttccctcctcttgattattctatgcaacctcctgctcaagaactcgtcgccagggatttgcacgacaccgtttggaaattccgccacatataccgtggacaaccaaaacggcatttgcttaccactggatggagtctgtttgttagtggaaagaggctttttgccggagactctgttttgttcattagagatgaaaagcagcagcttcttttgggtatcagacgagctaacaggcaacccaccaacatatcgtcatcagtgttatcaagtgatagtatgcacattggaattcttgctgcagcggctcatgcagctgcaaataatagccccttcaccgtcttttacaatcctagggctagtccctcagaatttgttattcctttagccaagtactacaagtcagtgtacagcaaacaggcatcacttggcatgcgtttccgaatgatgtttgaaactgaagactcaggaacaagaaggcatatgggtactgttacaggtatcagtgatctggatcctgtgcaatggaaaaactctcaatggcgtaatttgcaggttggttgggatgagtcaactgctggggaaaagcgtaacagggtctcaatctgggaaattgaacagngactgctccatttt

SEQ ID NO: 24942 - DNA, 361 bp, Glycine max
  unsure (1)..(361): unsure at all n locations
  Clone ID: PAT_MRT3847_122525C.1
tttttttttttttttttttttgagaaaaattagcaatttattatcaatgaaaaagtataaatcgtatattaaaaacactatctacacctggttaacacttaacaggagaattctctatgctactgcagtctaattataagcatgattttcacaattctctcggctagtgcagtcccgtccnccataattctgatttcctcgcgcgtaacaaacacaacagattagtctctttgagcatgtctaccctctaacctttcacttcctcactgtataagaaatttaagtcatatatgagtctaaaaaaaaaaaaaaaaaaaaaaaaaaaaaaaaaaaaaaanaaaaaaaaaaagggggcccctcg

SEQ ID NO: 24943 - DNA, 559 bp, Glycine max
  Clone ID: PAT_MRT3847_122526C.1
ggcatactaaaattctgctaatcgtttctagaattacaggcacttcaccaattcaccaagcttcgtcttaaccgccaaccattcatgattcattgcatgccagagaattaattacatatatacatattaataaatctataattagaacaaagcgttgagggaaaaaaaacactagcatcagcatcagtaccacaatattttcccgccaaaaattatgtgagaatctctcccaactagggagagaaaacaagaaaagaaaaaagctatgtcatggtctataaggctggagatgtggggctggtgctcgtatctgaccaccaccagcctgaggatttccaactgataaagagatggggttgataattggtgatcttgcagaaacattggagggaaatactgatgcactgtaaccaggccgtataggtgttaccatatgctgagagccagtcgttggggagggactctgcagactggtagcagaagggccacaggaagaagaaccattaaccagggaacgccaactagcactttgttgtcttgaaggctgaagcaactgctg

SEQ ID NO: 24944 - DNA, 431 bp, Glycine max
  Clone ID: PAT_MRT3847_122527C.1
ggtgttgcctttaaaacacactcattgcacatagtactgcgctttatttaagtgaataaaatattacatactatgccacaaatagcaaaaggacactcatgaaccagatatttgagactcttacagttctcaagaagtcgcgtcagcatttggttaggggggggggaactcagaattccattcttaacgccaaaaagaacagccagtaaagcttctggaaaaggatccactgctagcaagaaaaacaattttcttacctttcccaagtgctgagcgaatccttttgatgatgtctgagagagcgatcgttaactgcaaaactagtccaagcagcggtaggtaaaccatcacgttccctgccacgtgttacatttacaacgacagcttctgaaggtaattgactaacaagatagacaccatccacaaaaatt

SEQ ID NO: 24945 - DNA, 355 bp, Glycine max
  Clone ID: PAT_MRT3847_122528C.1
acagaaacgattcattatttgtgagttacatctcttacaataagattattcatggttttctattctcctgttatgttattacttcaatattccttgatgtagaccaaaaagagatgttcttatgcttcccatgggctggcacgatgccggaacttacgatgctaagaccaagactggtggacctaacggttctatccgtaacgaggaagagtattctcacggtgccaacaatggctagaagaaagctattgatttctgtgaggaagggaaggaaaaacatcctaaaatgtcatatgctggtctttaccatttttcaatctaaaattgcactttccaagaacgggggtcccacaat

SEQ ID NO: 24946 - DNA, 204 bp, Glycine max
  Clone ID: PAT_MRT3847_122529C.1
cggctcgagattttgatgctcagaagcatcctacttgttcatcttatctgttccatgcctggtggttgactatcaggaatgttttagttttgacacttgacagcagtgtggaggattgagttatatactacaaatatgcatgaattccgaagtttattactagacgacatagtattagatgtcacctgtatgttaggggaatcc

SEQ ID NO: 24947 - DNA, 430 bp, Glycine max
  Clone ID: PAT_MRT3847_12252C.1
ataacagtaatttcatacttttctttttatatacttcatgtgcacaatctttgtatttttggattgaaaaaagtggtaagatacaggtacaggtggtgatggctgtgcagttctaaagaaaagcttcaaccctacgtcctgctcttacatctctatatatagagaatgcttcttccattatcttagcttgggccagcaattctgctctctgtattccagaaggatgagtagagaaataatccccgaaggtagaataaccagcaaattttcctaactcctcatacactttaggtgccacccggggatcataaccggctaatgcaattatgtactaagttatgtcacgcctattttgaacactcagtccatctatttatcacttgctcatttgctaaattcattcgcgtattaactcatgtagatgttaatt

SEQ ID NO: 24948 - DNA, 259 bp, Glycine max
  Clone ID: PAT_MRT3847_122530C.1
cttttttttttttttttttttttttttcttttttttttttttttttttttttttttttttttcgcgggggaaagttacggaaaaaaaaacattaaaggggcaaccctaaaaaacccccaccacattgcaggggaaggaagggccttaggccttcccccattgggggggctggaccactccccaggggaagccaggcccccccttgccgaagtgcccataggcaccaggcttaaaaaacctgttatacccaccccttttg

SEQ ID NO: 24949 - DNA, 336 bp, Glycine max
  Clone ID: PAT_MRT3847_122531C.1
tactcttcttctcttgctgctagggttctagcgcaacttcttctacatttaaggacgatgggtaaggaaacaggttcacatcaatattgtggttattgcccctgttgactctgggatagctcactaccactggccacctgctctacatgcttggacgcattgacaagcgtgccattgacagatctgataaggatgctgctcagatgcacaatacggcttatgagtatgcctgggtgcttgatcagctcatagcttagcgtgaaagacgaatcacaattgatcttgccctgtggaagtttgaaaccactcagtactattgcacagacattgatgccc

SEQ ID NO: 24950 - DNA, 393 bp, Glycine max
  Clone ID: PAT_MRT3847_122532C.1
tggaacctttgggctgatttatgtgcttgcatggtcgtgagaagatgatagaaggggaaaatagaaaaaaaaaggcagggcctcgaacgcggaacctctaataaaacgagaccgacccaattggtgatggggaagagaggctaaatctctctccagtgaatatgtgccgtagtcctcgtccctttcgtcgtcccggcctttggcgttatctggctagtgttgggcctgtgcggcgggagtgtgcgtgagttatgctgctacggctggagataagtttctatctcgaggtgtaattagtaattgggagccttagcgggagccggcggctcggtggcgcgagggttcccacgaaggcgtgggagcggctggagtctgtggtggggttctggcgga

SEQ ID NO: 24951 - DNA, 417 bp, Glycine max
  Clone ID: PAT_MRT3847_122533C.1
tatctcaggtctttccagagtttttcatccatgtgttgatcttctctcgataattttattttgtttgtaggaaaatttgcactcctgttgtaataaactaaacatttccattgccagaaaaagaaaaaagataggaaaccaattggcaatggattgagcttatttaccattcatttggttttggattattggtaattgtatcatgggaaaggaactgatgtaaacctatggtgctatttagccatggttattagctgttttgtaatttgtatgcgaaatcattatttacatccttggttgtacatgaggggaacaaattgagtcatttgcattttgttgaactgcctgacagctaacagcttttgcattaaagggtcaacaatttaattgaccccccttttgttggatgtttaaccc

SEQ ID NO: 24952 - DNA, 783 bp, Glycine max
  unsure (1)..(783): unsure at all n locations
  Clone ID: PAT_MRT3847_122534C.1
ccttatcgcaattctgtttctaattaacgtcttcttgcgtttgtgttcattatatatcttatttttctttatgatttttgtatttgtgcggagtctttccacgaatcgtatgagatcacggtgatgactccataaaattcaagctcaacagaccggaatgcagagctttctctctttcgggagattgccttgcgtgtcgataaccccgctgaactgagtgatctcttctgttttttgtttctgttttgtttttattattattgtgttcgttgaaatttttgtttctctgtttctaattattattgaagtatgttttcgaggaggggaaagagtcatcacaatgaggatacaaaagctccctcttctgatttaaagttgaggaaaattgctggcagaatcgaaccataaaatcttagccatcactgagtgatctcttttccccagttatcttttgcctctttctgatttttcgatccctaaatttcactttattttttttcttagtctaattatatttgtgaatgtgtttttagttgtgttctatttgaatgtgttgaggtcagtgatgaattcaatttgcctacattggctgagtatctggtttttattagattatgatgtgtcccaacagtctgaggcctctgagtctgtgtattccattttgtaatacaaaaatgtaattttaattttgtatcgcgtaggattgaatctggtttattacattggacgttgtcataaagaaatatttttgttgattgaatctggtttttattannnnaaaaa

SEQ ID NO: 24953 - DNA, 187 bp, Glycine max
  Clone ID: PAT_MRT3847_122535C.1
tcgttggatcggatgggagagatcggagcaacacattgtaattttctactggatagaattttattggcagccatggatagggcatactgcattaacactgccttggatcacaacattaatcctcgcagagttcatgaagaagggaccaaggggggagaaagccagcgtccctgtatgggaatgacca

SEQ ID NO: 24954 - DNA, 335 bp, Glycine max
  Clone ID: PAT_MRT3847_122536C.1
cccacgtgatcgcgccgcctctcccggagtactccgggtggccttttaagcttgctcggggcgtcaccatgcccgccggtgttatgcaccaccactaccgcaacccccattctcttcttcatcgccgatgaggactaataggaagaagcaaccctcaagcaggcgaagaaaaccgcctgatctccttctgagatgaagacaccatcgtcttcgtctccggagtttaagggcatggcttgggattacttctccatggtggagaacatgcctaggaccttctctaagttgctaagacgattatgatcgtcatattcatgatgatcatgttgagggta

SEQ ID NO: 24955 - DNA, 1507 bp, Glycine max
  Clone ID: PAT_MRT3847_122537C.1
atccacgcgtcatcaacaccaactccaaacagttggaatcgacgaaacgcaaaggcatattgacattggcatggctacctcgctgtgtacacccagctacagagtcacactgaaactgtacggaacagattcccataagttaaacgcaaagccctcagttcgttataggcgtcgttttggcaccaccaccagaatatgctgcacctctaataattacaacgacaacaacatccaacgacgaccccaatccgaagctattcaagtttactcgcaaatcgagagattacttacagattctgttagacaatcacaggatggttggtggggttccccagactggagtgaagttgagggagcttggattctcaaaccgaaaagctctgaacccaattatgtagtgcattttatcggaggtatatttgttggagctgctcctcagcttacctaccggaggtttcttgagcgtctctcagaaaagggtatattgatcattgcaacgccatatgctagtgggtttgatcacttcctcattgctgatgaagtacagttcaaatttgataggtgctatcgcacactgcaagaaacaatccaagaccttcctatttttggtgttggccattctttttagtcggtggtccaccttctgattggatcaagatatgcagtgcaaagatctggaaatgttctcatggcattcaataacaaggaagcaagttcagctgttcctttgttctctcctgtgatcgtcccaatggctcaaaccattggtccacttctatcagatattttttcttcaccaactctaagagctggggcagagatgactttgaagcaactagaaaacgttagccctccaattatgaagcaggttcttcctttagttgagcagctccctcccttgtacatggatttggtcaagggaagagaagatttttctccaaagcctgaggagacacgtcgacttgtgcttagttcagaatcagccattagctcagtgctagacatgtcaatacgaaagttgcctggagatcacggtcttccattgcaacaggccctaccaaatgttccgccagcaatggccgatgcagttaatcgtggaagtgagcttttgtcaaatcttactgttggaacaccgtgggagatagttgcgaaagaagtaggaaactcgctaggcatggattctggagtcctgcgcgctgaagtttcaaaggacatggatatgcttgtcgatgtcatcgcagcctggatagcctccaatgcagggcctaaacttcttcggccctaaggtcacggtttcatctggtccttgtcagttaaagaacacatgctgtagaaatgtataataaatcaatattggcaccgacacttctttcatcctatctcggagaatgccaatcatgtgaatccatacaagtaaagaaaatagaactctgacaatcacctgatgctgtaaaaatatgaattacattgttacaaaaaaaaaaaaaatagttgttatatagaaaaa

SEQ ID NO: 24956 - DNA, 785 bp, Glycine max
  Clone ID: PAT_MRT3847_122538C.1
aatggcttaaaccattggtccacttctatcagatattttttcttcaccaactctaagagctggggcagagatgactttgaagcaactagaaaacgttagccctccaattatgaagcaggttcttcctttagttgagcagctccctcccttgtacatggatttggtcaagggaagagaagatttttctccaaagcctgaggagacacgtcgacttataaaatcatactatggcatatccagaaatcttctgataaaattccaggatgatttaatagatgagacttcaactctagcgcaggtgcttagttcagaatcagccattagctcagtgctagacatgtcaatacgaaagttgcctggagatcacggtcttccattgcaacaggccctaccaaatgttccgccagcaatggccgatgcagttaatcgtggaagtgagcttttgtcaaatcttactgttggaacaccgtgggagatagttgcgaaagaagtaggaaactcgctaggcatggattctggagtcctgcgcgctgaagtttcaaaggacatggatatgcttgtcgatgtcatcgcagcctggatagcctccaatgcagggcctaaacttcttcggccctaaggtcacggtttcatctggtccttgtcagttaaagaacacatgctgtagaaatgtataataaatcaatattggcaccgacacttctttcatcctatctcggagaatgccaatcatgtgaatccatacaagtaaagaaaatagaactctgacaatcacctgatgctgt

SEQ ID NO: 24957 - DNA, 1148 bp, Glycine max
  Clone ID: PAT_MRT3847_122539C.1
gcttgacgctgcgaccattgattcctcagaacctgaccttactttggcaggtgaatgattccaaacttagcaccgagaccaatggaattggatcatagactatgaaatctatctcagaggcaccaaagaacagagctgcgttgatcaagtatgctgcgcattcttttcggcacggtggatcagcttggttgccggcaaccaatggttgaggttggcaacatagaacagcttcagagtaataccacagtgaggcacaaaactcagagctttgatttcgatgagatatcagcaaattcaccaccatggcccccagtgaacaatagtcttgcacaaaactatggggaggatgacaaagaaagtggttctggtgaatgggttgacaaggtcatggtcaacaagcaagatgtaaacaaaactgagaacctcttggggtgttggcaagcagcaaacaatgggaacttatctgaggccttttatcagaaatatatagaagattctcccaaaatgtactcggaacaatcctatactatgttcatgggagccaaccagtttaacattgcgggttctgatgacatcatggatgagcttgatgctgcaaccagtgattcctcagaacctgacttactttggcaatttaatcattccaaacttagcagcgtgaccaatggaattggatcaaagactatgagatctatctcaaaggcagcaaaaaacagccctgagttgagcaagaatgctgttcattcttctcctctaggtccttcaccttcattgaaaaactcaaatggtgtcccacatcgatcaggaaggcatccggctccagttgacgtgaaacgtagaactgggaatagaaaataaacgtgtttactgaaaaggtaaagagagtgattgtttatatttgattttttttttaattttttcaatttttagatcgacgcgagagagagagagagagattgttataattttttttgttggtttgtattttgtaatcacacgggtaatggagcaataatgcttgttgctttgtttgtatcgtggcattcttttattttactctacactagatttttaggggatgtaaaaaaatgaaactcctaacactgcaacgattttttatttgtacaaatcaatttccttataaaaaa

SEQ ID NO: 24958 - DNA, 343 bp, Glycine max
  Clone ID: PAT_MRT3847_12253C.1
aacctttgggctgatttatgtgcttgcatggtcgtcagaagatgatagcagggggagcgtgatatcatataaatcctaggaccactgagatctgcgaatcgtagtatttccagaccctaccattcaagatcaggcgaagtattggaagtgcaacagaatggacacgcatacctggcgccaaatgtaccaagatacttcatctaacatggcgtatgttactcgacacaacatccgatacaaagtagaacccgtaagaatccaccgactagctactcaccaactaatgtacaacccgattcgacataggagaagcaccagaagatctcaagatctcgatagacta

SEQ ID NO: 24959 - DNA, 354 bp, Glycine max
  Clone ID: PAT_MRT3847_122540C.1
cggctcgagcttaaagctcatctctctgaggatgcctttgttacttgtgcattaatagacatgtatgctaaatgtggatgcatggaacaatctcagaacatttttgacagggtaaacgagaaggatgaagcagtatggaatgttataattgcaggatatgggattcatgggcatgggctgaaggctattgagctgtttgaattgatgcaaaataaaggcggcagaccagattcttttacatttctgggagtgctaattgcctgtaaccatgctggcttagtaacggaaggattaaaatatcttggtcagatgcagaatttgtatggtgttaagccaaagttagagcattattca

SEQ ID NO: 24960 - DNA, 688 bp, Glycine max
  unsure (1)..(688): unsure at all n locations
  Clone ID: PAT_MRT3847_122541C.1
gggatgttggcaagcagcaagcaatgggacctatcntgaggccttttatcagaaatacctcaaagattctcccaaaatgtactcagaacaatccgataatatgttcatgggagccaatcagtttaacattgccggttcagatgacatggatgagcttgatgctgcaaccagtgattcctcagaacctgacttactttggcaatttaatcattccaaacttagcagcgtgaccaatggaattggatcaaagactatgaggtctaaggcagcaaaaaacagccctgagttgagcaagagtgctgttcattcttctcctctaggtccttcaccttcattgaaaaactcaaatggtgtcccacatcgaacagggaggcatacagctccagttgacgtgaaacgtagaactgggagtagaaaataaacgtgtttttactgaaaaggtaaagagagtgattgtttatattatgattcttttataattttttagatcgacgagagagagagagagattgttataatttttttcttggtttgtattttgtaatcacacggataatggagcaatagcgcttgttgctttgtttgtatcatgacattcttttattttactccacactagatttttaggggatgtaaaaaaatgaaactcctaacactgcaatgattttttatttgtacaaatcaaaaa

SEQ ID NO: 24961 - DNA, 579 bp, Glycine max
  unsure (1)..(579): unsure at all n locations
  Clone ID: PAT_MRT3847_122542C.1
gctaaacctaagttcacccagtaacaagaatgaatttattaaaacaaaatcttctccccccacaccaccaccacagaaaagattgagacttcttttacagaaagctcaagcgcaggtctaatggtgggtgctccatttgttcacccatcgtgtatgaaaacattgtattattattatcccgacattcacttgcacgcaacctcaacttctctggttcagattcaccaaaggaatttaagggaaagagttgaagagtctcaatcaccctatctggctttgaaacttggtacatctcagcaagacctgcgataaggaaaagtatcaaaaaacatattccatagatactcaaaagctagttaacaatgttgctcttcctaattcctacgtagannnacttctttctaagcatttannngataagaaaataaaaagaaaaaatgatatagtcttctctggtaagcttaaaatcaactattatacttaacttttataatagaaattctctggtccaactttttgtcaagactannngtgtttttgagaagtttttttattagaaaaaactctatatgttcaata

SEQ ID NO: 24962 - DNA, 336 bp, Glycine max
  Clone ID: PAT_MRT3847_122543C.1
ttttcgaacttcagaacattccaagtctacaatgaagaaggaactgtgtttttgtggaggtgcttgttaagtgcagtaatttggctatacctagaagtgagaactcatgcttgcatattgcaggatttggacgtgtttcgtttagttggttacctacctggttcctactgtccatgacaggattttcttcttcagggctattcctgtcttcccattttggggatccaagagttaagaaagaaacacctaatttttctccttttcttttggttaatcggtaattctattgtgtattatacatttacttcattcacatatttaacttattacttttgc

SEQ ID NO: 24963 - DNA, 749 bp, Glycine max
  Clone ID: PAT_MRT3847_122544C.1
agcgtcttaggatgcaatcatgcagacttatcccaaagacagctcgacagcttgggcagtggggaatgacccataataaagttgtgtttggaataactcttatggcggkatttgctggtttgtgagcttgggttaggtggtgaatggtgtggtaaaacgaaccgaatggtgtggtaataggaaagcaacccatgctaaaacgaaccattgtaaggtttaaagactacctgcctctgccattgtaaggtgtggcaatctcttatatacttagttgtgtttgtgatgttgttcaccccgtgaatgagtggatagaactgtggcacaatgtgaatgggtgtgctttaggtgataggccaattttatgcagatctattactgcatgcaaaatgcctgcattgttgctgacagattctccattctcgccatggcatgcagtttgatttattagaataacacgtctaatcaaattaatccttaaaactataacatcaatcaatttggtttttaatatgataaaaaaattaacccctaacttccataattgtcaaacaatttagttcccaatgataacaccagtsaatttaatttctggcattaaaaatctatttaattaaatttaacaatcgttgttaatttaatccacaatttcaaggactaaaatctaaaataactcataattgcaatttcagaattatttactctattatcmacgctaccttgccataaawtttgcagcagagttctgacga

SEQ ID NO: 24964 - DNA, 485 bp, Glycine max
  Clone ID: PAT_MRT3847_122545C.1
gacaaatgaaggcgaacttgggaaagatggaggatcctaagtctgataaaatgaattatccaaagaactacgccacattatatgatttatttggtggattgttaagtgttgctgctctaattggaaagatgccttcggaaaataatcagcatgacacagaaaacccatcaaccaacaagtatacatttggatttggaactagtcaggttggatttttgccaccaaattatgcaacttttcaacaatttgtgaggtctgcatatgtacatactcttggcctttcaggagcggaattaaaggaaataaagaagacaaaaaagaggcatcaatggagtagtcaactcttgaaggcactattgaaaaggccttatgcagcattcacaggaagcgggggaaaaccaaccgatatggaagttgaagcagatatgtataatgtttatagccaatataaacaaggtgaaaccaccggattgggggggttggaa

SEQ ID NO: 24965 - DNA, 362 bp, Glycine max
  unsure (1)..(362): unsure at all n locations
  Clone ID: PAT_MRT3847_122546C.1
nncctttnttantaaaacacacccaccacaccaacaagtttgccttttcaaaaaggggggacaactgcaaaccaaccacaatccaaaatacgccacaagggcacggcccctaataaacacaggattgtggtgtttaaaatactaacaggccagggagactacacaagcctggttggctcctagactggaaacgagaaacgaactttttggtgaggggcgcacatatcaagctgggaccccagcagcttaagtacatgacaatgcttaaagcaccctccagaaagcatcgcccacccaaggctcgggggggggataacacagcaacaacagaaagcttggttgccctggggaaagtgccaacc

SEQ ID NO: 24966 - DNA, 673 bp, Glycine max
  Clone ID: PAT_MRT3847_122547C.1
gcggcttcgttccgctcctctcagacattctcttccctccatttcatccgctccttttcaccgcaccgccattcgcctccgccaccactcctgctccgccgcgcttcaagtcgtcaagaacacgcgccagaggaccttcaagtttccgttttggcaccaacgcagctccacctatggtcgtttcgcctaccaggacgtctccagtgacgaatccgatgtcgaattcgcgggctcgagctctcacaaccaacaactgggtgattcaactcacgagaacattgacgagtggagatggaagctcaccatgcttatgcgcaacaaagacgaccaagaagtggtgtccagggagaagaaggaccgtcgcgatttcgagcaactttccactgtagcttccaggatgggtttgtatagccggcagtatgcaagagttgttgtgtttagcaaggcgcctttgccaaattaccgccctgatttggatgataagcgtccgcaaagagaggtagtcttaccacttggtgttcataaagaagtagacgctcatctccttgcccatctttcacaaaaggctagaaacaagtggggttctttgagtgattccttgcataaatcaagggattctagaagcatcccagccaatgaaggaatgtatgaacaaccagagcccatgacccat

SEQ ID NO: 24967 - DNA, 472 bp, Glycine max
  Clone ID: PAT_MRT3847_122548C.1
gggtattcggaactggaatgaagaaagcacctgtcatgtggctagtgggactctttacggagctttacttggaaatgccgactgggtcatccctgaggctgtcgaatgctgagcgagtgttgaataccttgaggggtactgtggtcgtggatccatgagaaagatcagtttcgttggagatggagaaagcaagtgagggtcgcacactatataatcacttgacgaaggatactagtgatactgctgtcgcgtgaggggtggagttgggttgccagacacatgggagaagatcacatctcgatgcacatagtgtggtggggcctagtgatggtctgcgtggaagctaactgtcagatacctagcctgaggagatgctctggccatcctagacgagctcaccatgggcaaagtcaggtttgatgctcattttcaggcgcgtgaggtctgccttgtgtgcaatgctcattacgac

SEQ ID NO: 24968 - DNA, 445 bp, Glycine max
  Clone ID: PAT_MRT3847_122549C.1
tactagtagtcggccgccctcctttttttttttttaacacaactctttttattaatgacaaagacagaaacattacgtcggtcaaatacgtgacttaagcttacacacctgattcaggaatatggctacttcaatgtctacatttatttaaaaacctgtaacagcacttaagcatccattgggtacgtaaatagatgatactgctgggaattaaactgaaagactgttcgtacttactagaacgacagaacatattgtacggcattttaaccagcccatattgggttgtacaggaaacaactattggacttatgtataagcggatttaactgtctatcggcacgtatgggaaacgatttaaggccctgaagggaccggcatcaggagcccacttgttaccagcgattctctggcccacgcagaacttagaggatgcgtgccttga

SEQ ID NO: 24969 - DNA, 420 bp, Glycine max
  Clone ID: PAT_MRT3847_12254C.1
tttttttctttgccttgaataaaatatccattggaattgtaggaaaactaatatactttatatgggtatagtttacaaaatatctttgttttcaggtctcttgaatctaaacttgaaagccttatggctggaaagaatgagaaaaaagatgatcgtcatgttgacaaaggattggctcgtccaaagttacatgtcgcctcacagatattggaaagagttgaatcttccaccaaagagacatcaaaagatgggctatctgctgggagtttcacacatgaaaccaggacaaactggtctcctgaatgtccggttccagcacggtctgtggaagatatggagactaagcctgaggtttcacactccactgagcaggccaaagttttgaatgtagataatcgggcacatactatatacgaagga

SEQ ID NO: 24970 - DNA, 455 bp, Glycine max
  Clone ID: PAT_MRT3847_122550C.1
cattcttctatggtcacacctcaccaagaaagtgtatttatttgatcgtctatgttgatgacataattatcagaaaaaatgctgctgctgcaatttctcagctgaaaaaacatctattcaggcattttaagaccatagaccttggatgtctaaaagtctaaaatacttccttggtatagaggtagctcaatcaaacaaaggcattgttatttctcaaaggaagtacgctttggatattctaaatgaaactggcatgagtggacattgacagtcccatgaattcaaatcaaaagttgatggctgaacagggtgaacccctctcagatcctgagaggtaaggagactagttgggaaactcatttatctcacaatcaccagacctgacatctcttatgcagttggagcagtgagtcaatttatgcagaatccttacactaatcattggaatgctgtca

SEQ ID NO: 24971 - DNA, 457 bp, Glycine max
  Clone ID: PAT_MRT3847_122551C.1
agggggcgaacggccaggacattccaaaaaaattttttgggcggaaaaaaaaacaaacaataccccccactccctttgggcctttgggggggggaaaaaagggacccccaaaaattttcggtcccaaaaccaaaaaccggggaaaaacaaaaaaactttaagggccaaaatttttgggggagggaaaaaaaaaacccccgctttggaaaggttttccttttaaaaccccccaaaaaaaggggggacccctaccaaaaaaaaacctttaacattttcaaaacccaaacacttggggtaaaaaagaacaaccccaggggttcacccttacctttcatttccaaattggtttttgggtaaaaaaccggtaaaaaaagggggcccccttttcccattggaagacatgccagggcggggaaaaaaaaaaaaaccccacccctttgaaataaatttccccaaa

SEQ ID NO: 24972 - DNA, 559 bp, Glycine max
  Clone ID: PAT_MRT3847_122552C.1
aacataaatataaatattgccattgctaaactatatatatatatgcaaatatttaccacggtttttcattgtcgcaaagtcttggagcgacaataatatagttacacacttacacacacacttcacctaatatagctttagttctacaagaccatagatagcaccacaaagcaaagcacttttttcagtagcactttgcatgtttaactcccacacgtttctacttttttctcttccctcccaactcccaagggaagactaaccatagagtaataagaagcaccatcccaatctcattcccaagcatcatttttttctatcctctattactcacttactttctcatatctgagtatgtaatgtagttgcatatcaaataaacttttctttttttgcctaatttttaaattttctttaaacagtagcagtagtaaaaactctgactggaatataatacctaaccaaacacgtccttgtgcagagagggagcttgacctcaatccacggaactagagctagcaatttatgtaaagggtgtgagtatatatatagagagaga

SEQ ID NO: 24973 - DNA, 261 bp, Glycine max
  Clone ID: PAT_MRT3847_122553C.1
gaaactgaatagatcagatgaaagatacacttgtgacttgcacgactcatttacaatcgcgttcgagttctcttattatgcatctctctctatgctgttcttcgatccttaatacctcaggattcccactgatggtactccctcactccatccctgacttatccactacaatcatactctcctcgccacatatgattgcccaggacgttaatacctttcccattttcactaagacggagaatgatttttaccgagaaaatg

SEQ ID NO: 24974 - DNA, 173 bp, Glycine max
  Clone ID: PAT_MRT3847_122554C.1
gccactattgaagagctacaggggtgctctcataaccccacgggtgtggatccaacccttgtccaatgggggcatactgggcacatgatcagggcaactgcgttgttgcctatctttgacagggctgaccagggctatgttaggggcagtacacatggaggtgcccaagctgc

SEQ ID NO: 24975 - DNA, 242 bp, Glycine max
  Clone ID: PAT_MRT3847_122555C.1
aaacctattagttagggcaccatttcgacttttattgtcgatgaaaatatacgcctgcattcctgaaaatttaaagaacatgccacttggcattgacaaaccttgtctaggctagggctagtttgtgctggaccagtctgatgggtgaatggttattgtgttgttgaaagttttctgtgactggtttccttttttgggtggttaagctgattggaccaagctgttgattggtcatgtatata

SEQ ID NO: 24976 - DNA, 541 bp, Glycine max
  unsure (1)..(541): unsure at all n locations
  Clone ID: PAT_MRT3847_122556C.1
gcgaggtagaaagtaatacccccgaatagtgctccatacgcatattaatatcatccatttcacttcagctcgtaagaaaatctcggcgagagcggcgaaatacgccatgtcgtgttcgacgtaggtgaaacngnncgatgtgccatccgcttttcgatctcgaggagtgcttatagtgttgcagatagccagcccgattatttatgtttcccttttaggatagcagtagcgtagggagatatccnnntttctattttcatatggggcggatcggcgtattctgagcccgatgggatggatgggatgggattcgatgatgctctatggnngttttctctcttgcgttcccagttcntttcttgcttcttcccaggagagagatgcatatggtatttgtcccaagggtcggcagataaaatatcttgggagttccgttagagtcccgccaagaatctcttaggattggctcccttcccagtttcttgatcgcccccgagggttccagctcgagcnttgctgctgcagcggctgtagcttcgtg

SEQ ID NO: 24977 - DNA, 444 bp, Glycine max
  unsure (1)..(444): unsure at all n locations
  Clone ID: PAT_MRT3847_122557C.1
aatgggctcgagtgcggctcgagaagacgacagaaggtgaatcgaaatttattttatttcactcctcccttacttcatggatgctttcaatatgaatggcgggtgaggattatacatttaagaangcaatgatagtagatgctcgtgcaagaaacattagtcataatgtgacgtgcacggagtctgggagtcaatccattgaggattctcaagcatacattgccattttgctcaggaagttaattcttgatgaaattcaatctggaaagactgacaaggacatctacaataaacttgctgactaatttacagagactgtactctatactcccaattttgatatgcagacaacacctatctggttattaccgctcttaattgcaagttcagctgcaagagtatgggcttacaacatgcataaacaaaagactaatgtccacatca

SEQ ID NO: 24978 - DNA, 197 bp, Glycine max
  unsure (1)..(197): unsure at all n locations
  Clone ID: PAT_MRT3847_122558C.1
ttaagatgtttgctaatctcttgcggttcangctcacatagaaacaacttggtgtaacttgactcttgatgatctagaaactcctaacggatccacgcanggatcttaaactatctcacgctaaaatcgcacttcccataaacacagctgggaggaaccattctagcgtggggacgctttgaccacacttttgacag

SEQ ID NO: 24979 - DNA, 517 bp, Glycine max
  Clone ID: PAT_MRT3847_122559C.1
acgagaactaactatgataatactataccattctctaaaggaggcaggacatttgatgtgatgacacggatcaaattgtttggaacatgtatcattattttgcaccttttcatggtatgctagtcatatccgaatcacatacataaaataaaataatcataaaaatatctgccctttccctcatattacagcttgagggggagatcatgcttgacaacattgacgtgaaatgtaaacctgccacgcttttctcgtgtgtgatgtgattcaataacctcactttgaggaagaagcctttccctttcttttctcgatatagaagaagaaaaagagggaaacgacggagaaaacactgaagcaaatggagcagatatcgagggacgcgtggcgcccactcaccgcattgatctcgaacaggttggtgctcttcttgccgtcggtggtctggccgtaagccacttccgcgtcgttggagtccaacgcgtaggcgcgtacgaagtacgtggctttgggcacg

SEQ ID NO: 24980 - DNA, 486 bp, Glycine max
  Clone ID: PAT_MRT3847_12255C.1
tacggctgcgagaagacgacagaagggtacggctgcgagaagacaccgaaaggttccggtgccaaaaaaccaacgaaaggttccggtgccaaaaaacacaccgaaaggttccggtgccaaaaaaccaccgaaaggttccggtgccaaaagaccaccgaaaggttccggtgccaaaagaccaccgaaaggttccggtgccaaaagaccaccgaaaggttccggtgccaaaagaccaccgaaaggttccggtgccaaaagaccaccgaaaggttccggtgccaaaagaccaccgaaaggttccggtgccaaaagaccaccgaaaggttccggtgccaaaagaccaccgaaggggattcctaaaaccaaaccagcccagccgaaaaaaaaaaaaaaaaaaaaaaaaaagccgccccttttaaagatcccaacttaccttcccctgcctgccaactgataacttttctattagggcaccttaattcaatt

SEQ ID NO: 24981 - DNA, 616 bp, Glycine max
  Clone ID: PAT_MRT3847_122560C.1
cactcccatttcccgccacactcctcactatacaaaaacattttcactctcactctctcgttatctctcattctctctgttttctccaaagcaaaaccttccctacacactttcaatggccgccaaaacggtaacccctgacgccgtttcgatgctcctggcaaacacttgccccgattcctcatcggatctccccgaaatcgttgttcaagttctcgatctcaaggcgacaggcaataaatacatgtttactgctaatgatggaaaaacgaaactgaaagctatgatttcttcggatatgtgctctcaggtgctctccggggctattcaaaacctaggtcttattcgcgtccttgattacactgtcaacgtaatacccaataaatcggacaaatacctcattgtcactaaatgtgaacctgtatctcctgcgcttgaaattgagataaagagtgaggaatctggatctgggattcttttgaagtccaaggtagagggtggagtcaatactgaaggtcctgctgctgctgggattcttctcatgcccaaacaagtagtgacaaaatctgccaatcagattctacgcgaacatggaattccgcttctgtgcacgaat

SEQ ID NO: 24982 - DNA, 1930 bp, Glycine max
  Clone ID: PAT_MRT3847_122561C.1
tcggctcgagcaaaactccccttcttggtcttcttctcttaatcctctccatcacattcgaaggggacgttacaaaaaaatcaccattttttctcattggtaatcaagttaagataagatcattcctctctatcaacaaacctttattgtgtatatatatatatattcccacaattcacatcactcttgtccttcactcattcactctatatttcccctccatcctccacattgtgcacccttcatggtgatggcaaaactaaagcacccttcatcttttgtcacattggtggcacttcttctagcagtgtctcttttcgttgctccaacatcctcaacatccagaaaaactattctcaagcaccacccttacccaacaaaagggttccgagtcatgcttcgccacgttgattcgggtaaaaatttaaccaaactagagcgtgtccaacacgggatcaagcgtgggaagagtaggcttcagaggcttaatgcaatggtgttggcagcatcaacactagattctgaagatcaattagaagcccctattcatgcagggaatggagagtacttaatggagttagccattggaacaccaccagtgtcttaccctgcggttttggacactggcagtgaccttatttggacacagtgcaagccttgcacacggtgttacaaacaaccaacacccatttttgatcccaagaagtcctcttctttttccaaggtttcatgtggtagtagcttgtgcagtgctttgccttcttcaacatgcagtgatgggtgtgagtatgtttattcatacggtgattattcaatgacacaaggcgttttggccactgagactttcacttttgggaagtctaagaacaaagtttcggttcacaacattggttttggttgtggggaggacaatgaaggtgatggatttgaacaagcttcagggctggttggtcttggacgtggtcctttgtctttggtttctcaactcaaggaacaaagattttcttattgtttgaccccaattgatgacacaaaagaaagtgttttgttgttggggtctttgggtaaagtgaaagatgcaaaagaagtggtgacaacacctcttctcaaaaaccctttgcaaccttctttttactatctttctcttgaagctatctctgttggggacactcgattgtccattgagaagtccacttttgaagtgggggatgatgggaatggtggtgtgatcatagactctggcaccacaatcacctacgttcaacaaaaggcctatgaggcactcaaaaaagagttcatttctcaaaccaaacttgctttggacaaaactagctcaacagggttggatctttgtttctccttgccatcagggtcaacacaagtggagattccaaagcttgttttccatttcaagggtggggatttggagcttcctgctgagaactacatgattggtgactccaatttgggagtggcttgtttggccatgggtgcttctagtggaatgtctatatttggaaatgttcaacagcagaacattttggtgaaccatgatcttgaaaaggagaccatttcttttgttcctacgtcgtgtgatcagttgtgagagtgtgtgatatatttactgattagtgtatgtttttattgctttgtttgtttgataattttctgttgccggacttgtgttgttatgattgaatctcttagttgttgcaataatatgaacatttttattctctgttcaattaaaatggatcagaaaaaaaatagaccattagaaatgttaaatagttttgcactgtatagatcatctgtgaatattttattagatttaaatacgttgttgtttaatgaaatttgacttttttttttaactttagttactcttaatttttgtttaaaaacaaaaaaaaaaaaaaaaaaacccaaa

SEQ ID NO: 24983 - DNA, 815 bp, Glycine max
  Clone ID: PAT_MRT3847_122562C.1
caaaactccccttcttggtcttcttctcttaatcctctccaccacattcgaagggaacgttacaaaaaaatcaccattttttctcattgttaatcaagttaagataagatcattcctctctatcaacaaacctttattgtgtatatatatatatattcccacaattcacatcactcttgtccttcactcattcactctatatatccacttcatataatttcctccacattgtgcaccgttcatggctatggcaaaactaaagcacccttcattggtggcacttcttctagtactagcgtgtctttttattgctccaacatcctcaacatccagaaaaacaagtttcaagcagcagcacccttgcccaacaacaaatgggttccgagtcatgcttcgccacgtcgattcgggaaaaaacttaaccaaactagagcgtgtccaacacgggatcaagcgtggaaagagcaggcttcagaagcttaatgcaatggtgttggcagcatcatcaacacctgattctgaagatcagttagaagcccctattcacgcaggaaatggagagtacttaatagagttagccattggaacaccaccagtgtcttaccctgcggttttggacactggcagtgaccttatatggacacagtgcaagccttgcacacggtgttacaaacaaccaacacccatttttgatcccaagaagtcctcttctttttccaaggtttcatgcggtagtagctagtgcagtgctttgccttcttcaacatgcagtgatgggtgtgagtatgtttattcataccgtgattattcaatga

SEQ ID NO: 24984 - DNA, 1492 bp, Glycine max
  Clone ID: PAT_MRT3847_122563C.1
ttctatttgattcacaccttcacactgtctctatcaccaatcccttatatcccccctccacttagcataccataattcaccgtcaatttccccattgatgatccatttggcatttcatcatatttcaccacttgtcctactccacttggataatttcctaacgtatagttttcaaaaatccttgttcttcatgagcttatagtttatgagtcctacgatttttggcaattcagcaacactatagatatattattgcagaggatattacagatgcacatatagaaatgtacaaggatgtctggccacaaagcaggtgcaaaagtcagatgaagacccaatgatatgtgaaataacctacaaaggaagacacacatgcacccaagcaagtcacttaaacaaaacagtgatacccccatcaaagacaaaggtgaacttgttgggagaaaataagcaccaaacccatcaaattaagaatcaaccacggcaagagaaaatagaacaacaaccaccagagacatttttcacatttggatcatcatcaggtcttgaagttaaaatagaggacatcgaccacaaggagggcatattcccatcattttgcttttcttctccatcaatagtagggtcagaaaatggggacgacaacaacagcagcatattctcatacaccatgattgagaacaacttaatggaaagcttctctcctgccttcatatctccaacaacttcagatatagaatcaaacactttctgccactgggggagcactggactaggccaaagtgtgcaaagctcagggtctgatatcactgatatagtttcagcaccaacttcagtcaccaattcaccaataatggaccttgatttctttttcgataagatcgatttcgacacagatttccctttgagcaccatggaactttgcacttaataaattgtccccacttctaagtttacagcatatgtgatttctatgcggattaactgtgagttttgtagatcctgactagcaccataaccgagggaaggaagtctataataatcaccatagatcatgtccataaatgaagacaatgaaaaacttccctcttgtgctaattaagagagttttcatgtacctaggctgcaatgtgaaaataatttgtaggttgtagcttaatttggtgcatgtttggtttgcaatggaaattgttgtaatgcgcgttccaatgtagatcttatggataaaagtaaaatgaaatcaaaagagttctaatcttttagcataatggagaacaacttaatggaaaacttctctcctacattcatatctccaacaagttcagatatagaatcaaacattttctaccactgggggagcactggaataggccaaagtgtgcaaagctcagagtctgatatcactgatatagtttcagcaccaacttcagtcaccaattctccaataatggaccttgatttcttcgataagatcgatttcgacacagatttc

SEQ ID NO: 24985 - DNA, 317 bp, Glycine max
  Clone ID: PAT_MRT3847_122564C.1
gccgtccagactaccacacacatcttttattactacaacaaacgatctcctgcagcagaaatagataattttttatcataacaacacctatttcattcattgcattctcatatttcatccttagcaatttttcaacacagacaaccaaatcaaggcaacttctcttctattattattttcaaccaatcataatattcataactattataatctaataacactaattcccatttcatttagatttcccataatttacatatattgaaatgcattcctaccatttatttttatccttaatttctgaataatatattaac

SEQ ID NO: 24986 - DNA, 467 bp, Glycine max
  Clone ID: PAT_MRT3847_122565C.1
atgacggggttgagttgtcattgtggctgccttactggcttagctccatcctctaaaagcatcctatgcatgtaggtagatgagctaataccaggaatgtctgctaaagtccatccaatggctttcttgtgcttcttgagcactagcaacaacttctcctcttagcagtaagggaggcagagatgatcactggaaaattttccttgtcctctaagtaagcgtacttgagggttgctggtaagggcttcaactctagtgcgggtggtggctaaacagtgggaggaaccagggtaggaaaagaggagggttcctcagcctgtacctcataaagcaagccagaagcggatgtacttcctgcaacatggttaatgcattttgactctaaaaaatcaacatcaagaggtacaacacccagaaaatcagaatcggactcaaattcaaattcactctcatcataaaaatcagat

SEQ ID NO: 24987 - DNA, 568 bp, Glycine max
  Clone ID: PAT_MRT3847_122566C.1
ggaattcggcacgaggaaggattgtttggaggttctggacttttttaagtttgttgctacttatgagattggttcatctttcgatgcaattgagcttcagaggcttctagatataatttccctgcaatatcaaactctgcatgcccttggtaaaactgaagaacctccagataatcaatcgagtcccaccattgatggaagaaatttgcagtttccctatattgagcacacaaatgagtttattagcgccaacatgttagttgatctccatccatcatcagatccagcaaaagttgttttggatatgattcacatccctattggttcagacaaaaagggaggccaaggtgttattatcattgatgagagccacatctttctgttggaacagttgatgagaatctcaccacgggtcaaaccccatgtaagagaggaggcgcagaaaatagcattcaatttggaagcgaacatccgagaaagtgctgaaaactctttgacaattctgggctttctatatctattgcccatttatggattgggttctcattttaacaaagatggactctta

SEQ ID NO: 24988 - DNA, 192 bp, Glycine max
  unsure (1)..(192): unsure at all n locations
  Clone ID: PAT_MRT3847_122567C.1
gacccacgcgtgcggagaaaacgacgcaagcttcaactacaactgggaggcttaggcttgggacaaagttgcagttattggggctggtggagggataggtcagacactcgcgcttctcatcaagatgtcgcctataggttccnacctgcatatttatgatattgnnagagtaaagggaggtggtgntgatat

SEQ ID NO: 24989 - DNA, 148 bp, Glycine max
  Clone ID: PAT_MRT3847_122568C.1
acaacaatgaagctagtctgcaactcgtagtatcacgtacgagataaccatctgaagaatcggatctcattaggcggcatgatgacaacatatataaaactctcctggacaacttagctgtatatctgtctcgtaatgggcgaatcgc

SEQ ID NO: 24990 - DNA, 393 bp, Glycine max
  Clone ID: PAT_MRT3847_122569C.1
atggtgaagaaggtctccgattatgtggggattaatggaaactggttgaatgataaaaaagatgacatggcttggaagcactctagtgatggtaactttacttgtttgactatcatctctcctgatagagatgacattgttcttcccattcctgagaatgagaatccaaagggtttatggtttactactaaagaaggtagtcattaccggttgaaattcaccttcaatgaatttgacattatcatattttttcagttgaaaaaagtgcatataatcatgcctcctttgaccaagttgacaggaatggttgcttgccataataattcttcagttggttcttctccctcatcaccggtatcggtcatctccaacactatctctactacgaaatag

SEQ ID NO: 24991 - DNA, 479 bp, Glycine max
  Clone ID: PAT_MRT3847_12256C.1
aatacattgcaagattttgcaatttttgttacacatgctctttagagtttccttcatttttcctcctccttttttaggtggtgtacctgcttattatgggctcatcttttcttgttttagcacttagtttgtgttccttgtcttgtctctcactcttggctgtgtttagcaagagtaaatacctagactttgttgcacttgaaatcagagagtgtgccaaattgtgtgtcttaaaattccacctaaagctttagtgttcgcatggcggctaattaaggatagattaccaacaaagttgaaccttagtaggaggcaagtggtggtgaatgacacgacgtgcccattctgcagtagtcatgaggaggatgctgcccacttgttttttcactgcagtaagatcctacctctatggtgggaatcactatcttggattggaatagccactgcacttcctcaacacccaacggagcactttatgc

SEQ ID NO: 24992 - DNA, 835 bp, Glycine max
  Clone ID: PAT_MRT3847_122570C.1
aaaaacaaaattaaaactttatttatttttgtgtgtagaagcagcaatatcaatagagtcggcctaacagcattctcgtttatagtttgggatgaaatttagttcatgcagccttcctgaaaagtagcttatagatttatttgaccgttttctttttattacaatataagaagagcttatgagcaaattatttaagcatgaatttcaataccttgttcacataaaactagagctaattacttagaattctccaaagttgtgcaaattttaaacaagaactttctgcacagcgaaaggtgtgctatcaacttttgctggatatcccaacaccatctcaacgatcatttcagcagtccccaaagccattaaaagtccactcccttcatgtccagctgcaaggtacacatttgacaagccaggcacaggcccaatcactggcttcccattaggcatgtaaggtcgtaatcctattctgacttttctacttgcacttagatctgaaagtggaagtgttttcaatttgggaaagaattctccaactcgcttccatatgtaactgacaacagactcgtccaaattggtgttgaaaccaacaaattcacggctactcccaagaagaagatttcctgctgcatctatacttgctaccattgaaacagataagttcttttgatgatcaggggattctgaaccagaaattgttggatggttgagataatctgcctccatcaagccatgattcatttgaaggaaattgaaattttgcgccacaagtaggtgaccctttctgggcattactggaacatgtaaatccattccccaatttctaaacaag

SEQ ID NO: 24993 - DNA, 448 bp, Glycine max
  unsure (1)..(448): unsure at all n locations
  Clone ID: PAT_MRT3847_122571C.1
cncctaacatcnncccaaanngnccnncnnnaacggctnnaannnnnntaacngnngnnaaatntccngnggncttnccacacnnngntancnccacatnccnctnccncannnaccagagnnantnagcgnnacaanaanagnnnncancnncgccnccganngcngaaacngcacncnanncancncancntccancanagnnngnnctccccacacaagcnatncngnnnngagcgncncnaggntgnncacngncagtgnnaacacacaactcnncaacnncanccnnnnccaaggagtccnganaccaaccngnngnaannacanacagcanaccacgtancnnacanantnnagaccanngcgncactcnannannananagngngnacacgacagntccaccacagnnacnncngcnngangantagcnanngnnggnnan

SEQ ID NO: 24994 - DNA, 264 bp, Glycine max
  Clone ID: PAT_MRT3847_122572C.1
gcgagaagacgacagaaggggatggatgtgtaattgtgtaggtggcagaaaaaatgaacttcatagaacaactcaagttggaaaaggaaagacaacaaaaggtgcactatctttacctttctaaaacatatttccatgacaaatgacatgctctgagttaaacattaatgtcttgtacttctctcccttgtgtagttagaagaagaagaagaaatcaggaggttgaggaaggaactcattccaaaagctcaaccaatgccttat

SEQ ID NO: 24995 - DNA, 398 bp, Glycine max
  Clone ID: PAT_MRT3847_122573C.1
agcacacttgcgaccgcgtgaaggcaatgcaggtccttgctttcttcgcagcgccagctatggcagcatgagcattgcatgcgataggatatgcaaatacatctgaatgaacactggctaacgcgcccggactttacccttctaatgcacgtggtggatgttggcttgggaatcacacaacatatattaactacacaccgttcatgaaaagtgcgttgtagcaccagaacattacatgcatgtagcacaatataggttagactaccaatgacttaaccaaagagctgacatgtatgcctgagacctgactacccatgcgagagacacatttgtgggcaagatcaatggtgacgtacttagctaaatgtgcatactacagaatacatgcctatagagca

SEQ ID NO: 24996 - DNA, 595 bp, Glycine max
  unsure (1)..(595): unsure at all n locations
  Clone ID: PAT_MRT3847_122574C.1
gtggcggccgcttcgaggnccggcccgggtctccgaaagcaaaacgaaattcaacaaataattacgcgcaacgactcatcatcatatcggccaaaacctaagctttggtggttttgtctctctttgttatggcaactctgaatggcactgcaactgcagagagaggcttcccaggtaaagacaatgatcatggtcatcataatgataatgatcttctgtacgagcctcagcatttcggggttttggggctctggccatttattttacttcatccttggttgtggctcaaaaatgacaaaatggccgtgccttattaccaaggagttcctaaagtatacgatgaaggccatggcaattcccccaccgttccatgaccaaagttggattcatatatatatatatatgtatatatatatgtatataagtgcatgagagttaaaaagtgatatatctaaataagtaaataaataacttgcatggcttttattggatgtgttccatgcagctatgtatcttttgtggcatgtatatatgtatatgttgagtcatgtaatggatatgtgctgcttgaaataaaattctagtttttctaatg

SEQ ID NO: 24997 - DNA, 343 bp, Glycine max
  unsure (1)..(343): unsure at all n locations
  Clone ID: PAT_MRT3847_122575C.1
aatagcatgcacgcgtacgtaagctcggaattcggctcgagcttctnntccgagacantagcaagagnntaaagctagagngntacancanntgacatnngggagactncannagcaccaaaactncctnaacgcntcntccanantcctcttccgtgccactatctnagtncgcactcatcctcgtcttcntnttcaccttcaactancncgcctcgnccnagattcacctcccaccgnnagctncatcgnactcncacttcntctcctctcctnntcctncgcctcctgggagaagcaggtgcgccagtcctngatggtcgcngnnccaacggctcaccgt

SEQ ID NO: 24998 - DNA, 377 bp, Glycine max
  Clone ID: PAT_MRT3847_122576C.1
atccatgggaccgcggccctcgagtatagctcttttcaagataccaagacccttcttggtacaaccaccgtctcaaggccttgaggccaacggaggcaaactctgggaaactcctttggtgggccgcgctttggtaagcatgaatacagcccccggttcatgcaaaacaaatacgcaggattgccatcctgcggcgtcatccataatacgcaacgggagacattatttaggcccgcactgttgcctgcacgcacggaacgataggctcgccaacgaaaccaaatacggaaaacagggcaaaactaacgactcccatttccgtgaacagtgaaacgccgaaagttttgggttcatccaccaaagccattggccgacaa

SEQ ID NO: 24999 - DNA, 362 bp, Glycine max
  Clone ID: PAT_MRT3847_122577C.1
atcctatagagcggccgacggggactccaagcccttaccaaatacttttttaggaggtgaagttccttctgtctttgccatggtcgataatttccaaaccaaataattatttaaaccaaacgttactcggcaccactgcttggaatggccagggggaattttcttggccttctgaacaccaactttgagggtggaggctttggtgggtactttaacccagacttttagataacaaggggggaggggcgggccaaaattcttaatagaggggaaatttttaccttggccctatacaagacacctggctctggatattcggctaagaaagagtacctgtgtggaaaaaatgacatgcaactaaa

SEQ ID NO: 25000 - DNA, 475 bp, Glycine max
  Clone ID: PAT_MRT3847_122578C.1
tttttttttttttttatcttctaagaagtaaatttgcaaaatataaagcatggaagaacaacctttcagtttggttacatgggacatgaaatcactactataactcacctcctcatgacactcaaacttggtatggaactatggatatggagatttaaattacttaacaaggtatcttacaaaaaatcttctaaaggtgaagaactgaatatagaaatcctccttcttttcctggttcctaaaatgtcctctgaaacagaaaatctattgagcactgccttgagagcttggtgaacagaaccagcgagaaactgacggtatgcagcatcttcaaagttttgttctttactactaattatcacaaagacattcttcatcctgccttccaatggtgcaatatctgcccttgttatcataagatgaagggcatctagtgcttgttttatatcagataatagcccgggtttactcgtgc

SEQ ID NO: 25001 - DNA, 733 bp, Glycine max
  Clone ID: PAT_MRT3847_122579C.1
cccgggctcgacccacgcgtccgggggttttgccgtgagtgccgaccctctcttctctttccttcccttataaactttaaccttcgcaccgtttctattctttctccctcccactttcacttgcaggccaaacgcagcgtttcggcagcatgatacgcggaggcgaaaactacgtttcttccgctccggcgttctcgaacgacggcaagcgccttctcgtttgcagcggctccaccgtgtccatcttcagcaccgccaccggctcccttgtttcctccctcgaaggtcacaccgccgccgtcaccgccgtcgtggtgatcccctcctccactggcctaagctactgctggaccgcttccgtcgacggaaccatccgccactgggacttctccgttcccgaatgcgtcaagattatcgacctttgcttacccatcttctctatggtggtgccttcgattttgtctccgcgggaagaaaacgggaagaagacggcgaatgctattgcttacgtgtctgttcaagttataaacgcaccggacaatcgccccaagcctctttatggacagatcaggaagtgtaatttgacccactttcgctccgttagccaacttatcttgaaagagaccgaacgaccagaatctttaaccattagtcacttgggaaattgtttgggtataaaagacaaggcggaaacttcatatatggggcagttcctaaaaaaggactctgattc

SEQ ID NO: 25002 - DNA, 1475 bp, Glycine max
  Clone ID: PAT_MRT3847_12257C.1
aattcggctcgaggaagcacgtttgagaaatgttttaaagggtgacaacgatattaggaatgcaaaaacttctgtcactaatgccgttttgcatgccgaaagaagattacatcaaatgatgtacactgaccgtgattaccagaggaatcctattttgaagttcgcttctgttaccccaatagtcaccgtccaaaattgggcagaaaggggttattctgtcgtcaatattcagtgcaaggatcgagttaagcttttgtttgatgttgtgtgcaatttgacagacatggagtatgttgtgttccatgccactattaagacaacaatcgaccaagcgtatctggagttttatataagacacaaggatggcaccccaattagttcagaaccagagcgacaccgtgtgattcaatgcttgcaagctgcagtggagagaagggcatttgagggtgttaggctagagttatgcaccgaagacagacaaggacttcttgcagaagtgatgagaactttccgagaaaatgggctgaatgtgacaagggcagagatatctaccataggggacatggcatcaaatgttttctatgtaacagatgcgataggataccctgctgatccaaaaatcgtggaatctgtaaggcagaaagtagggttaagcaatttaaaagtcaaggagttgccattggtatgccatgagaaggcagaaagggaggatcaaccagttggggttggtggggcagtgttactgtgtctggggagcctcgtgagaaggaatctttacaatttgggtttgataaaatcttgttcttaaaaaagcagaaaggggcgggaatttaagtagtgtgggaagatatttgccactttcagagcacaaatattcttttgcttgaggtttgggctttgtgtacataaaaagtgaaggggggatttggtgatagtagttgttgttcgttggttggggttggatttggtaggtgaaaactgattcatatacagctggaggggattgtgtccccacccttttaaatgctctgcgtgaagagggggaagtatttaagagagtttggagttgcaaaagaggttgtcggccatggtaaaatttaaatatactagtagaggactattggattctttgttggcacagaataggtagaggcagaacaaatttggttcatacactacagcacaaaatttgtacataacggcgtatcaattaatatcattattaatttaatgtctttatgcacgctatttaagttttatgggtgttgttttttaagtcaccatttacgttggtgtggaggataagatatctctcctttcaacatttttttttttcattttatggggtgcacagctttatggctactacacgaatgttatttgttccatttaggcttcatataaaaaaaactcatgaataggtcaagtgaaaaaaatttagcattaaattacagaggctactatctttattatga

SEQ ID NO: 25003 - DNA, 135 bp, Glycine max
  Clone ID: PAT_MRT3847_122580C.1
gaacaaggtcagcagtgcttaagcagtttaccgaaatgtgaacgtgcatgaagagccaatgattaagtacaagggaagacgattgactacggcaccagttggatgcacttcccccttcttcacatactgctgcac

SEQ ID NO: 25004 - DNA, 384 bp, Glycine max
  Clone ID: PAT_MRT3847_122581C.1
tttttgtcttgattgtttatgcattttttgtgtggggttttttttggggaagagaatctcttttatttataaaaagaactgaagtctctcggaggggtgtacatgaaagtgtttcaaaacatggttttaagacaattcaataactgatcattctttttgaccatgtccatttttaagaaataggaaaatgtacactctgttcagttcaggggagtatgaactctccatgtacaggaggatattccctacggcccctaagcatgggcactattggggttcccaaatttattggagggaacaacaaaagaaaaagtcgggagtttgtcacatgcttctctttaaaaaatgaataaaggttgggtacttggggtttcacccaaatac

SEQ ID NO: 25005 - DNA, 470 bp, Glycine max
  Clone ID: PAT_MRT3847_122582C.1
ggaactttgggctgatttatgtgcttgtttatgtgcttgcattcgtgagaagatgatagaaggggaataatacccgcctcagataagactctgtgcactcgcctttaaaagtccggccgcaagaacggtccttggcgaatagaaacctttcttctaataataataaatatagttcgggaaggagtacgtcacgatcttagcattttaacctatcagtttcgatcataagttcctaaacaaatcctaagggaagaccgtaccagctatcgggggcgacctcgggaccggatgagtggcgcgcaatccgcccgttccagaaggcgtcattgcggttcctatgcacgcgaaggggtacgaggataaggatgtgagggatataccggaaacgactaagagagtaaagatcctggacgttaaggacttaacggtaacagtactcgacccgggccatgacgagaatcgtaagaagg

SEQ ID NO: 25006 - DNA, 465 bp, Glycine max
  Clone ID: PAT_MRT3847_122583C.1
gctgcgagaagacgacagaaggggacacgtgcgagtgatcaaatattaagaagaggttatggatgtttttaaggtttttcacatgcttgtcttaaaacaattttccagcaaaatccaaatccttcgttctggtaatggcacagaatacatgtctaaaagcatgacacagtatttaaattctcatgtatcaagaggggttgttccttttgtttgattttttttcttcttgccaaactatggcagaagatcattcttcttcgcatatattgccttcaggagctacaagttttcctggtgtgccttttgcagtagctacaggttccactagtgtggctgttggaatagaatttgagtctaatcctaatcaatgattgagctctgttgtactaaatgagttcaattaccttccttggtcaaaagccataactcttgctcttggtggaagatctaaattgagtttcattg

SEQ ID NO: 25007 - DNA, 519 bp, Glycine max
  Clone ID: PAT_MRT3847_122584C.1
tacggctgcgagaagacgacagaaggggtgttgttaggtttgttaattgttattatcatctttagcttagttggaagggttggttgggaccaaaattgacctatcatcagattgcgcatggcacacgaggtgtctgttgcaaattttaagaaaaaaaaaaaaaaaagagcgtggtcgcgagagctgcatgcatttcaccttcgactctgataaggaccactctgtgtatcgttttctttgcatttagaaactgccatatatggagggctatgcttaactgtatatgtcaactcaagattcgtttaaaactctcttttttttggttggggaaggtgcttgccatcaatgtgaggaaatttttaaccatggaatgtttgaggtcttaaaaacttccttgtcataatagagaaataggctagcaaggcaaaaaggcgaataaagaatacgcaaagaactatagttattaataaaaaattaaataactacagtgtatttaagtgactataatgtgcaagaaca

SEQ ID NO: 25008 - DNA, 287 bp, Glycine max
  Clone ID: PAT_MRT3847_122585C.1
ctcgagtcttttttatttttgtcttactgttctgaaaaatatcactcagtataaactcattgcatgtttacattatttcatgagtaaggcatgtgctttattagaatggttagtcatccttctttaaaatacctttccttttgttatacacattgttttaaaggaacttctatctcttaaagatttgtggtagtttctttttagtgttcatcgatattcaatcatgtttaacatttttgttgccctcttgagccactaaggcttactattaatatcttattcgcctc

SEQ ID NO: 25009 - DNA, 572 bp, Glycine max
  Clone ID: PAT_MRT3847_122586C.1
tacggctgcgagaagacgacagaaggggtatatggattcatagcaaaaattggggctggcttgtttttattgattcaagtgataattttacttgactttactcacacttggaatgatgcgtgggttgagaaagatgaacaaaaatggtatattgctttacttgctgtatcagtcggatgctacattgcagcatttacagtgtcaggaatccttttcatttggttcaacccttccggatatgattgtagcctcaatatcttcttccttgtcatgaccatgattcttgcttttgtgtttgcaattattgccttacaccctcaggtgaatgggagcttgttgcctgcggctgtggtttctctttactgtgcttatgtgtgctacacagggctttctagcgaacctcatgactatgagtgcaatggtctcaacaagtccagagcggtcagcacaggcacactcgttcttggcatgctaacaacagtgctatcggtgctgtattctgctcttcgggctggatcttcaaccacattcttatctccaccatcttcacctagattgggtgggagcaaacc

SEQ ID NO: 25010 - DNA, 1581 bp, Glycine max
  Clone ID: PAT_MRT3847_122587C.1
tttcaacgcgctctcccgagggctttgtcggaggattcttacgcctgaacgagtcctctccttgcgtagttggtgctcaattaaaaagaatggggggagatgcacagaagaagagaattgccataattggcgtgtctaccttcttgctggtggccatggtggtggcagtgacagttagcatcaacctcaataacaagggatcaagctatgattcaaaggaagaaagcaaatccagtgtagcttcctcgatcaaggccgtgaaaaccctttgcgcacccaccgattacaagaaggaatgcgaggacagtcttattgaacatagcaacaacatcaccgacccacgagaactcataaaaatcgcgttccacgttaccatctcaaaaatcggagaaggacttgagaaaacagaactcatgcaccaggtcgagaacgaccccagaaccaaggaggcactcgacacgtgcaagcaactcatgaacctctccatcggggagttcacgaggtcactcgacaagttcgccaagtttgacctgaacaaccttgacaacatcctcacaagtttgaaggtttggctcagcggtgcaatcacgtaccaagaaacatgtttagatgctttcgagaacacaaccaccgatgctggtcaaaaaatgcagaagctcttgcaaactgccatgcacatgagtagcaatggcctctctatcatcaacgaactgtcaaaaactctctcggaaatgcacgttaacagacctggccgtcgacgccttttgaacaacgttgatgatttaccagttcttggccacgactttgaccttcccgaatgggttgatgatcgcgttggtgttcgcaaactcctacgtatgactggacggaaacgcatggcgcatgtggttgttgcaaaggatggcagtggaaatttctcgaccatcaatgaagctttgaaatatgtgcccaagaaaaacctaaggccattcgttatctatgtcaaggaaggagtttacaacgagtacgtcgaggtttccaaaaatatgacccatgttgttatgattggtgatggtggtaagaagtcaaggatcaccggcaacaaaaacttcgtcgatggggttgggaccttcagaaccgccagtgctgccattctaggagatttcttcgttggcataggtatggggtttgagaactcagctggtgctgaaaaacatcaagcagtggccttgagggttcaagctgacaggtccatcttttacaaatgccgaatggatgggtaccaggacacactttacgcccacaccatgcgtcaattctatcgtgattgcataatttcaggtaccatcgactttgtctttggagatgcagtggctgttctccaaaattgcacttttgtggtgcgaaagccattggaaaaccagcaatgcattgtgactgcacaaggcagaaaagagatgaaccaaccatcaggattaatcatccagggaggaagcattgtggcagaccccatgtactacccagttaggttcgacaacaaagcttacttggcccgtccatggaagaatttctcgagaaccatatttatggattcctacattg

SEQ ID NO: 25011 - DNA, 392 bp, Glycine max
  Clone ID: PAT_MRT3847_122588C.1
ggaaacatcaaatttggctaacaaaaaaagggaaaacaagggggcaaactaaacccaagtggttttacaaaggaagccacaaaaaaccacgggtagggcctctgtttcccggaaaaaaaaaaaaaagattaattgaaaacggggggacaaaaaaacctttaagacttcaacaaggcattagggcaaaccccatactaagggaaaattcatgggggaaccaaacggggggcttttaaaaaaaaaaaaaaaccggggaaccctaagaggggtccttgggggaaaatcaaattcccaaatttctacaacccccattaagggtagggggaaacaattgctttgttttggcaaattcgaggaaaaggtggttatagttgggccatcaaacccggaaa

SEQ ID NO: 25012 - DNA, 288 bp, Glycine max
  unsure (1)..(288): unsure at all n locations
  Clone ID: PAT_MRT3847_122589C.1
angatagctaggcctnagnagnagaacancnatggccactggccactgttntcaantagacntatgcgtngccttcgganncccattgcgccatttcccacgacgctaaaacctctnatntctnaacctttcagtntcaatcgnttccttctacntcttanaagntcantttntcggctcggtcacntattntcaancttcctaaggtctctgaatccgcggttgcngaaaccgaaacnggttgtncgagccgaacngncnaaattgtcncggctcagtnctctggga

SEQ ID NO: 25013 - DNA, 441 bp, Glycine max
  Clone ID: PAT_MRT3847_12258C.1
gcatcccctctcccatttttcatcatttccttcgatggagcgcatgagactcttattcatctttatttctattttgttcaatgctacaactctgagtggtgttgaacttcttgttcataactactacaaggagaagtgtcccttagccgaagacatcgttagacataacgtggaagtggcagttttaaaaaatcctcgtttggcagcctctctacttcgcttacacttccacgattgttttgtcatgggatgcgatgcatccgtgcttttggacaacgtggagggcatgacaagtgaaaagttggctggaccaaatctgaactctttacgtggatttgaggtcatagacaagataaagtatttgcttgaagaagaatgtcctattactgtttcatgtgctgacatccttgccatggctgcacgtgatgctgttgaattgag

SEQ ID NO: 25014 - DNA, 344 bp, Glycine max
  Clone ID: PAT_MRT3847_122590C.1
atgattattaacacttaccgcctaacgtttaaaaacaattgccaaagaaattatcccccccatctgcacagaggccacattgtgcgggcgaaaaaaacaaaaatcccagcaaaaaaaaaacgccccctctcaagagaaagaaaaaacgcaacaaacaaactaaggggcagcccaatttgaagaccttattataaaaaaaaaacccccccaatcaaaaaactccacctagagattattaaacaaaaaaaaccccaccttagccgagacaaaaaaaatagaatacccccaaaaaaaggtaaaaagcgccaaagcaaaaaaaaaaaaacggcatttaaacactccac

SEQ ID NO: 25015 - DNA, 273 bp, Glycine max
  Clone ID: PAT_MRT3847_122591C.1
aaggaaggatgtgaagcatagggaatggggagatagggaaaaagaaagaagtgatcgtagaaacagtccacaagtaacaaacagtaccggtgactgcaaagaatctgccaaggaagatagagatgtagaaaggttggagagggagaaaaaagatcttccaaaagagaaagaaaatttaacagagagggaaagggatcagatgaagagagaatcatggaatggaatggagaaagaggtttcaaataacgagaaggaatctgttgatgcatcaga

SEQ ID NO: 25016 - DNA, 301 bp, Glycine max
  Clone ID: PAT_MRT3847_122592C.1
caaatcgatcaagctggcgcgcacatgtcatctgctgttgcaaatcattgaattggagcttagttatcaataagtgtgtggttaaagtcgttggagctatgtggaagtgatactggcagtccctgaagtgatggatagcatcgacactgggaacagtgaccgtgctaggaaatactcatccaatgcgattggtaaacgtattgcttcatttaactagctgcagattgactaaacccatttcgtcgacgatgttaaggatcacactgatgagtatatgacggctattattgaggctcacagc

SEQ ID NO: 25017 - DNA, 151 bp, Glycine max
  Clone ID: PAT_MRT3847_122593C.1
cttcttctcaaatgagaaaatgtggcttacgaaccatgctcttcaacatagtgccagattctcgttagcaactcgtgatgtacagtatcatgcctaacatgatactgtatctgaggtaggattatcgcatgtctattgtgattgggtgtag

SEQ ID NO: 25018 - DNA, 1467 bp, Glycine max
  Clone ID: PAT_MRT3847_122594C.1
taatatgcatatgatgtgataaaaaaatgtaggataaatgtaaaaagatcacacctaaatttaaatagttgtatttttcttgcctatggattttacaatattgccaaagagaatccgtatgaagtaatttatcaattattgccacttaaaaaatcattgatatcatcatggactctgaagttgagtctcctaagccacacagaatgaagtatcatatgaaacacatcgtatcgcttgggtggagaatgtacctcaaagtgtctccgaatttgtcccactcttttttgcattcttatatactgccttggagaaatactcgtcaaaatgtccttcaagttgggaatttctttcactgaaacattaactgaaaacatcttccaattcaaaacgtcactaaaaggaggaacatagtgctccgaaatgagcacaggaacacaccctgtgtaaattgcctccaccactctagggctagccacctcatacccactaggacaaaggcaaaacttgctattcctcagcatgccatagtaagaaacaccctttgggaggtacttgtgaacttgaatatcttcatccttgttttcccaatgctcaagaagaattggcctaatggggccatgattccccccagcaaagaaggccaaaattgaacgtttagatgcaggcggtccaccaacgaagctatcttttaaaccaggttggagattaatttcaggaaatgaagcatcctttatagggtcgaatccttcagaggtgttggcattgcaaagtacacgaatagagttcttacgcaagtaaggtatggattttgaagtctctggcccccaatcatggcaagagagcatgaagtgatcagctccgaggcttcgattccaataggggtatcttgtagcaatgacattgacatagtccctgacagttctttttatggggccaaaatcgtatgaattccttatgtacacatatcgaaccatccatgctatgctaaaaggaaggaaaaacacatttgctttcttgggatctcttgttcgaaaatgctcattcatttcaatagcatggatgaagctcccctcagtggagtatatgctgctgcatgagccataataaaaaactggaagctccccctcttcatagacaaaaactttgatttgtatctccatgtataagtaactccagatgtcccaggagcataaaggtttgccatgaaatctcttccgttgtaaacggttgaaccctttatagaagcaaagcccgcaagcactaagagaggcaccatgaacaagaagatcctcattgttgaagatgcttctgaacccctccatgcacaacaattaatccatctgctactacccaccatgtgtgtgtatgctttaatctgcagaaaagggacaaagacagactctatttaacgatttctttaccgctacatttgatggtatagaagaaattcatgcgagtgtagctgtg

SEQ ID NO: 25019 - DNA, 1762 bp, Glycine max
  Clone ID: PAT_MRT3847_122595C.1
aatagttcgacattttataattttaaaaaaagtgcacaaggcttaaataaactatcaaaaattaaacacatcgttacttagttttttttttggggggtggggtacagatacacatgcaatagccaaattcaaatcaaggttgcaaatgtcaaaatcttgtcaaataacttggttttatgctgttaaaaaccaaacaccttatccaacttcccttgaaccatttaactctttccattatttttgcacctctcaacaatgtatgttctccatgattattgcacctcttaagcatatatcttcatcatttgcacctttatcaaacacaaaactctacatttgttcagcactcatgatagaaacacacctccaattcaattataatattagcttacaaccacctaagatcacatgaatatacaataacaatacataagctaaggacttgagggaagcacaactgcacaaacagcaaatttttctatatgctaggtcataacttagcaatcaaaagcttttggaaagaaaaatgtttcctttgtcaaaccaccagaaggctagcacagaaatcagtgggacaaacattgctactgaaagaaatgtcaagtttctccaatttgcaggcttatctgctgaaatagatgatgttactcgagttacggagcttgcaccttcttcatccacctgcctgaaatgtcttattaaagtgatctattccttcttcatctgatgatttagcagagttatcattgctcgagtcattgttggaagcttgatcttcatttctgttatttagtccattgttggatgcatctaaagaggcatcaattttagtattctttaacttttctaccaaatgtttattttcctgttttaaagcatgtaactggttattgatgcgctctctttcagaggctagttgcattaccatatccatgataagcttagctttacaatcaatttcttttgcccttgatgatcttgtattgctagcttgatccaaagatgttttcaagcttactgttctggacctaaggagatccaattctttattaagttccaagttagtttcagacagcacaaagcattgctctgcagcactttctttattagtttcagcttttgcccgatttgagtttagctcttcaatcaatatttccatatcccatatagctgtgtataacatgttctgctgttcttgacttgcttcagaagatgcctttgcattttgtagttggatatctagttcccttagttgcttctcaagtgaaccaacctttttctctgcagtactggcactccctttaagaaaactcacctcttcagtaagttccaagttggtctcagttaactgtgtaacctttgcttctgcactctcagcccgattttctgctatgtcaatgctttctttcaaagagtcaacaaaattttccatttcaattaggtgttcgtgacatgcttcattctctgcagtcacattatttatctgaagctcaaattctttttgctcttcctcaagaaatttcaccttttcccttaaagccaacacctcagatttttccttaacactctcaacattacatttctcaagcttctctaaagcagcatctttagccttgagttgatctatcaaaatttgaacttttgatctcagctcattttctcgttgcatagaaccattgaggttgaactcagttacttgaaggcgtcccattatacctttagaaatccccattaacacctctgtggtattgtctctcgagcc

SEQ ID NO: 25020 - DNA, 858 bp, Glycine max
  unsure (1)..(858): unsure at all n locations
  Clone ID: PAT_MRT3847_122596C.1
atggggccatgattcccccccagcaaagaaggccanaattgaacgttaagatgcaggcggtccaccaacgaagcttatcttttaaaccaggttggagattaatttcaggaaatgaagcatcctttatagggtcgaatccttcagaggtgttggcattgcaaagtacacganatagagttcttacgcaagtaaggtatggattttgaagtctctggcccctgtgaaattccttagcattccaatacatcggacctattggaacataatctgaatcttgtgtaagattccaatttttggcttctctgattgcagctcgagcttgtgctagaacaacttcatttctatctatgaaactgggttttcttttctgcttctgtcgtgggtgagattcatcagattcatttgcaggagctgaattgaacttgggtatggagacattaacttcagtttcattagattgatgaagcgtttgtaaagaggaatttgaagaaggataaattgtttgtaaagaggaatttggaggaggaagaaatgtttgtgaagagaaatttgaacgagttattagagagctcgacaaggcataacgttttgcaatagaatctcttccgttgtaaacgcttgaaccctttatagaagcaaagcccgcaagcactaagagaggcaccatgaacaagaagatcctcattgttgaagatgcttctgaaccccaccatgcacaacaattaatccatctgctactacccaccatgtgtgtgtatgctttaatttgcagaaaagggacaaagacagactctatttaacgatttctttaccgttacatttgatggtatagaagaaattcatgcgagtgtagctgtg

SEQ ID NO: 25021 - DNA, 560 bp, Glycine max
  Clone ID: PAT_MRT3847_122597C.1
ctatgtattagctggtgtgtaaagaaaatcttaaacattagttaatttgggatggaataatgaaagggcatcattgtctatgaagtaatttattaaacatgaagccataagtcacaacttaagagtcattgatcatcacggactctgaagttgagtctcctaagccacacagaatgaaggatcatgtgaaacacatcgaatcgcttgggtggagaatgaacctcaaagtgtcttctaatttgtcctactcttctctgcattcttatatgctgccttggggaaatacccatcttgaaggacattttgatgagtatttccccaaggcagcatataagaatgtccttcaagatgggtatgtctttcactgaaagctcaactgagaacgacttccaattcaaaacgtcactaaaaggaggaacatagtgctctgaaatgagcacaggaacacaccctgtgtaaattgcttccaccactctagggctagcgacctcatacccactagggcagaggcaaaacttgctcttcctcaacacggacgcgtgggtcgacccgggaattcc

SEQ ID NO: 25022 - DNA, 256 bp, Glycine max
  Clone ID: PAT_MRT3847_122598C.1
ctttctctcaaatcctctttcttactctaaaatgtctcgtcgaggtggctctaaacaacaaccagattcacgccatccagcaccaccgtctgcggcgccttctcccgccggaagaggacgcggccgtggccgcggagaattctcctcagttcccgctccttctccggtgaatgcaccatccgctcctcctccggcttccaccatcggcgttccttccggcgccgcacctgttcgtgccgcgtctccgtctccggcg

SEQ ID NO: 25023 - DNA, 546 bp, Glycine max
  Clone ID: PAT_MRT3847_122599C.1
tttttttttttttttttttttttttttttttttttttttttttttttttttttaaaccagccctcccttttcataaaggagccggtctcactaatcacatcccatttgaaatcccaagggggggggaaacccgtaaaagagagtttttcccctcccagtgaaaggaaaaacttgaaagcccccgccccataataatagaggggctggggaggcattttgttcctataccataccatacaacttttacattaccccggggtttgaatactattctttttacggggaaaagaaaagatttgcctttgactaactatggggtcattttgggaatggggtgtttgggtggaaaaagcaacttgccctccccaacggtctcactggtcataacttgggggccctgcaacaaaagaggccctaaaaggctaaacttttccccgggtcaccttagggggcctgtcctttgggaggggggaccttaaaaaagggggcccccttgccccggggggtctttcctaaaaaattttcaacccccttttttttggccag

SEQ ID NO: 25024 - DNA, 132 bp, Glycine max
  Clone ID: PAT_MRT3847_12259C.1
agagggaaagccggcacgcaccgcaaccacaactcccggatcgaccgacagacccaagcttttcgccctctcgaacgacacacaatgaaatgaggagtggtcaaaagcaaacacacgataccccacgacacc

SEQ ID NO: 25025 - DNA, 129 bp, Glycine max
  Clone ID: PAT_MRT3847_1225C.1
gaaatacaaacttattagtcactgaggaactaaaacagatcatttaacagagtcacaagccattcaagtatagtacacaagcccacaaacgctgattaatcaacatgaaaactacataggagtttacca

SEQ ID NO: 25026 - DNA, 523 bp, Glycine max
  Clone ID: PAT_MRT3847_122600C.1
tgcttccactcactggcttaagggttcaatttttaattaccttcaatagcctaagaataatgagaagttcacacatcttgtttcttattagacctgacaaagtatgagattccaattattctggttggggagggtctttgagaatccctgtttgacatataaatcgggattcctggaagcttaatttgggagtataacacaaactacctgcaaaccatttgtagtttcaataaaatgtgaatccttctataactgtacatataatagtgtcttaaagaacaaggccattgaggaggcagctgactacaatgccatcagcatcatatattgttttctcattgtaatatttgaaaagaaaagaatggctagtatgatgttcaaaagttcttccattgacattgtcatcaaacttgactttgcttcatatatgctttttggatttatgatgcaagatttattgcaatgtatgctacacttgcaagtcgagaagtggactggtgcttaattccagaatcaccctttt

SEQ ID NO: 25027 - DNA, 368 bp, Glycine max
  Clone ID: PAT_MRT3847_122601C.1
agcgaaatgatagcagcattgggggatccgatgagcccgacttaccctgacctggactttctcaatgccgaagaaccctcagcaaattttagactgatccatgttgctagggccatcgggaaaggagccccccgcaccacttcttgacctatatcgacacgctgccggcatgatgctgagagcctgacacatggtcccgtaatcgatctgatagatagagttgctctctatgcctgagccatttgagagccgatggctttgacctactcacggtgctgtgttgacagactctgggactcatctgcataccatctttcagtgcctaccaaacaacgtcagctcgcttaccttgcgctgccttagatgag

SEQ ID NO: 25028 - DNA, 437 bp, Glycine max
  Clone ID: PAT_MRT3847_122602C.1
gaagttaaataacaagagagtgagttaagtggcagtagagagaaaatgagcgtgaaggtgaattgcgtgggtggcgacactcataacgtcttcgtgtacggtagtctgttagctgatgaagttgtccataccctattgaagcgcgtccctccaaccgcacctgccatccttcacgactatcacaggtttaagatcaaaggtcgcgtttatcccgctattctccctgtccagaataacaaagtttatggcagggtgcttcttggtatctccggagtagaactagatattttagatgaatttgaggatgttgaatatactagaactgatgttgaggtttccttgaaggaatggaaacaagttcacatgaatgatttcgtcaagatgactgatggctttaggcaagagttggagttaccaggatcaaagccaagagtgca

SEQ ID NO: 25029 - DNA, 545 bp, Glycine max
  Clone ID: PAT_MRT3847_122603C.1
aagttgaattgcgtgggtggtggcgagactcacaacgtcttcgtttacggtagtctgttagccgatgaggttgtccataccctattgaagcgcgtccctccaaccgcacccgccatccttcacgactagtttagtactctctctctctctccacttcattcggattttatcgcttctctaacttgatagtatttgatttgcagtcacaggtttaagatcaaaggtcgcgtttatcccgctattctccccgtccaaaacaacaaagttaatggcagggtgcttcttggtatctccggagtagaactagagatcttagatgagttcgaggatgttgaatatactagaactgatgttgaggtttccttgaaggacaagtctgaaaagttacaagtttgcgcttatgtttggagcaacccaaatgatcctaacttaaatgcagagtgggattttgaggaatggaaacaagttcacttgaatgatttcgtcaagatgactggtggctttatgcaagagttggaattgccagaatcaaagccaagagtgca

SEQ ID NO: 25030 - DNA, 271 bp, Glycine max
  Clone ID: PAT_MRT3847_122604C.1
tccacacgttcgggctaagctcattctacatcagtgcaaacactctctctcatggcatgagataagaagattaggagcggcatcaacggatttgaaaggattgagcgctgggtggccactggtgcccttcaaaggaatgacgatgaacttgatgctgacaacaatcctttcatcaccactgattacatgacatacatgctcaagatcgacaccggtcatggccaggggaagcatttggatgggaatgtgaaggactctgagacccttctct

SEQ ID NO: 25031 - DNA, 739 bp, Glycine max
  Clone ID: PAT_MRT3847_122605C.1
ccacgcgtccggaaagatgagcgtgaagttgaattgcgtgggtggtggcgagactcacaacgtcttcgtttacggtagtctgttagccgatgaggttgtccataccctattgaagcgcgtccctccaaccgcacccgccatccttcacgactatcacaggtttaagatcaaaggtcgcgtttatcccgctattctccccgtccaaaacaacaaagttaatggcagggtgcttcttggtatctccggagtagaactagatatcttagatgagttcgaggatgttgaatatactagaactgatgttgaggtttccttgaaggacaagtctgaaaagttacaagtttgcgcttatgtttggagcaacccaaatgatcctaacttaaatgcagagtgggattttgaggaatggaaacaagttcacttgaatgatttcgtcaagatgactggtggctttatgcaagagttggaattgccagaatcaaagccaagagtgcagacttatgaaaccttctacaagcaagaaaacgataagccacttgaaccttgatgtttgcagtttgtaaaaaattctgcattatgtgcactgtgcagagttgtatgattcaattaagaatcataccattcactgttaataaatattagttactctcaaataattcatttgatgatttaataagcatctcaatgctaacaatgacaagttttcagtaatatatttatgttatattattgtattatt

SEQ ID NO: 25032 - DNA, 356 bp, Glycine max
  Clone ID: PAT_MRT3847_122606C.1
aaactactggagataaatttcgtgaaagcgcgacatattagttattacacatcgtgaacgagacaatacctcttaggggtgcacgaggggcgtgagcatgtgggggttacatatttacttgggaactaaataagagcctgagtaagcgtactgttgctgggagtgtttgcgcaatgtgtacattatacatgggattttgtgaggcaattggatctgcgtgagtatgaggagttggccatcgaataatggacctttttttcatacagaaccatgagaaacataaggtggaggaccaagccgaggggtagaggtctggagtgcgtccagaccaaaaatataagcaaacggacgcgtgg

SEQ ID NO: 25033 - DNA, 428 bp, Glycine max
  Clone ID: PAT_MRT3847_122607C.1
cccacgcgtccgcccacgcgtccgcccacgcgtccgcccacgcgtccggcaatcacttgctcgctcctttgatccattcttgaaattctcgttatcgctcttcgaactcaagctctctcgctagcgattcctacttctgcaccaatttctacgttttctcaagtcacaggtttaagagcaaaggtcgcatttatcccgttattctccccgtccaaaacaacaaagttaatggcaggtgcttcttggtatctccggagtagaactagatatcttagatgagttcaaggatgttgaatatactagaactgatgttgaggtttccttgaaggacaagtctgaaaggttacaagtttgcgcttatgtttggagcaacccaaatgatcctaacttatatgcagagtgggattttgaggattgaattgtggatt

SEQ ID NO: 25034 - DNA, 1073 bp, Glycine max
  Clone ID: PAT_MRT3847_122608C.1
gtagagagaaaatgagcgtgaaggtgaattgcgtgggtggcgacactcataacgtcttcgtgtacggtagtctgttagctgatgaagttgtccataccctattgaagcgcgtccctccaaccgcacctgccatccttcacgactatcacaggtttaagatcaaaggtcgcgtttatcccgctattctccctgtccagaataacaaagtttatggcagggtctgtctctcttcttacatatccctcataattctaatatatgcatccatcatttaagactatttttaatcaggtgcttcttggtatctccggagtagaactagatattttagatgaatttgaggatgttgaatatactagaactgatgttgaggtttccttgaaggtcagttagtcactcttgtttatttcactttctatgaacctatagcagtatagggtaataattgtatatcaaatgaggcaaatgttacatttcccaaaaatacatacattattattattattatctagagggcgagccctggtgcagcggtaaagttgtgccttggtgacttgttggtcatgggttcgaatccggaaacagcctctttgcatatgtaatggggtaggaagtttattattattattattggaatgctaaaattaatggtacaggacaagtctgaaaagttacaagtttgcgcttatgtttggagcaacccaaatgatcctaacttatatgcagagtggaattttgaggaatggaaacaagttcacatgaatgatttcgtcaagatgactgatggctttaggcaagagttggagttaccagaatcaaagccaagagtgcagacttatgaaaccttctacaagcaagaaaacgataagccacttgaaccttgatgtttgcagtttgtaaaaattctgcattttgtgcactgtgcagagttgtatggttcaattaagaatcatactattcactgaataattattagttcctctcgaataattcatttgatgatttaataagcatctcaatgctaacggtgacaagttttcagtaatatatttattttacattattgtattatt

SEQ ID NO: 25035 - DNA, 457 bp, Glycine max
  Clone ID: PAT_MRT3847_122609C.1
catgtacacgttcatgttcaattttgcgaaagagagaccagagttgggccgggatttgtttctggcatggactggatgggtatgtgtctggactgcactgttgctattcttgtttgccatcttaggggcttgctctataatcaacaggtttacccgtattgcaggagagttgtttggcatgcttattgcaatgctcttcatgcagcaagctatcaaaggactcgtggatgagtttcgcataccagagagacaaaattcaaaatcaatcgagtttataccttcatggaggtttgctaatgggatgtttgctttagtcctttcgtttggccttcttctcactgcattaagaagcagaaaggctagatcatggcgttatggtaccggttggcttcgcagcctaatagctgactatggtgtgcctcttatggtcctaggttggacaggtgtatcctacata

SEQ ID NO: 25036 - DNA, 183 bp, Glycine max
  Clone ID: PAT_MRT3847_12260C.1
cgcaatttgacatgctcacatacgaatgagccaacataggccatgtatgagagtgtgtagtgcatggcttcctataatggatctatcatagatgcatagtgtaactagagagcgtaattcctaaggagaattccgactgcacatttttaagaaatctcgatgcacagataattatatacgaat

SEQ ID NO: 25037 - DNA, 292 bp, Glycine max
  Clone ID: PAT_MRT3847_122610C.1
agatatcatacagattctattagtattaaactacatacttactcattcaacccgcttctcattgaatgtgcctattaacccaacgttcacgcataaattaccaaaacgtttataggctttacatacaaaacctgaccaacattgaatatactccaatgaagaacattgaaacacacactatcttctctgtctacaaatcctcgcaacatgcatatataataatcgccagattattttatatgcggaattttgaatccctccttagccttacaactgtgctttcaagactgtg

SEQ ID NO: 25038 - DNA, 347 bp, Glycine max
  Clone ID: PAT_MRT3847_122611C.1
cccacgcgttcgtccacgcgtccgcttcttctttctcagcttcaaacctccttctcctttctttgtttcttcccttgatttcttaatttcatgcaaaaaaaaaaaaacccttctatttcaatttgcttgttcataccttcattagttgtttgttttgaaaattggggttttctatgtttgggttagtgttcgtgttcttgtagtttagattgtgccattttgccataacattactccatgcccaccaagtctttgatggtttgcctaggacacctttctctagcaccgtcgtggcaaatctcaagaagaggaggagtcactcggttctgtttttgaaatggtcacta

SEQ ID NO: 25039 - DNA, 422 bp, Glycine max
  Clone ID: PAT_MRT3847_122612C.1
ccaggcgttcactcatacgtcgacgctgcgcactgaactgtcatggcattggatgaagagacacaccagcgagtcactgtgctcatccctcttcacccaagtcgcgcacattccactgacgaccggttgagcgacacccaactgcaaaaccttaaggtggcgatgaacaatgccgcactaccatgccactcatatgcaggacatacttacctaacatcatggtgtaaaacactgagagtcaggcgcaagatcaacctgctggacactcaactatagtaaaagatgcaaatgctgcacctcaaactcagacatcgagtccgattgcgtctgttagctcaacttcattatctgaactatcggcaacacgtgaaggacatcctttatcatctgccctgagtcccactgtgtcacagcagagacca

SEQ ID NO: 25040 - DNA, 403 bp, Glycine max
  Clone ID: PAT_MRT3847_122613C.1
cgtcggccacgacgtcggccaacccgccggggttttctgggatcataatttcctgaggcggtgcatagaggggcggaatcctgctcttaataatgtactccataatgcggcccctggcagggaaaaaaagctatgcggtaatttctttttggggaaaatagtcaccaactcctcatattctgaactcttagcttgtggggccctcatgtgcgtaataacttataacggtttcttccaggaatacaccttaggcattgaggctcacacagaataatatagggctttaaaaggcaagttaaatcttttgactgtgaccatggagaaggcgttttgagtgacataaagcggtcttagagcgccaacttttactgtgaaacttgaggaatcacatgctacacttaaa

SEQ ID NO: 25041 - DNA, 364 bp, Glycine max
  Clone ID: PAT_MRT3847_122614C.1
gaccgagcttcatggcggcaacctcagcgcatggaacacgatgcgcggcctaactatagaccactaacaagccccctctttttaccctccctaacaaaagacatttcccacagaccctgctcttttttctttgtcaaaagcgaattccgttctctataaatattgacctgtctgataaacctttactacttcgtacctacgaacgcctcactcttcttaccgtacacagaagacctccagaagtacgctaagtttcaagacctgacagggctccaccacgcataccatggctgcacctgccaacagcagagcgcctaagatcgtcatcggtccaaacggggacaccgctcaaagacgaaccgca

SEQ ID NO: 25042 - DNA, 308 bp, Glycine max
  Clone ID: PAT_MRT3847_122615C.1
ccaagagcggttttatggcactaaaaacaaaacagttattgaagtcatcagccttttgtaatattttttttaaaaaaaatctacaagtcaaattttaaataaaaatttaagaattttttgaataaaaataatataaaggttatatttattaataatgatttcatttcatttcaaccttgaaatacttttatcgggttctttctctttaaaatctttaaaatgcaaagcgtcttgaacactaaacagggaagatgcgggaatgaaaagaagtgttagcgtaaaaaggggttttggattcacgcggcaaa

SEQ ID NO: 25043 - DNA, 253 bp, Glycine max
  Clone ID: PAT_MRT3847_122616C.1
catatataccctttaacgaaagaaggaattcaaactcaactttaataccggttcttccactccctgtgccttgcgccacaccttcaagcaaaccgcttgcgaatttcactgtctcgcaaagccttctacaaaattctttaaccacatcaggggacaactccttacctttcatgagcaagattaacttttaccactttaagcagaccccttaaattcactcaattaaaatacatttgactattgaagaaccaac

SEQ ID NO: 25044 - DNA, 533 bp, Glycine max
  Clone ID: PAT_MRT3847_122617C.1
ctcattcgttgttactaataaagtcacaccattaaaagctcataggcacaccagcttgcttttcaatccttctttcttccttctctccgtcaaaaacaatttccatctgccaaaaccaatgttttggtctcaaaactcataagttcacatttttttttcttcttttccattcactttgccaatccctcctcttcattcattttcctcttgttttaagattttgcttctgattgattgcctttgagagaaacttgtgaactcagttctttctttgaccctcttggccaagctcagaaatttccataaagaaatagattttctccctgaaattctgttaggtgcttgatcttggattttcattgggtccaagaaacaagatatcatcgttactatggttttgaaggtttctctcattgtggatctgcttgtgatatgctcctgtgttgtggaagccatttctaggaatcacaataatcacaatcacaacactatcaacaaaaatggatcttctctggctgccataaagttcctga

SEQ ID NO: 25045 - DNA, 474 bp, Glycine max
  Clone ID: PAT_MRT3847_122618C.1
ttttacttttaattggttaattgaatattcttggccttccttgcttctttgtgatctcatgtctctgtcttgttcaccttcacctgttgaatgaatgatgatgctctttcgctgaacatgaacaacctttgtactatcaagtatcaacctttgacatgtatgtatgtgatgatgttcgccctgacacgctcacttttttccagaatctctaagcggaattttgtacacccaaaatggacatgttccttgtcttgcaaataaccatccaaagttttccttttgactactgcattggctatgttactcaccagaagctattgtattgattttgggttttcatggctctagatctagtgcatggtgcgttgacaattagttttcattattaagttcttgcaacttagttcttccttggaaaaaaaaggcaaaggaagctttcttttgttggagtcctttgttctataaaagaaatac

SEQ ID NO: 25046 - DNA, 1065 bp, Glycine max
  Clone ID: PAT_MRT3847_122619C.1
tcgagttttttttttttttttttgcaagaaataaatgcatattttaattcaccagctcatcttgaaacttctacaaaattgacttgtttcctctcgataagatcctactccttcctaggcatatgcaacatatacagtccacctacaagttacaaccaatcaatcaataaatgaatttttgtttttgtctgtacaattttcccctaactgtagattgggtgttaccggagctgaattcaagatgaccactcctgacatttaggcacccaaacccccctacgcgcaaacatgttccaagattcagtctttagggtaatcaaagaggtcagttccttgataattggtccatcactagctcgtaacctctcttcatccttgacttccttatacaatttcttctcccatgcataaagtttctccaatgtggatgaaagattttctggatttgtcttgaactctttcccaggttcaccacagtatgcttgtgccaattttatttccctagaagaaaattgtatagatagaggatctgaaggtagcctggaaggtgctaacatctgcaagattctagaaaagataactctaagggcagcaaccctagatcgataaggtggtttgcaaacctcgagcaacagcgcaacctcttttccaaaattcgacgccgtcacaaactcaccctgaatctcctcaacaacctcgaggagatccctggtgccatgtgcggacaaagtggtgacgctgctcaaaacggaggagtcaccgtccaccgtcgtaacggtcgcttcgtcaatctcaaaactcacccctttcttcgcaccgcgctcttcggaagcaacagtgtcgggactgctcttgatctctttctcgacggagccattatcgctgccgtcatgaaacctcaccgtcttggaactcccctcgctgctactcacctgctgcaacggcaccgttttggtattcgaaggcccctccccgaaatccctaactccaacaacaccaaaacccttctcctctcccatctttttcttctccttcttcaacggaacaaactccttctctcgagcc

SEQ ID NO: 25047 - DNA, 189 bp, Glycine max
  Clone ID: PAT_MRT3847_12261C.1
cttctaagagtgtgtttgtgtctccttttaaaatccatttaaacaccgatccaggcttacggcccagtcacgttgaggcgcatacgacagcgtgccaagggcgaacccaacatactctaagtggacttggggactgatttaggctaagtgcattgtgcgcagatgtatgatacagcctaaggattggct

SEQ ID NO: 25048 - DNA, 580 bp, Glycine max
  unsure (1)..(580): unsure at all n locations
  Clone ID: PAT_MRT3847_122620C.1
ccacgcgtccgacaactttggtacatgttctctcttcctctctacaacattgctagtcttttctcggcgccggcatacgcgcgtactgacctctggacattccacaagagagcacttggggcagaaggctcactccagaatcactaatgggcactaccgaagactaagtcaagcattatctgtncagttctccatacaaacagatcgttcgccaacgactccgatctcttgcctatcagcgattgcactatcctactgcaagcggggtagtgcacgcgctagcgatactactactgcgtgcacacaccttgctccagtggcgagcgccatgcccacatcagcctggacctccacgaacacgccgtggagctggcacggcgggccaaaaccgccctttggacgtcgactctgccactcaacacacgacctggctggcggcgaaatatgtcctccgcacgcctctcaaataccatctcatcactgctgaaccttccacgttgttgccgagtttctcggccgccgtgacatccgcgcctacgtaaacgaaatcgatgctgatcatgaccgcaaccctgcaaag

SEQ ID NO: 25049 - DNA, 476 bp, Glycine max
  Clone ID: PAT_MRT3847_122621C.1
ggagttcttgcttcataagatgaactcacgtgatcaaaccataaactaagaaaaggtggtggatctgggaagattgagacttgtgtaaccttccaataaacacatgagaggtgggaaacgaccacaaaatgagggtttcttcatgcttaagcaccataatatctatggcacttgcttccccggttgctcatgggaatgctctcacctctgagcctcttctctccccgtcattgaccctgtcgttccttcggatgagaagtgacaatgattattacaggatctatagcaccattgtgtgtttacggtttcaaccaattgttatgagacatataattgattgttgcaatttataaaagagaccctcattagcagaacttgatcactgcatcatgtaaaaattgctcagagacacgctgtcttgattcatgtaagaacttctctcatgtagaatagtttggttagctgagttgaattcc

SEQ ID NO: 25050 - DNA, 251 bp, Glycine max
  Clone ID: PAT_MRT3847_122622C.1
ctgatatgttgcaaacagatgatgaaggaatatcagcatgatattactaagttatgagcagctttagctgtggacacaatacccatttgtatttgttccctcacattttggatctgtacattgctattgactactatatttcccttcatgctccatctccttggtctcactggggtctttggattattcgttatctggtgcatcattccatggatagttgtctacttgctagttcctgaaatacagggcat

SEQ ID NO: 25051 - DNA, 579 bp, Glycine max
  unsure (1)..(579): unsure at all n locations
  Clone ID: PAT_MRT3847_122623C.1
ggctcgagatcggattagaggaagagagagagagaggatggagaaaacagaggaaaaggtggcggtgggcgtgccagtgcaattgtattacggtggagaaaatgaatatcaaaggggaatgatccctcctaacacggtgtttggagatccaaagggcatccccatccagcagaccatttacagggacactcctgctcctttcaactgcccttactgcggtgacaccgctctcactaccgtcagtatgtggcgtcaagggattatgatctagtcatggcgtatttaaaagagattggatattggcttgatttggaatgaaaggaaaaatgtacccacaaatatccataggtaaaatctattaacaagggtctagtttatgcttgagttcaattccttcctatgaataaaaaaaagaagtaagtggactgttttgtatcacatattaatgggcggcgggtagaaaccagcaaggtactcattggtgaatatcccaatctgaaatgattcaaatgttcttaccaaccanaaaattgtttaaatacttacaagcgtcagcgaattcatttttagcttaaatat

SEQ ID NO: 25052 - DNA, 827 bp, Glycine max
  Clone ID: PAT_MRT3847_122624C.1
tatgacgtcgatgcacgcgtactagctcggaattcccgggtcgacgtccggaaaaacggaagcgagagagagagaatggagaaaaaggaggaaaaggtggtggtgggcgtgccagtgccagtgtattacggtggagaaaatgaataccaaaggggaatgatccctcctaacgccgtgtttggagatccaaagggcatccccatccagcaaaccatttacagggacactcctgctcctttcaactgcccttactgcgctcataccgctctcactaccgtcaggttatgcttattctctttaatttcaattcaaaccatcttatctcataacaatttaccggattcaatttccagtcaaaatcgctcttcttcttcttattattattagggttaaacaattttttgctcattatgttatgattttgttttcgtcccttttttttttttttttaattttgtatgtggcgtcatgggattatgacctagtcatggcgtatttaaaagagattgcataataggcttgatttggaatgaagggaaaaaaaatgtacccacaaatatccataggtaaaatctattaacaaggggtctagctcatcagggttgaacagtgttgagttgtgacttgtgttgtaaacctctggtaggttcaattccttcctatgaataaaaaaagttaaatgtatcacatattaatgggcagcgggtagaaaccagcaagggactcattggtgaatatcccaatctgaaatgattcaaatggtcttacaaaccaataaattgttttaatacttacaggcgtctgcgaattcatttttagttaaatat

SEQ ID NO: 25053 - DNA, 1690 bp, Glycine max
  Clone ID: PAT_MRT3847_122625C.1
tttgggtttttttttttttttttttttttttttttttttttttttttttttttaccgttttttttttttaaaccaaaacagatattttggggcatcagtatattttcatataaccactaatatagaagttacatgcgtatttccaaaagttcgagcaataacaatgatgaaagctacagcattacaaaagcagagcaaaattaacaatgataagaaaacaaagtctggaggcaaaaggaatgccttaattaatattatgatataaacaagtaaggaaacttagatataatacaacaatccctaaagcattggcattagtcgggcttccagaatgtcttccttttctagcttgatctgcagcatgttccttcatgcttctcttttctcatgagggccacaacattagatggctagatttgctgatatttttacacacaacttattcacttgctgactaaacattgccaatctttttttcttatattttgatataactatatatcaccaatcttaattcttaacactatcatccgacaaattcacaggcaaccttgaccaagacacagattccctcgacccaatcaacctcctacgaatcactatggacaagctcaacacaatgcaaacagcagccaccaaagtaaacagcatacctgtattattcctcgtcgaccagctcttcataactaaatcagcacaaacctctccatcaagactactgcgagaattgttcaacttcataacctcaaccgcattcaatatcccatcgatgacatgcggcatgctgctcttcgaaggacctacaccaacactcaaggccccatctcctccacctaccacaattcaaaagttcaagcaataacaatgaggaaagctacaacattacaaaacagagcaaaattaacaatggtaagaaaacaaagtctagaggcaaaagggatgccttaatattatgatataaacaagtaaggcaacttagatataatacaacaatccctaaaacattggtattagccgggctttcagaatgtcttccttttctagcttgatcggcagcatgctccttcatgtttctctttttctcatgaaagccacctcaaatggctagatttgctgatattttacacacaacttattaaattgctgactaaatatggccaatcttttgatataactatataagtacatatcaccaatcttaattcttaacactatcatccgacaaattcacaggcaaccttgaccaagacacagattccctcgatccagtcaacctcctacgaatcactatggacaagctcaacacaatgcaaacagcagccaccaaagtaaacagcaaacctgtattattccccgtcgaccagctcttcataacaaaatcagcacaaacctctccatcaaggctactgcgcgaattgttcaacttcataacctcaaccgcgttcaatatcccatcgatgacatgcggcatgctcctcttcgaaggacctacaccaacactcaaggccccatcatctcctccatcaaccacaaagtccgcgtaaaacggcgaagccagcgaattcaaaacgtaagagagatccaaatcttcataagccaaattcccattgacatacacattgaagtaaagcaaaccaagcgaaatgctagcaatatcacagaaatgcaaccgaaccaagtatttgtaccc

SEQ ID NO: 25054 - DNA, 122 bp, Glycine max
  Clone ID: PAT_MRT3847_122626C.1
ttaagctagcctctatccgagccgctacctgcgcactcggcatggaaggtgcgggcacagtggtcgcggtcggcgaaggcgtcacgcatgtgaagccgggcgaccgtgtcgcctatgcgggg

SEQ ID NO: 25055 - DNA, 284 bp, Glycine max
  Clone ID: PAT_MRT3847_122627C.1
ctggctggcggcctgccgtccttttttttttttttttttaaaagggaacatagagtagaggacgatggccataattgaaattctgtactgaaatgagtgaaaaacaacatcggtattcaaattactgccaacataaacaccccctcaggaaatgaaagctatattaaaccacattttccgcatatctaacatcgaggccgtgctaccaagtaaattgaggcagaattaaattcgttaggggggaaatgagtgaaaagcaaaattgtttttacatgacgaaaact

SEQ ID NO: 25056 - DNA, 477 bp, Glycine max
  Clone ID: PAT_MRT3847_122628C.1
gtgttttttttttgaataaatacagggcatatttatttaaacccaaagatcattattgcccttgaaacacgggtaaatgtgaaacctataactgaaactaatttaaagctccttcacaattccactcaggaaaccaaattcattttttctttaagggggttacccactattaaaaccaacaagccaacaaaatgccttccagaggggtggggggcctcacattattatccatcaactatagaagcgcctcgtggcccctgacactgcttgaaaagaggaaatatattcccatattctcaagagctagggatacatgatccctggcggaagctcggtacgctcacaacatggcccacggctaacttgctgagcacatacagacacattacaggggtgcctaagtggagtcctaagtcctgtcaatccatgaaggctgatagcatataggcaaatatcagagaatggcgaagttctcaa

SEQ ID NO: 25057 - DNA, 590 bp, Glycine max
  Clone ID: PAT_MRT3847_122629C.1
caggagcatagatccacgctactggttccttaaatacctttaaccaggctctatccctcattcaaagcgtatgtaccatcattggccattctatatattacattttaatctggaaattttgaacaaaacttaattaagctaatccttaatttgaaccatggcatatatacagaccacattcttgaacttatattattatactaaaatactgaactcctccaaaaccctgcttttgagttacttcgatgatgcttttaattagatagaccggatgctgaactacaatgagccaccaggaaagtataaccgcatactgaaagtaattgatagctacagattgttaaaaaaaggacacgctttaaaagatgaacaaatttattatgacagagctcttaggaggtgaatcgaatggttttaagcatatcttcttgttcttgaagacattatggataactttcacacactccgtgtgaaggcctgctgagatacactgcccatagatgaaatgattgcaccctatgatggagttctactaaaaaactatattacacgaatcattataaagcacttcatgggaaagccatattact

SEQ ID NO: 25058 - DNA, 556 bp, Glycine max
  Clone ID: PAT_MRT3847_12262C.1
cggctcgagcaacacacgaccgcttcaacaactactccatcatcatccatccacaacaccacatcacacacaagcaaccacacaccactgccaacatgcagatctttgtcaagaccctgacgggcaagaccattaccctcgaggttgagtcctcggacacgatcgacaacgtgaagagcaagatccaggacaaggagggcatccctccggaccagcagcgcctcatcttcgcaggcaagcagctggaggatggtcgcactctcagcgactacaacattcagaaggagagcaccctccaccttgtcctccgcctccgtggtggtatgcagatcttcgtgaagaccctcactggcaagactatcaccctcgaggtggagtcatccgacactatcgacaacgtcaagtcgaagatccaggacaaggagggcatccctccggatcaacagcgtctgattttcgctggcaagcaactcgagacggccgtacgctctctgactacaacatccaaaaggaatccaccctccaccttgtccttcgtcttcgcggtggtatgcaa

SEQ ID NO: 25059 - DNA, 400 bp, Glycine max
  unsure (1)..(400): unsure at all n locations
  Clone ID: PAT_MRT3847_122630C.1
atgggggnccagagcaaatataaaatactctgtgggcgatttttttttttatttacaaaacatttttacttcttaatcctttgccaagtttatagggacaagtggtatcttacataacaaactcagggacatttattcatttacatgagtatatttgtatagcaataatgcattatcgattcaagtggtaagtaggccaataatcattataattaatggaatgcgagattgtcctggcagttggtatcctcaccaagagtgaattcaattgacatattcacattgaattcatttttctgcatttcctgttatgcatattactaaagataaagtgtttatacatgtttttgactacaagaaatttatggctttaaggtacataatgtgcctattttctttt

SEQ ID NO: 25060 - DNA, 324 bp, Glycine max
  unsure (1)..(324): unsure at all n locations
  Clone ID: PAT_MRT3847_122631C.1
ctagtttcttacaaggcttactctactgcttcaccttctgctctagaaaattcagtggtgatacatgggctttcgggctactctctctgtagccaaaccagcccttcagggcaaatgggaaagggcttctctgaattctctgggcctccgcagcttcatncagggcttnccttccccttnttnctcagaaaaaatcttncaggagggatnttcccattnctngtncatttggcctttcncaggaccctcattggcagtttgggacaggcaggtggggagggataacaaagcaagggggtggtgnaacaggaggcanaaaactng

SEQ ID NO: 25061 - DNA, 190 bp, Glycine max
  unsure (1)..(190): unsure at all n locations
  Clone ID: PAT_MRT3847_122632C.1
gctacttacagctacaattgcctggncttttccttcnttanttaaaattggaattatncttctcaactanncngtgcngctgnntcagngcctgactggtgccccacgtctgcttgnancaatagccaatgatgatatnttacctattnngaactantttaaagttgggatggcggtgaaccacntgttt

SEQ ID NO: 25062 - DNA, 400 bp, Glycine max
  Clone ID: PAT_MRT3847_122633C.1
aagagatatatgataattgatatatatatatccttgtatcagccgtctaactggtgaagaaaaatccagcaatacattaagagatgaacaaaatttaagagaccaaaaaagaaaaaaatttcaacatcttaaaaaacaaacaaaagttgggaagaaattgactgaataatactaatattctttgcatgtatagctgcttttataaccggattgtacttcaccaggtactgcaatatgtgctgttttctcaaaagactgcaacaaacaaaaactcattctaattcctcttgtccttctgaagggcattggattaactctaatatgttgactacctcagccatgtctggacgatttgatggcacttgcgatgcacaaatcaaccccaattttatcacaggga

SEQ ID NO: 25063 - DNA, 457 bp, Glycine max
  Clone ID: PAT_MRT3847_122634C.1
catagtcatcgatacaaccaggctagcggaaagacagatttttaattgcggagcgttatggaaggatgaatcacaatgctaatcacaataatcctttccaaagacgaattttccagggataatttccttgatattaaaactgccctataaattggaaaaagttaccactacaatagcacaatttcttagtggaacgaccctcaaaaatgacatagttgctgctggtacacattcttcagaagattatcctgaaaaggatgatcaagatgaacccacaaagattgatgccagattgggacatatcgtatatcctcaatacaatgcggttcaggctcagatggaaacaatattgcttaaattgtctcttgatgatgtttgaactcctaaaggttcccatgtggatcttaaaatttctcaatttaaaattgacttcccaaaacacaggggcggaaccatt

SEQ ID NO: 25064 - DNA, 446 bp, Glycine max
  Clone ID: PAT_MRT3847_122635C.1
cacttctaacttatacacatacatatcttacatggtcctgagtactattctcagaggcccaagcgaacatatgagtatactcagagggttcaatgtgggaagtatactgcccctattcgccaaaagatttacgagcggccacaggatacttgtctaaagtgcctatcgcgacttcacatactatctctttttgtgagaacgacagactgaaagagacgtaggatcttgttctgcagcgaacattggttctgttatatccaaatgcacaagctagccgagaccctgatgtatgctatgcgcactgacgactcctgtgagattttcagttatatactgaatgcaaccatgacttgaccatactgatagctgatggacatccttacatctccaatgtagaaacgatgttgatacgataagaagctatagggactgacctcttcttattg

SEQ ID NO: 25065 - DNA, 596 bp, Glycine max
  Clone ID: PAT_MRT3847_122636C.1
cccacgcgtccgccggcaccggcgtgtgtgagatagaagaagtggacgagaattcgaacgagaggcaactccatgatgatgatgatgatgatgaagagtactgtgtttatgtagcagtgggtaagagcgacacaagcatggacgctctctcatgggctctcaacaactttgttgctcaatcaccatctaccatcatttatctcattcatgttttccctcagatcaaccacattccaaatccattgggaataggaatgattccaaggaatcaagtgagtgctgagcaggtggagagttatattgaccaagaaagaggcaagaggagagagctccttcagaaattcctacaatcatgctctacttccaaggttaaggtagacaccatcctgattgagagtgactcagttgcaaaggctatcctcgacctgattcccattcttcaaataaaaaggctagtgattggagccaacaaacttcatctaagaaaatcaaaatcaaggagagggaaaggcatagccgatcagatactgcagaatgcaccacaaagttgcaaggtgagaattatatgtgaaaagaaggaagtaaatgagcagatg

SEQ ID NO: 25066 - DNA, 465 bp, Glycine max
  Clone ID: PAT_MRT3847_122637C.1
atcttttaaatctgtaaataatgttatcaaaataatcttaatctttgaaatctcacaaaaatttatattttacaatccaccctgaatatcaaggctgcaagaataacacaacatttcctatatccaaatattttacagctgtacccaaaaaggaaaaagaaaaattattctaaaaaaaaacacccaaaaaaacccacatatgcttggttaagggctaaagttacccgagcagccaaaaataaaataaaatatccaaattattagcattaatttaatacaattataacttcaatagtcactttgtcattgacaatgattgcttgatcacaggggtgagtgccccaagggctggtagtagaagctgttgctgcagaccagtgtctcctcttccctgcactgccagctcctacctgtgcatcgccccatatatactgggtgtgtatgtgtgtgtgtgtgtgagtgtgt

SEQ ID NO: 25067 - DNA, 1407 bp, Glycine max
  Clone ID: PAT_MRT3847_122638C.1
accggatcgttagcacaagttcaggaactatgagtggcttggtgcccatttgttctagaacgcttatgttgggataccaatacatgaggacggtcattggaacgtgagctcggaattcggctcgagcagtctctcggcctcccctactgcagttggactctgtcggtcgtctctttgtattgtacttcattgaacgtttcatggacgaggcactgaaagactgaaaatgaaagatttagatatgtttggaaggcgtgggtccattgcggatagaatatggaagtgccttcctcgtagaattgaatctcaaatcatccaggttccccaacagaagaatgaatatgactgtggtctttttgtattgtacttcattgaacgtttcatggaggaggcacctgaatgactgaaaaggaaagatttagatatgtttggaaggcgatggttcaaacctcaagaggcgttcaaattgagagtgaagaacatgaatcggggccaatcatacttcatttggattctttgggtcttcactctagtaaatcagtttttgataatattaaaagctatttgattgaagaaaagaactacatggatcgagaagatatggcttcagatgtttcaattgcggatagaatatggaagtgccttcctcgtagaatcgaatctcaaatcattcaggttccccaacagaagaatgactatgactgtggtctttttgtattgtacttcattgaacgtttcatggaggaggcaccggaaagactgaaaatgaaagatttagatatgtttggaaggcgatggttcaaacctcaagaggcgtccaatttgagagtgaaaatccgtaagttgcttgtagaaaaattacagaattcagtcacggataattgtaatttggaatcttctccttcatcatctgctggccctgcaactgattgtgttgagactgccagggattctcttactggccctgcaactgattgtgttgagaccaccgaggattctgtgacttaacatggcagaattgcaattgtcatttccttgaacgaacaatctgttgatattcgtatggttggtgccagtttttttttttccttgtacagaagccagctattcagctggtaatttttggatagagttttcctatgacctggtaaatagtccatcagtctttaatccaagcaagggtggctaacagttggctgtgcagaaataacaaacaactctagttcctaacctttccaaatgtatagtgggggaaacagtacaaaactgacgactagaggcaatatagagttcaaatctacccggtatttttggaagttgttttcatcccaactttactttcgtatttatgatatataggaataaaacgattcatagcattcattttacccaaaaaaaaaaaaaaaa

SEQ ID NO: 25068 - DNA, 279 bp, Glycine max
  Clone ID: PAT_MRT3847_122639C.1
ataaaaaaaaaaaaaaaaaattttaaattttaaaaaaaaaaaaaattaataaaaaaaaaaaaaaaaaaaaaaaaaaaggggcggccgtgtgtgggggatccaaaataacccacgcttacatacgacgccataccacttctaaagtgtaacataaagcaaattaaatgcacctcacttttacaacgtttaaaaatggaaaaacctggaaaaccctgacttacccaccttaaacacatcccccttttccccctttcgaaatagcgaaaaggcccaaaagga

SEQ ID NO: 25069 - DNA, 316 bp, Glycine max
  Clone ID: PAT_MRT3847_12263C.1
gagaagcacagttcgaaggaactaatagcatgggtcatctagcctcctagggtgctgcctgagccgctaccatcaatggccgtgctgcaagctccctatctggaactaaggtgtctcacaagccctataggctcagtgacaaacgcaaaaacttccagagtggcgccggggtaacaaagattggtgacaacagggggtacttggatcagtgggatcggtgcatcactacatatcggggagacttgaatggatcacatgcacctcaacgctactaacgtcttgataacgagttatgttacacattcgctgctacatg

SEQ ID NO: 25070 - DNA, 1226 bp, Glycine max
  Clone ID: PAT_MRT3847_122640C.1
ggatagcactaagttaaacattacacacaaacttcgtcgtgttactgttagctaacactttctgcaataatggcacgtactagcatccaaacaagctcttcatcacgggcaaaaaaaatttgatgtgttttcatcgttgtcttctcaaaggactatgcatcatccacatggtgcatgaaagagctgacaaagatcgttgattgggttcaagaaacaggtccaagtgtgctccctgttttctatgatgtcactccttcggaggttcgaaaacagagtggacagtttggagaggcttttactgaacacgaagaaaggtacacaaatggagggaagctctgaaagcaatcaccaatcgttgtgggtgagatgtactgaataagcctcaaaatgaagaaattgaaaaaattgttcaagaggtaatcaacatactaggttataatcaaatttcgagttttggggatgatttagttgatatacattctggtgtgaaacgaatggaagattttctagatctggacgcaaatgaagttgttctagttgtaggaatttgtgggattggtggaataggaaagatgacacttgctcacttgctactgctttatttaataaaatctctcctcgatatgatgcttgttatttcattgatgatgttagcaaaacttatggagattttggagcccataggtgcacaaaaacaacttcttcgtcaaactctaaccaaggaaatattgagataaacaacccttcccgaggaactatgttggtaagaactaggctatgccacttaaagacacttattattcttgataatgttgatcaaatggaacaattggagaaattggctttgcatcctagatatatctaggtgcagggagtagggtcatcataatctctagagatagacatatcttaaaaaattatgaagtaaataaagtttacaatgttcaactccttgacaaggataaagctctacaattattttgtagaaaaactttcaaaactgaagatattgtcaaagattatgaacaattggtatatgatgtattagagtatgtccatggctttcctctagcaattaaagtattagcctcatttttatttgacagagacgtttttgagtggaggagtgcattggctagattgaaagaaaattcaagcaaagatatcatgaatgtgttgcaattaagttttgatggattagaaaaaaaaaaaaaaaaaaacctggt

SEQ ID NO: 25071 - DNA, 345 bp, Glycine max
  Clone ID: PAT_MRT3847_122641C.1
atctattgttttggggtcttgccttaccaaatcgtttttcttttattatttttttttttagaacacaaaaaaaaagagccccgaaatccccatccccgggaaattatacccttttgcggccaaagaaaccccggctccaaaaaaaaaattttccgcacaccggcggggcatacaccagccccccacagaaactgctgctgcgaggaccaagaaggggatgttcatgctccgtcttccccggcgcccccctcttctttttcccaccccgggggggggcatcaccaaggaccttgtccgggaccctattctcaagcccccccgtgggctccccatgggggtgaaaaa

SEQ ID NO: 25072 - DNA, 264 bp, Glycine max
  Clone ID: PAT_MRT3847_122642C.1
cgagctcgtggtggtgaagcccatggattatgcctacctacagggcttcataagcgcgcatgacggtgacggtgaggttcctccacacatgctcttttgcactcgctccgattccctatttttatggagcactagaccaatttggaggcgagatcttgaggtcgaaggcatcatcggtgtagaactgtaacatgttgcttttggccccggagcctttgtcgggttttgggtttgctggtgcttgcgcaattctagagctagttt

SEQ ID NO: 25073 - DNA, 442 bp, Glycine max
  Clone ID: PAT_MRT3847_122643C.1
catcaatctggcagaaaacctcccttcaccaagcaatacacatacacattatcacaaatacagaaaaaaacccctttcagaaaaccctcaaatctactcccctcgaaccagtctttgcttcttcaaagagaaggacgatcgtaggcgagagagagagagagagagagagagagtcggcgaaagagaactcaccgactgacagaggcggcggcgggaagcgggtggtgacgaccagcgagcagtgagcggcaaagaacggcgacgagagagaggccgaagagagagagagagagagagagagcgaagtcgtggagactccagagaaatatcaatatgaaggggtgtctaaaactaacaacaaaattccaccatgttttaaaagccaataaaaaaatcatttcaactctaataaaaacagaaaacatacaatcagccaaaggag

SEQ ID NO: 25074 - DNA, 359 bp, Glycine max
  Clone ID: PAT_MRT3847_122644C.1
tttttgagaaaaaatataatgatagtaataataaccgcgctcttgttcagaacttgggagttaaacattgacaagatacctcaaatcacaaacaaaggttaacatctttctttcattcacttcccaaggggaagtaggagggagtggaaggagagttaccattgtcacgttgatacttggttcccagatgatgagtgagtatctgcatcaatctgcctcacattttctatcatcttcactacttcagacatcttaggcctctgatcgggcatcctaaccacacatgacatggctatctgtaacatttccaccatctcttcttctatgttaggatatctcatcagctctaagtcaaacac

SEQ ID NO: 25075 - DNA, 421 bp, Glycine max
  unsure (1)..(421): unsure at all n locations
  Clone ID: PAT_MRT3847_122645C.1
acttgatattgcaagggacattttttttcagctcattaaaggtttggggtgtttctctgctaattgaaggtgtgctagtacagtcaacaactctttgattggatgtaattttggtaaatttgaattgaattagagcttttgttagaggcttctatcgattatttttacttgtctggttatttctgatttgagttatggatcaaatggtttcagtcctgattgataaattgagtgttgagttgtggccctgcctccattgtctttttatgttgttcatttcttgttgcccttgttatgccagacacaaagctaatttcgatggagtgcatccatgtgttntaatggcaaattcangcaagctttgcggctgggctatggngcgattctcattggaatacttcttagttttaccacatctggg

SEQ ID NO: 25076 - DNA, 574 bp, Glycine max
  Clone ID: PAT_MRT3847_122646C.1
gccaggaatttgccgtgctacatgtgagtagtacctcctgcttgggggggggggggggatacgggctaataatggctgcaaggggaaggctgtagctgcgaagatacacgtgccgtgttcacagagagataataggagatcggatatagcaagaaaggtagataagatggcgaggagagagaggggcacaatcacagagaaaagaccaataaaaattataatgccaacccttgcgccgctccgaacgaaaatacttatcaggggtggtgcgtataaccattgaaggccttattattaaattggtcggaacgtggctacggaagattgggtctacaaggggcttccacccgctgggaccaagacacgttcgcaacaaaatgtgattgaggtgtggcgaaaagattattgcggcgcaaagcgagcgtgggagggtagttgtccgaagtgtacaattagggcattggataataaagctaatgccaagggtgttgctactggtagtgggtagattgataatcctactagtacaaagccgacccgcactaagtaataaactggtcactgtactaccact

SEQ ID NO: 25077 - DNA, 485 bp, Glycine max
  unsure (1)..(485): unsure at all n locations
  Clone ID: PAT_MRT3847_122647C.1
ttaattactgagctggtacgcctccggtaccggattgattcgggtacgcgtacgcgtacgggtacgcgtacgtgtggttgcaagatgacgacggatgggggcttaccacttactgcctgaacgtccccaacactgtataactgaactacgtattggatggcgccgacctgaacatcgctattgaatcaactgtacattgaccggagccggccatgtctaaaactagaatgttgcagttgtgactgttgaaatgaatgcgaccccaatctcagactatacatcgatgctcccagaccatgacacaccatggacggcgtggcacgcaccgacaagtagtttgttgactgccactggaaatgtagcggaccaaatgactgcatcagtaaacttgtggctgacttggacagtgcaaaataggggcctgatgttgatgttggaaacaacctgcctttgtgtgcgttgatcaaangaaaaactcactcact

SEQ ID NO: 25078 - DNA, 233 bp, Glycine max
  Clone ID: PAT_MRT3847_122648C.1
ggccgcggaatatccagggcgtacgcacgcgaccttttaaaattattaccacactgcaccagcaccttgtcctttaccaccgaagaagccatattattatcactctcctgctccaccttttcacaattcactttaaaaggcatattgctaccacttgccatcaccgtcttcaccgatgagagaagcctgctcctaagggtggagattgatgcaaagcaaattcccattttaag

SEQ ID NO: 25079 - DNA, 1182 bp, Glycine max
  Clone ID: PAT_MRT3847_122649C.1
tgcactttggaaccgacgtcgttttgcggtgaatcatacttgggctttcttcttcttcttctcttcttcttcaagattttctttgacttcttcttgaagactgcgacgacgatccaagtgatagacactcgtcgcgatggaacgtgtagctgaatccgagcgaactctgtacccatacgtgactggatcctctgtagtcgctatcaaatacaaagatgggattctaatggccgctgacatgggaggttcgtatggatctaccctgcggtacaagagtgttgagcgtatcaagcctattggaaagcattctcttcttggtgctagcggggagataagtgactttcaggagattctgcgttaccttgatgagcttatcctatatgacaacatgtgggatgatgggaattctctagggccgaaggaggtgcataattatttaacccgtgtgatgtataatagacgtaacaagttcaacccattgtggaatgcacttgtacttggtggggtgaaaaacgggcagaagtaccttggcatggttaacatgattggcattaattttgaggacaaccatgtagcaaccgggcttggaaatcatctcgctaggccaattctccgtgatgagtggcatgaaaacttgacctttgaagagggcgtcaagttactggaaaaatgcatgcgtgtgcttttataccgtgataggtctgctgtcaacaaaatccagatatctaaaattacagatgaaggtgccactgttttcccaccattctcattgaaaacgtactgggagttctctgccttcaagaatccaactgtgggcgctgaaggttcatggtaactgactcattgtgaaatgaaacagaattttaaatggatatgaaatggattccaatagaactctttaaggtgttaatggatattaaattagacttggtgtttttatatttttttttaagattcctatgatggtccaaattgatattttcattagaatttctattccagtttcctttcattatgacattcatcataggcatttttctttttcaattgcttgcatagacatcaacgcggtgctcgtgtttgaaattaatcatgcaaagatttgtcaaaaaaaaaaaaaaaaaaaaaaaaaaagaaaaaaaaaaaaaaaaaaaaaaaaaaaaaagcggccgctctagagga

SEQ ID NO: 25080 - DNA, 231 bp, Glycine max
  unsure (1)..(231): unsure at all n locations
  Clone ID: PAT_MRT3847_12264C.1
nntaagtctcttattctgtttcttgggataaaactactcttatatgttctgctctctcgtataatcttgcatatcttattctgtcaaatgcatcttggctaatgtgaggattgggtagagagttaactcgtcaatgccaatacataggttcatattattatttgcttgaattagcacacttagacttctgaaaatatgatgtcacttgttaatataatttatatactacac

SEQ ID NO: 25081 - DNA, 337 bp, Glycine max
  Clone ID: PAT_MRT3847_122650C.1
gtctggattagacaatcaaattcctactgccttcgatccttttgctgatgcaaatgctgatgactccggtgctgggtcaaaggatgtagcgcatattcgcgttcagctgcgaaatggttcgacaagcctgacaaccgttcatggattgaaaaaagaattcagctataacatgatacttatagacgttcagaaagagttctgctgcactggaacagtggatcaggacccaaaactaggacaggttatgcaacttcaacgggatcagaggaagaatgtttctactttcctagtacaggctggtatgtcgaataaggatcatattaagattgctgcgtac

SEQ ID NO: 25082 - DNA, 893 bp, Glycine max
  Clone ID: PAT_MRT3847_122651C.1
ctgcaggtcccctttgctggtgctgtattatcattttcgatgtttgctgttggtctctttctctcatcaaatccagatacaacaggagatttggtgcaagtacctagcttgttgtttcaaggttccttgcttcttggattgatcagtagagcaacccttggttatgcagcaatgcatgctgcaacagttccaattcaccctcttgtgattgcaggctggtgtggcttaaccatacaagcttttaacatgcttccagtggggtgccttgatggtggaagagcagtgcagggtgcttttggaaaaaatgcgctagtgggctttggtttaacaacatatacattgcttggattaggagtgcttggtggacctctttcacttccttggggactttatgttttgttatgtcagagggcaccggagaaaccatgcttaaatgatgtgacagaggttggaacatggagaaaggcacttgtggcaattgctatttttcttgttgtcttgactcttgttcctgttggggatgagcttgcagaggaactgggtataggtcttgtaactgcattttgatgtttatttatgtgtacactaaggccatttttaattaaaattgagtagtgaaatatatatatatataggtaatatcgttaccaaagaagcccaattcaattacggtatattaccatccaacaaccttgattgctacatcttgtcggctagactccaaatcatgggcaactctgggatggctcacacaaccttcaattttgctatctggctttgagtgttgaatttattttatttgactcttgaataagtgcgcagtgttttcttggtaatatggtacatatacaacactgagacaagcacacgtgtgctaacattattctcaacta

SEQ ID NO: 25083 - DNA, 204 bp, Glycine max
  Clone ID: PAT_MRT3847_122652C.1
ctcgagccgatctagaacaagtgaataaaaaaaaaaaataaaaatgtaaaatatagaaagcaaaaaatgagagggggtttttatagtgttgcaaaaaaacatgtataagtggataattcttatccatgaaattcaagagcagaaagtttgtcccatgcacatgttacagctaattgttaaaaaagaaagcagatacaaaagggg

SEQ ID NO: 25084 - DNA, 495 bp, Glycine max
  Clone ID: PAT_MRT3847_122653C.1
acatcaaagctatgagatcgctatccagcgaagttgaataacatagatgtttgtagcgttacaacccttgtatcaatcaataaaatctgcagacgcaacagctataggactctcatatgaaaccaagatccccgaaaaaattatctacgtagaaactgcagatcctacacatgagcccctttaactgatccaagacaaatgtgcatagtttactgtttttcacaggtagccgatgtattagtctaaagatgattatatctgccaggagagtgctcatcacacaacacccgcgaatttatctgctgactgggaatgtatcctactatgactgaagcgccatgaaacttgctgtgatcatcttcgcaccggaccatattccgtgcacggcctgctgtgcacttattggagattggggatgttcaagtcgtcaattgacgcagccagcactctttgtataaacatatatgtgttttaaggccccaaacttagagcatt

SEQ ID NO: 25085 - DNA, 140 bp, Glycine max
  Clone ID: PAT_MRT3847_122654C.1
gaacaatcaaaggattttgtactgctagctgatacttctttaatgctatcgaaacagatattgtcatgcaaaacatgttgatgcacatttggataaagtgtgagggaaactgtcatgattaaagatgttaactatctaat

SEQ ID NO: 25086 - DNA, 151 bp, Glycine max
  Clone ID: PAT_MRT3847_122655C.1
ctcaatccaggacaagctcattttgcccttcttgcacctgcacatcacgcattatcacttaggccttccttaccgcgatgagagcgatgataaagttacaattgaaagtgcaaaagcaagtctccagcacaatgcaccaatcaactgcgcc

SEQ ID NO: 25087 - DNA, 140 bp, Glycine max
  Clone ID: PAT_MRT3847_122656C.1
tttccaggcattggtctcggaactcttctttcaagcggtaggatcgggtctgatggcatggtgcaggctgcagctgagcgtctggctacagacatgagtgaagaggaggtaatcaaaggaattagtttcccttcaacatc

SEQ ID NO: 25088 - DNA, 298 bp, Glycine max
  unsure (1)..(298): unsure at all n locations
  Clone ID: PAT_MRT3847_122657C.1
ttgangnancntangtaagctcggaattnggntngagganaaagcgttatnanataaagtgtgtgnagagagagaactgaagnngaagcagaagaagaaggatcttaggtatntnagnnagtatttaatttgnataagantctgcatntgggaaatntcagacacaantnnanntgaaagaanaaganattnganagagnggngtnggaggagattnnngaatcaantacanananagaaatngancaaaanaanggnagnggagaanggannattntnnaaanngaaanngantngg

SEQ ID NO: 25089 - DNA, 284 bp, Glycine max
  Clone ID: PAT_MRT3847_122658C.1
acccacgcgtactgaatacaatcaacagtagctttctagctaatcaagatgcagagagaaccgtgtatgtaggtgaattgcgagcaaaaggtagagactccaacaaaaaaagcattgcttaacacctacaatgcaacataactctcatccaaccagtatgtatatagatatgtgcaaacaatagatgcacctttacagctcgtatggtccctcataaagcgctttgagtatacacaaaagtacaagctctttatgaagaaatgcaaccttcttgatggtgatgg

SEQ ID NO: 25090 - DNA, 329 bp, Glycine max
  Clone ID: PAT_MRT3847_122659C.1
gggggtggttttttttttttttttttttttttttttttttggaaacagcatttttttaaacccttatttttataaaaaggggaaagtttttattcctaactctgttttcccccaagcattaaataccctttattttttacccctgaattacctggattaaagcggtccatgtttgaaaaggggattcctggcttttttaagattcaaaaaacctcgggctattttttggattaaattatgaaaatggggttttggggggttattttaaaaccttggagcttttgcatcctccgtggggatggaattgcatgatgatatttccccaaagg

SEQ ID NO: 25091 - DNA, 227 bp, Glycine max
  Clone ID: PAT_MRT3847_12265C.1
gcaaaaccctgcagcccatgctgcagcgacgttttgctgctacattttaggccatactgcaaatggcagacaacttgctccagattactcccgtgtagcactccagattttcccatcaatgacaaattggtcacgcctccaagtgctgacagctattgcagctgctacagtagctgctgcaactgcatggtgggctgcccatggactgcttcctttatgtggtccac

SEQ ID NO: 25092 - DNA, 566 bp, Glycine max
  unsure (1)..(566): unsure at all n locations
  Clone ID: PAT_MRT3847_122660C.1
tattatcgcaatttactctcttagtgatccctgggaggtaaatctcttggtttgaattagtttgtatgtcttgattgttttggaatgaatctgaatctagatagatggacgccgttcctaccctcatttttttagaggaatgttaacctcacactgcctaatgcaccttttctgacacattcttttattatttattgaaacttattaaaaattacaaaatcataaataaagtttattaaacaagatctacaaaatttggtgttttttaataaatttcagctaaataattaagagtgtgatcaagagtgcgtgttgctaacacttatctttcttttattcacaaaacacttgaatctctcaaaacatagtatatggatcattaggtctatttgcttgtttatattgatattgctttctgatgtcataattcaaccaataatgttgtatctgtaggtcatggaatttctgacatcacttgcggaatggaaatcaagcattcaagctcgctgaaaagatttacatattgtatagaggagaacatactccactatgctatatnatagaga

SEQ ID NO: 25093 - DNA, 556 bp, Glycine max
  Clone ID: PAT_MRT3847_122661C.1
atttcaaggagtcaaatacaaaatagtgcctgcactaaagtattagaggcttaccacttaggaacatttgtctttgcaaactgtcgctactcagggtgcagctgctctatcagagtaaatagtcgtttcttagagccaaatagagatcgcccagaatactatgcgagaagctagtaccatgcccatagcatcccttcttacatagctctactgttagtgaccttctaggatcggaccagctactagcatcatgaactgcttgtcgattagactgacaccttacttgtccatattttatgaagtacgaacctttttagtagaaattattagatagatagattgttagacgccacccttgtaatctccttgaccactagcagaaatctcccatggatctcgtactctttaggagctccttaggcagtaacattactgtcatacttagctccactagatactgccatgttctcttgatctaccttgtgtctagggatacatcatctttccgcaatcagctgctgaaagtttacgttccatagtatgagactggaagaga

SEQ ID NO: 25094 - DNA, 422 bp, Glycine max
  unsure (1)..(422): unsure at all n locations
  Clone ID: PAT_MRT3847_122662C.1
gcaccagggtatataggcctcaaataaaagtccaatatatatatatatatatatattcttgggtatccattggtgatcgtgtaattagtcttgcaggttataaatttgtgtcttactaaattaaatttttagatcatcactccgctgtcggaaaccagtgtagtaagcaataataatttgtcatacttgtaaaaaaaaaaaaaaaaaaaaaaaaaaaaaaaaaaaaaaaaaaaaaaaaaannnnnnnnnnnnnnnnnnnnnnnnaaaaaaaaaaaaaaaaaaaatccnggttttccccccccccaaaaaccggggggggaaaaaaaaagggaaaaaaaagggggtttcccctggcaaaaaaaaaattttgggggggccccccccccccccaaaaaaaaaaaaaaagggggttttcccctttt

SEQ ID NO: 25095 - DNA, 519 bp, Glycine max
  Clone ID: PAT_MRT3847_122663C.1
acggaacggaattatatttcgggtagatgagtagtctaaggtcgggctgtttttttttttttttttgtatttatatatttatataatagttagaaaatggtatacagttatttacaggagggaaaaaacaaaaggatcgattataatgtatgaaattacaaagggagaacaaaatagagttagatcttaaaatcttatttggataactatacatgaaagcttttaaggagtcaaatacaccatagaaagtattaacaaacttaaaggcacttagcattttaacattttaagtataaagaattgatcactatacgttggcaagacattcaccaggaattcgaccatgtaagtgaaaggtattggcatggagaaaggttgaatagttgtaagcaaactttcataagttgcattgaaatttattatgaaatgtattgtttgatggatatgctatgtagatatgccacttgaaacacagtgaaacatgctttcattgcaaagaagaatacttgggattacaaa

SEQ ID NO: 25096 - DNA, 1356 bp, Glycine max
  Clone ID: PAT_MRT3847_122664C.1
aggtgatagagtattgattgggactaggggagtgtttagaagacgatatgataaggtgcccaattttcagtggacaccaaccaccggcactgaaatatcttaacgtcccaacaaaaccaaactacccatcagttgaaaaacttgattacccatccctcccccttaaatcacataaccctcttctaatcccttctcacaaactcaaaaaacccttacagtactttataccaccctcatcaactactatggattcaacaacttccacagaaagtgaagtagcctatgacatcccacccatcctcaaagtctacaaaaacggtcgcatagagaggctcgcaggcttcgaggttgttcctccgggtctcgaccccgaaactaacgtggaatcgaaagacgtcgtaatcgccgaaaaagacggcgtatccgccaggctttacattccgaaaaccacttacccaccaacgcaaaagcttcctattttagtttacttccacggcggcgccttcataattggaacaccgttttctccgaactaccacaacctactcaacaacgttgtttcaaaggctaatgtgataggcgtttccgtccactacaggagggcaccggagcacccggttcccattgcccacgaagattcgtggagtgccctcaaatgggtcgcttcccatatcggtggaaacggtgttgaagagtggctgaacaaatacggagattttgagaaagtgttcgttgccggcgacagcgccggcgccaacatcgcgagctatttgggcattcgggtcgggttagaacagttacctggtttgaagctagaaggggttgctttggtgcatccttatttctggggcacggagccgctggagtgtgaggcggagcgggcagaaggcactgccaaggtgcaccagttgtggcgatttacgtgccccaccacgacgggatccgacgacccgattatcaacccgggtcaggatccgaatctggggaaactggcctgtgggagagtgcttgtttgtgtggcggagaaggatttgctgaaggacaggggttggcactacaaagagttgcttcagaagagtgattggcctggagttgtggacgtggttgagactaaggacgaggatcacgtgtttcatatgtcggatccgaattgtgacaatgctaaggctttgcttaaccagattgtttcctttatcaaatagaattgaatagtttaatgtgtgctctatcttgtctattgtgttttacttatcgtttttagttttcagtgtagtagtgtatgcattctatcttatatcgtatcgggttaaagttgaatagttaattgatttaaagtgtgaataaaaaaaaaaaaaa

SEQ ID NO: 25097 - DNA, 580 bp, Glycine max
  unsure (1)..(580): unsure at all n locations
  Clone ID: PAT_MRT3847_122665C.1
cacctatcgcatgcacacatgcaccctttttataaacattaatgataaaaaaaatcttgtgtataaggaaaggaattaaaggaaagcaatataatcaattttaatctttaaaaaaaactttaatcttttcagacctatatttttacatttccaacagcttactggcaatgagacattttttctttaagaatagtgcattacgcttcaattcatactactctaaactcatcttttgaattttattttactttttatttgctttattgtttgttattcattccttattttcatttttgaaaattaagttgtctgttgctgtgttctcactgtcaagtttctacattcctttgctaatattttttttcctaacatgccttttaatttttacctatatttttctttagaattatatatttgngtgagaactgttttccctttccccctcctctatctcttctaatttctttcttgccagcaattcacctccagtatgtgtgaaatggtcgtctttgtattaaaaaaaatagaaatccctatagtaaaatcgtacctgtccacaaataaatcaaactgaatgctg

SEQ ID NO: 25098 - DNA, 390 bp, Glycine max
  Clone ID: PAT_MRT3847_122666C.1
ggttcaagtaaaacaccagaaagctcatatttatgcgtgtaaagctgatcttccagggcaaaaggaggaggaagcgagggcgcaatcagctgatggcagagtgtttaagattgttccatggcaccatctggagcatagcaccagcaactccctgagcatacaggccttaagccatgatttgactggttcagataggtaataattactgaattcaagacactaaagcttcttattctatgagggttcatataaaattgataagggtttagatcttgctagtaataccaaggattcgtgaaccaactgaacaatcacaccatggatgatttgaaataacaaagtaaattgcagttcctgtctaacatctctaggaaattttccaaaacataa

SEQ ID NO: 25099 - DNA, 413 bp, Glycine max
  unsure (1)..(413): unsure at all n locations
  Clone ID: PAT_MRT3847_122667C.1
ggaagctttgtctgagatggctagtgctgttaaggcactgatgaatgataaagagaacaacgatacatcatttgacgatgctttaagtgcacttcgagctatgccggacgtagatgatgagttagtaatggatgcgtgtgatctgttggaagatgagagaaaggcanatatatttttagctttggatatctctttgcgaaagaagtggttgcttagaaagctacgtcaggaaaagtcacatgactcaaactgtatatagcttatgaagtttttgaacttttccttgtccagattttacttttcatcactaggaaaatcttagaaacaacccacatcgtagtgtggctgtgtacagtgcaacataaagcttaagccatatttcctctaagtatatgtttttttgtgtctatgtg

SEQ ID NO: 25100 - DNA, 283 bp, Glycine max
  Clone ID: PAT_MRT3847_122668C.1
ataagatattatgattatgttgtcatatgacacagggtggaatctactcgcaggcaatgaatgaacaacaccaattctgaaacttcttctacgacgtcttcttcttgtgtacctctcgggtactattactactgctgaacatggaactgttgtctttgagactcaccactgcacatacgcgttcgacttcatcgctgcctgcagcacttgctcactgatccaagctatgcgaatttcagccgaggtagaagaagaaggcgtgcttcgacgcgcctaagcttgc

SEQ ID NO: 25101 - DNA, 299 bp, Glycine max
  Clone ID: PAT_MRT3847_122669C.1
ctgtttttatttgaaccggaatccacattccatcttaataatttttataataattatctggattaatgattcattaactttgattaaaagcctctcatttttggacatggactaaatttactcatacagtcgctgcaggaatgacatgcttgactagacaggtacaggccttgcctaatacaaacatctgtgtacggcattaaagtttattgctacccatccattttggaagctctaagagctattctcattttcagcatgagtctttatggggtcaaggaaagatgggatcaaaagtt

SEQ ID NO: 25102 - DNA, 539 bp, Glycine max
  unsure (1)..(539): unsure at all n locations
  Clone ID: PAT_MRT3847_12266C.1
ctcatgcgcctnatttggctcttctccctttgatcaaatcacacttgcatgaattgcactttgaatttcagttttttttaccgttcatttcgatccacatccctttccgagacacactcaagctttgtgaagaataagaacactattggctcaaccacgctgagtcttctgatgtgcgatggccttttgctgttgcggtgttgtgtcggtaggattgtggtgaacaataacagtctgaacgtggacttctacgaaatcggccaacggcacggatgaatgagcaatggcccattgtgatgttcccaagtatgagccgaaccttagctggctcttttctgccccgagcagtttatcagcaaggaagcacatgcccccaacatactctactccgagcccttatcccattgggaaacgaattgttgatctggggctggaccgcaatacaaagcctgtttgcaaattgcgctgggctccaagtggttttggccttcattgcctttgggtgtagggacctggtcctggactttggttcacctttt

SEQ ID NO: 25103 - DNA, 503 bp, Glycine max
  Clone ID: PAT_MRT3847_122670C.1
ccgacttggttttgtggtttattattgttttgtttgttgcttttttttttttccttttttggttttcttgccccaggggaggagaccaaccccgcagaagcccaagcaagtgtttaaagggccaagaacacctaggcttctggttgatccttctgcttttttcatgccttggggccccttaccccggcctaaactttgaaaaaaaaaattgggattcctaaggaataaatttgtttatacccctcaaacccccctccaacccttagatgtgaattgcccaatgagaagttctgcagaatgatgtaaaggccactcaggtgttacagtgttttttagtacattaccccttgttatgcccgtagcccacccccgtgtttttaaaggggtgtctgggccttaggagagtacaaaacaaagtctatgagccatgctcccccccttgctttgggcttcataacccctgaaaccatttctggccccttgaaccccttgaacgcccccca

SEQ ID NO: 25104 - DNA, 1810 bp, Glycine max
  Clone ID: PAT_MRT3847_122671C.1
caacctttttcttgggatgacatgttaaactccttccagtttattgggaatcagctcttatatctctggaatacatttctgaaattccacagggaaaataaaacaaagatactggaatttctccgtaactcatgggctaatgatcgaagaactgagtggtcaatatggatggtgtactccaaggttgatatgcctcaccagtacatgagtaatggagttgaggggacatcattgtaccgtagcttgcgtgggagatcgtcaagtacaaggagttctaacgatgatcctgttcaaactgcaacaatgcgagctgaacttcataggcgtggtatagcacaaatgaggatcaacgaccggtcacttcaggacatgtatatatttggagatcctttgcgtgttcctattattattgtagaatgcttggaaaacatgcaccgttctgccagtgtgaagtcatatttccttcctttggaggacaaagctagacatatcctggaaaatggatctagagccataataaagttgcctgggaatagccccccacaaaatgagcacgttttgagagtagttgtttttgttcacgggtttcagggacatcatttagatttacggcttattaggaaccagtggcttttaatagaccccaaaatacaggttcttatgtcagagacaaacgaagataaaacatctgaagacttcagagaaatgggatcacggcttgctcaggaagttatctctttcctgaaaaagaagatggataaagcttcaagagttggaaacttaaaagatatcaagcttagctttgttggccattctattgggaatctcatcatcagagctgctttggcagaaagcatcatggagccttatctaagatacttgtatacatatgtttctatatctggtccgcacttgggttatatgtatagttcgaactctatattcaattcaggattgtggctcttgaagaagatcaagggcacacaatgcatccatcaactaactttcacagatgatcatgatcttgagaataccttcatctacaatctttcaaagaagaagacacttgcaaacttcaagaatgtgattctgttatcctctcctcaggacggttatgttccatatcattctgccaaaatagaactgtgtccagcagctacattggacttttctaaacaagggaaagtgttcctggagatgttaaacaattgcttggaccaaatgagaactcactctgagcatcgtatagtcatgcgctgtgacattaacttcgaaacctcctcctacggcaggaggagcttcaacacacttattggacgtgctgctcacattgaattcttggagtgtgacatttttgtcaagttcataatgtggtctttcccagagctctttagttagaattagtaaacaaagggaattatttgcatgaaattagacttacactgttacacaacacagtgacaatactgcattgtgatcaaagcaatcattagatgccaatgtaattatttcttgcactggcatgcacaaccaacagcacgtgtgtacaacatcggttaaaagttaaattttttttacaagttgttagttctgtaggattaggaacttaattaggcaaaatggtgtaaattgacaattggaattcaaagaaatttctgctgaaattcaaagttatctcttaaaatagtgattttgccttgttggtccagtgtcgtgtcaactgtttgttttgccgttgtctacggtctaattctgattcttatttttcatctcaatttatgctcactttaatagagtttatacaaaaaaa

SEQ ID NO: 25105 - DNA, 202 bp, Glycine max
  Clone ID: PAT_MRT3847_122672C.1
gttgttttttcaaaggggagatattttgatggcgatctactacatgaagcaggtgagatgacttctccctacattaaatgtacaagctttttgttcataacatttagaaatttggctgacgaccccatccactttgatggcttttctctccaaactgcaccagcttcatataggtctcaataatgttttccaaagttaccta

SEQ ID NO: 25106 - DNA, 1042 bp, Glycine max
  unsure (1)..(1042): unsure at all n locations
  Clone ID: PAT_MRT3847_122673C.1
cggtaaaatgttgttttataagttgagtgcaatgcattttctgtgcaatgattttgatttttaaattgctatatggatttattatgtataaagacgtgatcattcaattatatagaatatatttttgcctttgcattatttttaatcatgtataaatatattatttctaaattattggacttggtttttacatgttacatataaacctgcgtcggttcggctcgagtgaaaactattattggtccggatacccgggtcgacccacgcgtggtagtcgtagtaggcatggaggatgaagcggaagaaacgaagagcgcggtgagaatattcgtcggaggattggcggaagccgtgagcgccgaagaccttcgaagcttattcgcgtctctgggctccgtccaatccgtccaaaccatccgaaccaaaggtcgcagcttcgcctacctcgacttcctatccgaccccaaatccctctccaagctcttcagcaagtataatgggtgtctgtggaagggtggaaggctgaggctggagaaggccaaagaagactatcttgtgcgtttgaagagagaatgggaacaaggcactctagatgatgctactcaaaaaccacccactgctgcttctgaggaggaaatgcccaacaccgcacaatcttccaagtcaaataccaaacacctcaatattttctttcccagattgagaaaggtgaaatccatacctttcagtggaactggaaagcacaaatacagttttcagaatattaaagttcctcctctccctgtgcatttttgtgattgtgaggagcattgtaagccttttgtccctgaaagagaaaagctatctattgataggacagctgatagtggtggaatgaatgatgaggagattagcataatgaatgctgtgatgaacaagctatntgaaaaagaacaggtttccaatgccaagaaccttggagaggagaaggattctttttgatcacctgatgctttacattctgatgaatgcgaagnatagtgcacagatgaagatgatctca

SEQ ID NO: 25107 - DNA, 501 bp, Glycine max
  Clone ID: PAT_MRT3847_122674C.1
ccttcgcgtcctggactggattggccaatagaggactgagtaagggcaacgatattctgtgttgcgattatgctaggattgacggggtgattaccaagcaagttatgagcaagatggccgaaatgataaacagtctttatacttttaatcaaaaaatgacgcgcgagaggacacacctgctgttgggttgttgttcaaggatggcaatttgttaaaaagatgtttggagagttgaatgtggaatcccttctggatttccgctcacaggtatttgcaatagcatgcttaatgagatgctcattagatatagctatgagaaattactgcgcccggctaaagctccacgtatgttcctacaatccttcaaaaagtttgtttatttgtgtgagtacggagatgataactcagatagtgtgcatgaatacgtcaagccttactttagtggttgtaaattgaaaagctatctagctggccataatgtcaccattactgatggtattg

SEQ ID NO: 25108 - DNA, 178 bp, Glycine max
  unsure (1)..(178): unsure at all n locations
  Clone ID: PAT_MRT3847_122675C.1
tntaagaagctttcttctccttcaactnccantcancaaagtagggtnacctgggagaggcgagctctcgntgacctcacnganacagaagactggtctgcattacaacttcnncnataaccgcttctncngttnnttcntttaantccgcttccagttcagaccatnggnnttcgtc

SEQ ID NO: 25109 - DNA, 290 bp, Glycine max
  Clone ID: PAT_MRT3847_122676C.1
gggggggaaacacaaactttatttttttggggggttatttgttacaaacaaaatttttgtaaaactaaccataacaggggctttatttaataaagcataaattttacctttccccaaaacataggggaatagagccccgggctccattattgatattttaaaagctgggtgaaattaacctttggcagccttgttagcctcattcacgacttaggggaattttctaacaaaagttgaatggtgagggcttcagggtgaaatactccaatttttgggaggggggttaacat

SEQ ID NO: 25110 - DNA, 362 bp, Glycine max
  unsure (1)..(362): unsure at all n locations
  Clone ID: PAT_MRT3847_122677C.1
gaacaaagaaagctctttcaaaaggtcttctctaatacatcctagtgactcctcaggaaagtagcagaaaaacacaacaacctcttggtatcaatgtgctttagggaactacttttatttgcttagaaggttcctccaacctagtgggttaatcttgtgcaattggacaccaattgacacctgcaataaaggccacaaaatggttcatccatcaccttgtgattctttaaaataaaccagagatgtcagatatatcaacagaaatgggggaaaagctgctttggcccctaaaatttatctgctannaaaaaaaaaaaaaaaaaaaaaaaaaaaaaaaaaaaaaaaaaaaaaaaaaaaaaaaa

SEQ ID NO: 25111 - DNA, 427 bp, Glycine max
  Clone ID: PAT_MRT3847_122678C.1
ggtatacatatatataatagcatttgttcgggacatgttaatgtactattgcaacaacaacaacattaacatcatctgaggttaatttgcaactacacttcctggtgtatttcaattaattcaaatggcgcaattacctccaaagatcccaaacatgtcaccaagttggccagatttctcttcacaccaacagaagatgcaattgccacctcttaataacaacggcaccatcaccaacaactatcatcagcacaatcagaacccttcttgggtggatgagtttctcgacttctcctcggcccggcgcggcgttcaccggcggtcggtgagcgattccatcacctacttggattcaccaatgaaatgtggaaggaattaaagcaacaacaacaatgggaaccagttttacaaggttgatgatgaacaa

SEQ ID NO: 25112 - DNA, 1585 bp, Glycine max
  Clone ID: PAT_MRT3847_122679C.1
ctttaagaactagataagtaattaaatcaagaatcttctaagattaacaaatggtgcatataggttgtatgatagtcatcttttttccttgaccttggttattgcgctttcgtcacactggtggtgttaatggcctgggtcgtttggtgttattagtgacccttatcttggacttggtcacttggtggcgtttggatactcctcctttgtatttatgaccttggctcgcggcttcctaccgttcttggctggcggggtcttgtttgggatgtccttgggtattgtgcgttgggggccctaagggggaattaggctgctgcctatatctgaaaatattgaaaattatctggaacaaaataacctgatgcctattggatactcatacaaagaaattaagaagatggctagaggtttcaaggagaaattgggtggaggaggctatggcattgtattcgcccaatggatctcttgacaaatttatttttaccaaagatggctacatacatctaacggttgccgccatgtctattttagcgattgggcaacaattggaagaatacatcatcaaaatgtagtacaactaattggatattgtgttgaaggctcaaaacgtgcccttgtttatgaattcatgcccaatggatctcttgacaaatttatttttcccaaagatggaaatatacatttaacatatgacgaaatatataatatagcaattggagtagctcgtgggattgcttatctccatcatgggtgcgagatgaaaattttgcattttgatatcaatccccatttggtatgctttggatggagatggcaagtaagaggaagaacctaaatccccatgcagatcattcaagtcaactttactttcccttttggatttataatcaacttggaaaagagatagatatagcaatggaaggtgtcacagaatattggaggaaaatcccaaaagacttgtgtttttatctttgggatgcttttgatagatatgccaaataagaggaagaacccaaatccccatgcagatgatcattcaagtcaactttactttcctacttggatttataatcaacttgaaaaagagacagatatagaaatggaaggtgtcacagaggaggaaaagaagatgatcattgtttcactttggtgtatacagttgaaaccaagcgatcgcccctcaatgaacaaagtagtggaaatgcttgaaggagatattgaaagcctagaaatacctccaaagccttctctatatccccatgatacaatggaaaatgatcaaagcatctactctagtcaaacaatgtcaacggacttcattagttcttctagttattccaaggaaattgtgactaatcctttggtagaggatgttatttgataatgcacaatagttatgtatttgtattccccttattgtcttgaacccctgttcatttaaaatatttattttatctaaaagatttcctattgttttatctttcaaagttttaaaaaatgggtttccaaaatttaagattttgttccaattaaagttccctgatatgtaatcaagattcatgatataaattgattttacttg

SEQ ID NO: 25113 - DNA, 337 bp, Glycine max
  Clone ID: PAT_MRT3847_12267C.1
acttcatgtggtggacttcaccgacgaaaacacgaagaagcccggcaccgatgcatggctctcagcgtgcagtgtagtgaggactgcactcgaggacaacggttttttcatggcacgctatgataaagttggcaaagagctttgtgactcagttgtatctgcggtggaagagctatttgatctccctgtggagacaaaagcgcagaagactagtgagaaactttagcatggctacttagggcaagtctggtggctgcctttgtgtgaatctgtgggcattgatgatccggtgaccttgctagggtgtgaaatatctgggcgcataatgtggccggag

SEQ ID NO: 25114 - DNA, 880 bp, Glycine max
  Clone ID: PAT_MRT3847_122680C.1
tcgcgatccggacgcgtgggtttttttttggtaacccatttttttaaactttgaaagataaaacaataggaaatctttagataaagtgttcaagacaataaggtggatacaaatacataactattgtacattatcaaatagcatcctctaccaaaggattagtcacaatttccttggaataactagaagaactaatgaagtccattgacattgtttgactagagtagatgctttgatcattttccattgtctcatgtggatatagagaaggctttggaggtatttccaggctttcaatgtctccttcaagcatttccactactttgttcattgagggacgatcgcttggtttcaactgtatacaccaaagtgaaacaatgatcatcttttttgctattttattttcctcctctgtgacaccttccatttctatatctgtctcttttccaagttgattaatccaaaagggaaagtaaagttgacttgaatgatctgcatggggatttaggttcttcctcttacttgccatctccatcaaaagcattccaaagctaacatcagcttgtgggatattccaatatttttataaaataattctggagccatatacccaaagccatagcctccttcacccaatttgtctttgaaacctctagccatcttcttaatttatttgtatgagtatccaataggcatcaagttattttgttccagataattttcaatattttcatatattgacaaatgcctttttctccatttgtatatcaaaagcacaataaacaatgtcatcccaaacaaaaacttgtctgccaagaatggtagaatgtagtgtccaaagctaataaatattgagtcataggcaccgatttcacgttca

SEQ ID NO: 25115 - DNA, 317 bp, Glycine max
  unsure (1)..(317): unsure at all n locations
  Clone ID: PAT_MRT3847_122681C.1
gacaccaaaaaaccaataactttcaagctgcaaggctccattaccctaagcaacaatatcaatgaccggaaaaccctgaaaaagaagccattgccttcagcttctcctgctgatcagaagaagccatcaccgtcgccttcttccgatcagaagaaaccagtaccgaaggagcagagagcaaaggcagctggcactcctccaaaaccaaaggccaaagatatgaaggggagtcaagagaaaaagccacaaccacaacagaaagtgcctncttcggttagcgcatgaagcttgctgctgcgaaaatggttactgatcat

SEQ ID NO: 25116 - DNA, 448 bp, Glycine max
  Clone ID: PAT_MRT3847_122682C.1
cccggaatgcacgggtcgcgccacgcgggcgcgcacaatttcgtccgcccactctttcgataacaagactgataatgtcaccttccactggtcgggcatgaccgaaggaagccaaaatagattttcatactcaggatgactctttcagcgctgcctctcttaaggcatattttgcagagctccaatcaatttcttaatttttgtggcttcatgggcgatgggtatcaaggcattcgcattacaaacgagctgtaaaatcatgcagcgcttggatccaacgtatgatggagatacaagctgtggtacatgcatttgcactgtttgcaggtgtctccgacgaccccaacatataaggtggtcacttcgaactccatgctgtgcactttttggattgaccattgggggcaacatcactcttactcactggtgttttatactggattgccca

SEQ ID NO: 25117 - DNA, 714 bp, Glycine max
  Clone ID: PAT_MRT3847_122683C.1
ccacaacagaacaatacataaaatagtaaaacttataatacttgcttccaaccatgaaaatttaaaacatagatatccacaacaaaacactaattgcaacaatagtttctaggggtgttcgcgatgtggtttggcttggtttccacatgtcaagccgctaaccaaaccaaaccaaaccgcacggtttggaaaataaaaaaaccaaaccaatgacaaaaatcggattttgtggttttcggctttttgggtcggtttttggttttacgctcggtttggtttggttctactatgatcatcacttcgaaggtgagagagccatggggctacagaaagtttgctgctttgcactcttaggccacatattcaaaccttggaaacagcctttctgcttccaagtggataaagcagctgcatacatctatacttgtacacggtgggagcctcatgccaatgccatgagtcgccctaactagaatcacaatttcataaacccaaccacaacattaaggcttcggaggcctaagcaaccgcaatgccagctgcctcggcggcttttgcctctaatttttccatgattccattgatctcaacacaaccaaagtttaaaaccttgacaagaatatagaaatgcaagacaacaagccctaggtcagcaaactccctagactttatacaaaactaaaaccccaggatctgattagaccatgcacctca

SEQ ID NO: 25118 - DNA, 893 bp, Glycine max
  Clone ID: PAT_MRT3847_122684C.1
aggttacccgtgtcccggaacttcccgggttcgacccacgccgttccggaactttgttggtggacgtgaatcatcagggtcccttcctccacaccctcctctgttgttcgaggggttacagcctttgctgctgtaacttctggataaactaaactcctccaggggacaaaaaacttgggtttagcaactttcctcctgggacttggaatcccaggaagagccaaggacctcttcaatcaaagttgaatcattagcttctttcttaagaagaaaacaaggttttcgatcccatttggtacctgtcaacttccttgcaacggtttattcattttccaaaaaagatcagcttcaaggtttagggtgaacactgtacttggtttagctgcaccacctttaacagttaagcttgtgcaagctttccgcttctaacgctaaagattcagctattgagagcaaggagctccggtatgaccaaaaaagtggatttcatgtcttggatgctttgccgaagaatgtggatgtggggacatatgtgtttgtgtttgagattgtgcttcatgattttggcagtgaaaaagtttatgcaactggaggccaaattcatgtaccaatatatgtcactggaattattgaagtcggtaatgcagaaatcacagttcttgacagtgatcttggaagtgctgaaacccagaaaaagctagatttggctggaaatgatgccgtttcactctcagctaaccacctgcagaagttgaggttttctttccaattgacaactcctcatggtcatgtttttaagcctcatcaggcgttttttaagttgagacatgagacaaaggttgaacacatctttgtggttggaaataccggcaagaagtttgagaaagttctcg

SEQ ID NO: 25119 - DNA, 774 bp, Glycine max
  Clone ID: PAT_MRT3847_122685C.1
ccgtgcgtccgttcaattgcagaaactgaagctcttattactccctcactgcaccatcgcttaccgaaacggcgtcgctctggctcagaggggaagtgccgttaagttcgaacgcccaaaccacctcagaacgccgtcgtcgcctaagccccgcttccctcactcgccgggatccgccgtccgccgctccacctccgccgcagctagaagcggagacggagtgcctggaagagttcgagtgtctgtaaggttgagacctcaaaatactgaagaaatgatggctgatgctgattttgctgactgtgttgaattacagccagagcttaaaagactgaaacttcggaaaaacaattgggattcagatacctatgagtttgatgaagtgcttactgaatttgcatcacaaaagcgtgtttatgaagttgtagctaagccagtagttgagagcgttcttgatggttataatggaactgtgatggcttatggtcaaactggaacgggcaaaacttttactcttggacaattgggggaggaagatacctctgatcgtggtatcatggttcgttctatggaggatatcttagctgacatatctccaggaactgattctgtcaccgtctcatatctgcagctttacatggagactctccaggacttgcttaatccagcaaatgataatattcctatcggggaagatccaaaaactggtgatgtgtctttgtctggagctactctagtggaaatcaaggatcagccaagtttcttggagttgct

SEQ ID NO: 25120 - DNA, 230 bp, Glycine max
  Clone ID: PAT_MRT3847_122686C.1
gaatattaatgtatcacgtattatttcaattgttaaataagaaaaaaaccctgatatcaatcaggctaacaaaattaaacatgaaatcaaagacaaagaatcttcaaacttttgaattgcaacaccatggcgttaaaccctactcactccctggagaggaagacacgtatatcctttttctccatttctgcactttgagcctatctttgatgacacaatttagtggaaag

SEQ ID NO: 25121 - DNA, 364 bp, Glycine max
  Clone ID: PAT_MRT3847_122687C.1
tgaattatgaacatcaactttaagttctatacatattacactttccatattcacaaatgtatgaaacatgcacaaaacaccttcttcgtcaataatttgaattgacctatattgaacttgaccattgaattcatatacaagacaacgataccatagtgcagtaattataaacataacatcatttttgtaattgatgattgtattgcggtgattatgtttgacagcgttattgttggattcaagagtaacgattttgtcttgtcacctctgaaaactacatttgctcttgaactttgaatgatttcacgattgatataaacatacgtacaaaatggctctgacctcattatgattggtgtctctg

SEQ ID NO: 25122 - DNA, 504 bp, Glycine max
  Clone ID: PAT_MRT3847_122688C.1
cccacgcgtccgcccacgcgtccgcccacgcgtccggtgatagattaatatatatttaagttatctccaaatgtaatacagatgctgttattggatatgcttatgtgtgtatcaggtgataattaaacatgaaccttttattgatggtgtaagatgattactagttctccattcctgacttatatttttgaaaaatagtaattatatacaaatcattctttattttaaatactccactaacatttctcatttctctctatcttcacatatcataagaaaaatgttacatggacacccattgtgttacttaacacctagagagagagtgaaaaaagagaaaaaaaatataagtaaaataagatttatgatgtaataaaaagagagagagaaagaaatgagaggtgttgaagatatgtttaaaatgatgaagtgtttgtgtatcattacttatatcataagctctatcatacctatattttttctctttaggtgttggataacata

SEQ ID NO: 25123 - DNA, 249 bp, Glycine max
  Clone ID: PAT_MRT3847_122689C.1
accacacgtccgactatacaatctatgcttatttctatagacggacttatttcctacggggtatgcactataagttgctccccaatatgtcactctcttatctatacgcatgatgctcatcaatgtccaacgatccctcaagcctttcaacatcttcaactagaatccttattacctaaacaacatttgtccaacacgaatgagcctcttctaacattcaatcctcttctcggaataattacatctcct

SEQ ID NO: 25124 - DNA, 189 bp, Glycine max
  Clone ID: PAT_MRT3847_12268C.1
attttttgagatatatttttttttttttgcttcctttttccttaatggttacgtttatgttttacctgtaccacccgggcggaagggctctcccaacggaaggagatcaaaatacccaagagctacctttttaatctatgggcccccaaaaacgctcgagccttttctaagtccttgttttccccgagg

SEQ ID NO: 25125 - DNA, 292 bp, Glycine max
  Clone ID: PAT_MRT3847_122690C.1
cgagaggattctttgtttttttaaagagctctgcaatccttgggggggacataaaaaaactaccaggagttaaatggaagggagcttgcaatgataataaaaaaaaacacttaagggaccgccctgttattgagatgaccgacctccgtataatatccgaccggatcctggatagagaaccagcctaggaatggagaggtcttgttttactatgggcaataaacggtcggacatattagattttagcatttatttaaatttgaatgtttggtggatcataagatgcgcgtgt

SEQ ID NO: 25126 - DNA, 421 bp, Glycine max
  Clone ID: PAT_MRT3847_122691C.1
aattcggggggagacataatgctttcttctgcatgcctgttttttaaactcagataatttatattctggcaagtagatacaattttgcatttattatgtacaactttattcaaagaattggatgtacagtaaaagaggaagttttgaaatttgacacaggacatggaaacttgtttgtctctttatgctttgatgaaaatgtcacagatatataattccatgttttttatatcctatgatggcaaataaattatttgtttgaatgaccctactctgtttttcaagtgttgcaagatactcgttctggtctcattgttcttgttttccacttatattctaggctgtttctgtttcttatgaattcgggcacatatttgtgctcttctgctggaaatgtatattaatttgtttaacatgttaa

SEQ ID NO: 25127 - DNA, 265 bp, Glycine max
  Clone ID: PAT_MRT3847_122692C.1
gtcagcgtacgacaagccaactgtatctgccatgatgctctcgacagctaacgataggaaacgcgggcttcatgcactgtcccttgttacacacgttaactaaaccgcgcgcgtgtgacactggcatgacaactttcacagtctagaaccccataagaacaacctcaggagaatcctgataaacaccaacatcacattggtaatctgtaactatactctatcagcgccagcaccactattaaacgtgatcatgaaccaaacttta

SEQ ID NO: 25128 - DNA, 280 bp, Glycine max
  unsure (1)..(280): unsure at all n locations
  Clone ID: PAT_MRT3847_122693C.1
ggttttagttttggntcctgnggngnnggaccggtgcttgcnatatccaaagggccaagggaaccttaatcaatcttccatacgcttagactcattttttaaaatcattttactatcctgaacctatattattcgtaccatcctaatattgcatatcccttttggtgctacgataactatactaatcatattgcattaaaataagctgataatattatacaacaactaattcatctcattttccggattaatcttaaaccattctttactaacttttata

SEQ ID NO: 25129 - DNA, 1481 bp, Glycine max
  unsure (1)..(1481): unsure at all n locations
  Clone ID: PAT_MRT3847_122694C.1
tggggattatttgtcatgtgttgtatgtgtagtgtgctatttttgaattgcacaacagcaatgggcgaggttgttagttcagctcccgggaaagtgttaatgaccggtggttacctgattttggagcgacccaatgcaggacttgtcctcagcacaaacgctcgtttttacgccatcgtcaaaccaattcatcacgaaatcaaacctgattcctgggcatgggcatggacagatgtcagattaacctctcctcaactctccagagaagccctctacaaactcgctctcaaaaatctcaccatccaaaccgtttccccaagtgatacgagaaatccttttgtggaatatgcggtgcagtattccgtggctgctgcttacgcaacgtttgaccataataaaaaggagctgttgcacaaactacttttacatggtcttgacattacaattttgggtggcaatgatttttattcgtataggaatgagattgagagacgtggactccctttgactccggaatcattggccacccttcctcccttttcctccattactttcaataccgatgatgccgatggagggaattgcaagcctgaagtggctaaaactggtttgggctcttctgcagcgatgacaatggctgtagttgctgctctacttcattacctggatgttgtaaagctttcctctgcgagaagacgaccggggaaaggaaggatgttgcagatcttgatatggtgcataaaatagcacaaactgcacactgtattgcacaggggaaagttggcagtgggtttgatgtcagttcagctgtgtatggcagtcagcgctatgtgcggttttcaccagaagtgatttcttccactaaggtaggagatatagcagtgcctttgccagatagtatcactgaaattataaaaggaaattgggaccatgacacagctgagttctctttaccacctttgatgactcttttactaggagaacctggaactggtggatcatccacaccatcgatggttggtgctgttaaaaaatggcaaaagtctgaccctcagaaatccctggacacatggacaagattgtcagaggcaaattcagcattggaaatgcaactaaacttgttaagcaaattagcaaaggaacaatggaatgcatataaatctgtgattgacagctgcagcatgctcagaccagacaagtggatagaacaagcttctgaacctaacaaggaagcagttattaaagcactgcttggagcaaaagaagccatgctggggattagatatcatatgcgcctaatgggcgaggctgcaggtgttccaattgaaccagaaccacaaacacaacttttagatgctacaatgaacntggaaagagtattgttggcctgagttccaggggcaggaggatttgatgcagtctttgctgttactttgggagattcgagcagcaatgtgaccaaagtattgagttcactcaat

SEQ ID NO: 25130 - DNA, 276 bp, Glycine max
  Clone ID: PAT_MRT3847_122695C.1
gccccacgcgttcggggcagtgtctcttcccgccacaaactcacgcatctaatctctggaaccagtgacgaggaacgaatcatccacgcttatccgtttgacactcctcatgtacatgatcaccatccgcaggcttcgcataggaaccataggctctatcctgtgcctgagcgatgacctagccaagatcaacaatgtcgtggaaggagtcacgcacaagatcaggcgccagatggaggagctggagagagacgccggccttgacaccggtgccct

SEQ ID NO: 25131 - DNA, 318 bp, Glycine max
  Clone ID: PAT_MRT3847_122696C.1
tttttgaggctgaagcggctgaactaaacattgacttgctctctgtggtggaggatcatcaccctgcttttgcatcatatatatgtattgagacatggcgcatgaaacctttatattcacatatgaatctgtaaacgagggtcaccccgacaagctgtgcgaccagatctctgatgcagtacttgaggcgtgccttgaacaggaccctgacagcaaggccgcctgtgagacatgcaccaagaccaacatggtcatggtcttcagtgagaacacaaccaaggccaacgtagactatgaaaagattgtccgcgacacatg

SEQ ID NO: 25132 - DNA, 142 bp, Glycine max
  Clone ID: PAT_MRT3847_122697C.1
tttttgacaacacaaaaaagtttcacatatacaacggggacacgaaatggacactataatatgtacgctacgaaaagagcaaatcaacctccaattaaatggatcacacatggggaagcgcgtagtgagcccctaactacat

SEQ ID NO: 25133 - DNA, 431 bp, Glycine max
  unsure (1)..(431): unsure at all n locations
  Clone ID: PAT_MRT3847_122698C.1
cccacgcgtncgaaagacccaagtgagataggacttaacttcactgtcaatgggactgagatcttaaccaaaatgttccccaatgaaaacagcgacgggagatgcttgaagctcctacctttccctccaagactcgaggatcatgttcgagcctcgttcgcgctcacaggagcagatttggagaagctaaggaaaagggtgttgtccaaatgggacatcgttgatagaggagcagaatcagagccacctaggttgtcatctttcgttctcacatgtgcttatgcgctagcttgcattgctaaggccattcatggagttgaaaaggagaaagagaaatttgcttttgcgttcacagtggattgcaaggcgaggttggagcctccaatccatgataattattttggcaaattgggtgtggggcatgttgtgga

SEQ ID NO: 25134 - DNA, 1750 bp, Glycine max
  Clone ID: PAT_MRT3847_122699C.1
ctaattctcaacaaaaagcgtacgatagaaccaacccaggttcgatgtctccatggtccataggctgatcacattcaccgccgaaaactacacaaccccgaaagctaaataaaaataaaatcaccttcgaataggaaaagcaaatctcaaattggtagcgcaagcttgtcacttgaggtttgcttcgattcttcgatctcagattaaagtgtacgaaagaagaggcttttctaaacaaaagaggaagcgtgcaatggtgggatgaagaagagaggaacatggcgagaggcaagtgggtttgttcctacaagaaaaccactcttttagtttgcttcttcaacattgctgttgctctctacgctcttcgctctctctattcttctctttacatctactccggaaacgtttcccgcaacgctgcgttgtatagcccagatcagattcggaaaatggaagtatcaatccaaatccgctgggaatttaaacctgtggagttaattaagtgggtgaaggctttagaagcggagttttcgagtgaaactgaggcagttaagttgccccggcatttgaaacagaacataattgatgagatcttgcagagactaaggagcttgaattccagtagaacagatattgctatggaacgagaagtagttgagagttggcgcaaagaaaaactggaagaggtcaagtcagctcttgtgaaggggacttccaattcaaccatcccccatgaagaagctggtatgctagtaagagctttggagtctgattgggctgtgctctgtgaagagattggcctctggatacctgctcaagtttctaataaagaacatgacgacaaacctgagggtgcagaggagtttgaggaggaggtccttcctggcagacccgtttcacccgagtgccatgctgaactgcacacagattatgatggcgccgcagtaagatggggtcttaccttccacaaagatagtgcagctgattgctgtcaggctagcttggaccatgcgaaacatgccaatgaaggtgatgcgaaacacaatataggggtggataaccaatgcaatatatgggtttattgcccagatgagtttgggcataaacatcaggaatgttggctgaaataagctgagaaacctcgactaaattttaaggataagtatcctgaatcatatcgaaattcacatccttctgcaccagtgatcgttccttgggtctctggagttatcagttcatgagtcaaataaccaaataccaaatgtgacgagatcaaccagagctaccttgtagacttcacacaaaggcaaagctagctcatcaaagcctttgcatgctcgaggattatataccattgttcttcaacatgttttttttgtaaaagaaatgaactggggagcaaagaattttcccaatggtcatttaggacttggttttggtcaaaatgaggtttttgacagactcacctcagacctccgtgccaaggattttccaccaaggtcgggtctaacaccgaggaaatgtgacttttaactgatgaagatgttgcaagctatctgataacataattcattgtatctgtgggacttagaatcctactcatagtatcattcttgttcgtgatgttgatgatgatcatcaatcttctctgtccgcttcccttccttttatacattataatcatacgtacatttatacgtgtataatataatgtttatctatgtctcaaaaagtagttatgttacccaaa

SEQ ID NO: 25135 - DNA, 241 bp, Glycine max
  Clone ID: PAT_MRT3847_12269C.1
cacacccaagaaaaaaggccacacaaaggggcgaacacagaacacgcccaaacgcgaaccgaagacagaaaagcagaccaagggacgcgcaaccagaaaagcaacaacaagagaaagccagaggggaaacgaagaggcgcaaggggagacccaccgaagggagaacgaacggagggaaaaaccaagaggagagcccgacggagagcaccaaggaaacaccggaggaaaaagcgcacgaaga

SEQ ID NO: 25136 - DNA, 2123 bp, Glycine max
  Clone ID: PAT_MRT3847_1226C.1
cttaaggtcaaccggacgttaaggctgtggcatttgtattgcccccacttcctgcgcgtgggcgcaaagaggtgtgggaaggcagaggctgagcggaaagctgctaaaaaggcctcgttgaagccttcaaaattgaagaaaggtgctccacctgaagaatcaaagaccactgctaaacgaccagatctaaaggccgtaagcaagatgatggaaaataatgagatattgtaccctgagaaaagaattggcaacattccaggtattgaggttggatatcagttctattctcgtgctgaaatggttgcagttggctttcatagccactggttaaatggcattgattatatgggccggagctatgccaaagcgttttgctatgaactcaaaattgctgaagcttctcatatttcgggcatgtatggagaggatctggataatgcatgacccaacgagtacactggtcacggtgggcatagtctgactggtgataagcgtcaatttcgggatcaaaagttggagcgtggtaacagatgtcttatgtgattgtgggagggatttgtgctgtggagagtcattcgtgatcaggactcttcaagcagttacactggtaaagtatacacatatgatggcttgtacaaggttgtcaattattgggcagggaagggaatatccggatttacagtctacaagtttagacttaggaggcttgaagggcaacctacattaactacaaatcaggtatattttacatatggacgtgtacctcaatctctaacagaaatacaagggttggtttgtgaagatatcactggaggtcaagaagatatgcccattccggctacaaatttggttgatgacccccctgttccacccacagatttcacatattgtaagtcactcaaggttgcaaaaaatgtgaagcttcccatgaatgccaccggatgcaaatgtgaaggcatttgtaatgacccaacaagctgtgcatgtgcattgcgtaatggctctgattttccctatgtatctcgggatggtggcaggttaattgaagctaaagatgtagtatttgaatgtggtcccaaatgtggttgtggtcctggttgtgtgaaccgaacgtctcaaagaggacttagatatcgtctggaggttttccgtactgccaaaaaaggatgggctgttagatcctgggattttataccttctggagcaccagtttgtgagtacaccggaatacttgctagggccgaggatatggatagcgttctagaaaacaattatatttttgagatagattgcttgcaaactataaaggggctcgggggaagagagcgacgatcacaggatggagagattcctgcaaatcttttggacaaatatcatgatcaatgttctgaaagtgtgccagagttttgtattgatgcaggatctactggaaatattgctaggtttataaaccattgttgtgagcctaatctgtttgttcaatgtgttttgagcacacacgatgatttgagattggctcgtataatgttgtttgctgcagacaacataccccctttgcaggaattaacatatgactatggttacgtgcttgatagcgtgttggactcggatgggaagattaagcaaatgccatgctactgtggagcctcagtctgcaggaagcgattattctaatactctggaagttgtatgtggtatttttgcaattgcaaaactagtgcggttaagtattggttgtttaaaacatgagctgcaaagtggtctctattcattcacggttaatttgcgcagtttatgtattgggctgaaatggcagcagaggaacattgtaactttttgtgcagatgcaaggaaatgatataggtttattttttggctagtatatatatatatatatatatatatatatatatatatatatgggtaggctcctgtttcgcttgtggtatttttttttctaaagatataaggagtcgttcaaagcatgtatatgtatagagatatggtaacaactattaattggctatggagtagacaccagaaatactgaatatttatttgtatagagaaaaaataactgcacgaagcaaggattcctgatcaaaatgagcaaaaaatagaac

SEQ ID NO: 25137 - DNA, 670 bp, Glycine max
  unsure (1)..(670): unsure at all n locations
  Clone ID: PAT_MRT3847_122700C.1
gatccttcctggcagacctgtttcacccgagtgccatgctgaactgcacacagattatgatggtgctgcagtaagatggggtcttaccttccacaaagatagtgcggctgattgctgtcaggcttgtttggatcatgcgaaacatgccaaagaaggggaaaagaaatgcaatatatgggtttattgcccatctgagtttgggtgtcattctccagatatctaccagcacaaacatcaggaatgttggctgaaatatgctgagaaacctcgattaaattttaaggataagtatcctgaatcatatcgaaattcacatccttctgcaccagtgatcgttccgtgggtctctggagttattagttcatgagtcaaataaccaaacaccaaatgtaacgagatcaaccagagctaccttgtagactacacaacggcacatagctagctcatcaaagcctttgcatgctcgaggattatataccattgttcttcaacatgttttttttgtaagagaaatgaactggggagcagagaattttcccaatggtcatttaggacttggttttggtcaaaatgaggtttttgacagactcacctcaacctccgtgccaaggattttccaccaaggtcgggtctaacaccgaggaaatgtgactnttaactgatgaagatg

SEQ ID NO: 25138 - DNA, 496 bp, Glycine max
  Clone ID: PAT_MRT3847_122701C.1
aaggtacgatagaaccaacctggttcgatgtctccaccttaggctgaaaactacacagccctcaaaagctgatgaataaaatcgtggtggaataacaaaagcaaatcacatattgtgacttgaggtttgcttcgattcttggatctcagattaaagtactaaagaagaggcttttctaaacaaaagaagaagcgtgcaatggtgggatgaagaagagagcgagagagggaacatggcgagagggaagtgggtttgttcctacaagaaaaccactctcttagtttgcttcttcaacattgccgttgctctctacgctcttcactctctctattcttctctttatatctactccggtaacgtttcccgcaacgttgcgttgtatagcccatatcagattcggaaaatggaactgtcaatccaaatccgtggggaatttaaacctgtggagttaattaagtgggtgaaggctttagaaggggaattttctggtgaaact

SEQ ID NO: 25139 - DNA, 264 bp, Glycine max
  Clone ID: PAT_MRT3847_122702C.1
gacagatcggacggatggcactgacggtttagggcaatctgattccgagaaagttaagactacccctgctggtaaatatctcactgctgccctgaatgactttaatcctgaacaatatgagggactggctgccatttctgatggtgcgaacaaactgatgatgctgattctggatgatgacatcaaagctgtgtgcctccagagaacatgagagccttgctggaactagacatgctgaactcttatttattcgtaatatggcac

SEQ ID NO: 25140 - DNA, 907 bp, Glycine max
  Clone ID: PAT_MRT3847_122703C.1
aagagctcaagtgaaatcattggaagaacttgtcagcaaacttcaggctgatttggttggtggtgctaacaaaaatatgttaggtctagtcattgaagcagaacctgaacttgcaccgaaaaacgtggaaaatgaggagataaaccagctcaaagctgagcttgtttctgcgaaatctgaagcaacgcagttaaaatctgcactggatgtttctgaggtacgataccaagaagagtatattcggagcacattgcagatcagaagtgcttttgaacaactggagcatgcaaaatcagaatcttctcaaagacaaggtgaaaatgaggaattgaagagagctagagctgatattgaagagttgagggagaagctgatggacaaagaatctcagttgcagggattatcagatgagaatgagatcctcatgtcaaggatcaagcaaaaccagcctagtgaaaaagattctgaacctgtggtggagctcaaaaaattagatgctgatatgactgagttgaagaaaagattattggacagagagacagaactgcaaaatgtgactgaggaaaacaatgcactgaagaaggaaataaagagggaggagttagagaagaataaaatccctgatgaggctgttgcttctgctgaagcagcaagggccacagagcgcgaggctttggtgaaacttggctacataacagaagaagctgataaaagtaatcgaagagtagcacagataactgagcagttagacgctgcgcaggctgccaattccgagttagaagctgaattaaggaaggtgaaagtgcagtcagaccagtggagaaaagcggccgaagcagctgctgctatgatttctgctgggaaccatggaaagtttggtggaagaaccaggtcacttgacagtagc

SEQ ID NO: 25141 - DNA, 239 bp, Glycine max
  Clone ID: PAT_MRT3847_122704C.1
ggaacctttgaattcaatccattaaggattcagcaggtgctttttgaaaccagaaaccgaaatatttcgaaatggcccgtacaaagcaaactgctcgtaggtcaggtggaggaaaagctcacaggaagcatcttgcaaccaaggctgcacgtaagtctgcaccaacatctggtggtgtgaaaaagcctcatcgttaccgccctgaaagtgttgctcttcgtgatattaggaaataccag

SEQ ID NO: 25142 - DNA, 513 bp, Glycine max
  Clone ID: PAT_MRT3847_122705C.1
ttggggggggggggggggggggggggggggggggggggggggctaagaagtaaatgcggtaaacacctgagagtggaggtgcgaaataaaattctgggctaatgcgtgacagatggatgattaatagtacccggtaataaaaggaggtttaagaactaattagcaggtgaaatacgtataacccaaacggtaaacaacttgtcctgataggaagtagtataatggaggcggccgttaaaagatattgggctgtgtccgatgggcagtgcctgttatagaaagatatgtggggcttgggtgttataggcttggcataaagccacgtgtagtaaattcagaagatgtgtttaaaagcccggggaggcttgggcgacttgttaggctagcagaagcgcctaggcgccacaataacgcagcgctgatagcaagcgtgccaagaggagccaaaattggcggtaccaggttagaagtgtgagttatgcggctgaaacagttgtggaattaggtttatgt

SEQ ID NO: 25143 - DNA, 382 bp, Glycine max
  Clone ID: PAT_MRT3847_122706C.1
ctcggggtagaaacgaacctgcaacgaccagaatttttgaaacacgccttaaaaccaaacttaaggttacgggaacgggcaattttaattaagcaaaaaaaaataccaaagttggaaaaaaaaccaacctgccatccccatataaaatcacaatagtttggcccggttacaactccaaacgccaattttttaatgaattcgggctgggaagggacaatttgaactctggggggaggtcctcttaaaagtaaaggcggaaaaaaaaaaaaaaccttttaaggcaacagtttgcggggacctgaacctggaggggctccacataattacacccataagctctcttggggaaataagccagggtaaacgggttttgattccaccc

SEQ ID NO: 25144 - DNA, 789 bp, Glycine max
  Clone ID: PAT_MRT3847_122707C.1
ctcgagccgaaaaaaagaaacattccccatttcctttcctttctcttcacacctttgaattagggttcttctcccactcttttcgccaccattgttgaaacctcacaacattctccatagtttcacccttcttcggatcagctcaaatgggtaagcatcttctcttgctggttctcactctccaccttctccttctattcgccactctccatgtctcagctgccccttccactacttcccctgcaaagattgtaaatgggtttctctccaatgctgtgcctgctttcaccaagtgggtgtggtcgctcaaggccaccaccaagactgcggtttcgagcaggtcgatgatgaagttcgagagtgggtacaatgtggagactgtgtttgatggaagcaagcttgggatcgagccttatgctgtggaggtgttgcccaatggggagcttctcattcttgattcggctaatagtaacatttataggatttcatcctctctttctttgtacagcagacccaagctggtggcagggtcggctgaaggttattctggacatgttgatgggaagcttagggaggctaggatgaaccatccaaaggggataactgttgatgaccgaggaaatatttatgttgcagatactacaaatatggcaattaggaaaattagtgattcaggggtcaccacaattgctggaggaaaatggaaccgtggaggggggcatgttgatggaccaagtgaagaagctaaattttctgatgaccttgatgtggtttatgttggtagtagct

SEQ ID NO: 25145 - DNA, 238 bp, Glycine max
  Clone ID: PAT_MRT3847_122708C.1
ttttcaattggagcataaaaaaaatcacagcctcacattattgcaagctccttataggaaacaatgcttttgagaaattcttctacaactaaattataaacataacgcatttattttaaatcattggcgtttctgaaattccgaataaataaataaaacctacctacacatctggattatgataatgattccttaggggctttattgctatgaatatatctccagctggactggtagc

SEQ ID NO: 25146 - DNA, 309 bp, Glycine max
  Clone ID: PAT_MRT3847_122709C.1
gagagtcagaactcatcagagagagagagatcgatgacgagaattctggtgagacatggcagtctctacatgtcgcaaccttcttcatcactccgccctcgcacttgccgcttcatcgagtcgctcaattcatactcttttcctccaatgagatgtccctcaccggttccccatatccaggacgtgaatgacacacatctgaaggcgcagatcgagacctacttcaatggcgactagacggtgctctcgtcgatgatggaggcgattctgaggcggaacctgtcggggaatcactaggataccgactac

SEQ ID NO: 25147 - DNA, 359 bp, Glycine max
  Clone ID: PAT_MRT3847_12270C.1
aacctcaaattctatatgcagcaatttttttttgacagaatggaggcagaaaaagagtcacattttcagacatacaacagttgaaccaacagttcttcactggtatagatgataaatactttgggcagaaggaaaatggtaacaggtggatacacggatgtatgtaaagaaaataagggcatcagaaatcgtaaatacacgagtaaatatcacagtaaatatcacatacgttcattcttattttaaaaattttcttaaacataattgactttttaaagttaaaaaaattacaattatgtgcatatgtagaagtaaaatgtgtgacaaatcacaaaggtcatacgtgatgaaacaataat

SEQ ID NO: 25148 - DNA, 274 bp, Glycine max
  unsure (1)..(274): unsure at all n locations
  Clone ID: PAT_MRT3847_122710C.1
tcacatatatctanacatcaacctcttttttctctctcaccacaaacaccctnagaggctagcacaaataataaagacgtcctccccatccttctttttaatatcacttaattccaacactttcacctcatactcaatcatcctcattttcaacacaaataacaaccctctctatactttttataaaatacttatattaaccatcattcataaacaccttcatcatcacacaccctactctacttaaatcttaaccaataccaacaccttattc

SEQ ID NO: 25149 - DNA, 329 bp, Glycine max
  Clone ID: PAT_MRT3847_122711C.1
ttttttttttttttttttttctttttttttttgtttgttttttttttttttttttgtggtttctttgttttggggcagcccacagcgggacccatttaattttccctggaaaaaaaggggccccatcccctggggggatcccttaggctgtggagcccccttgtgctgggcatgcggggcccacactggaaaagcccatctcggccacagcgggggaccccaatgcccattatctggacccccccccccaacaggacccgcaacagcaggggtgcccgtttgtgctccagcacccggaagagggcctcctggaagacgaccccagctgg

SEQ ID NO: 25150 - DNA, 471 bp, Glycine max
  Clone ID: PAT_MRT3847_122712C.1
gatattgtcttttctacaaatgccaaattttctgagttctggacgacataacccattcgagattcagcattgtaaatgtgttgattgaccctgctctcctcactgccataacattaaatgaagtttagtcatgccgaaacagaaatgcggacgaatcccaagtcttaaaatagctactaataagtaataaccaatgtgtatccagtaatatcaatagtgtgcatgtgaagaaaacaagttgacaagttgcttacatcagctgtgttcgtcatgtttattctttgtccaagtaatcagcttaacaagtatggtaatcctgcgtttgaccactacgaagcaagctacaatagtagaagactagagcatgaacaatgacatatagattgacatctcaagtgttgtaattaattacctcacttattttgtcttaaaaaattccgtgattagtttcatgttggaaaccaaaattta

SEQ ID NO: 25151 - DNA, 260 bp, Glycine max
  Clone ID: PAT_MRT3847_122713C.1
caaaagggatcattcctgtctccatccaactcatcttcatctaccttccacactcatcaattggctgatgcagataaagtctcatcttgtgtaagtatgctaaagggtacattacaacgcaagacgctcggcaaccaagttgagattgagagagaagctgcatcagatagcttaaatgcgatttttggtcctcaagaacctattttccaaaatggttttcatgaaggcctagaaaattggagtcatcaaaagccaataaa

SEQ ID NO: 25152 - DNA, 238 bp, Glycine max
  Clone ID: PAT_MRT3847_122714C.1
tcgcaatcaacgcgcatttcagacgcgtctacatccgtcacgagcaccttgatagcacggagtttccccctttcaccatcctcacagtgcgctcgcgttctgacactgacgtttaccggacattcgcccgacattatctcttcgggaagcgtcacgatttctatggctgacgaagcattagatccaagatcggtgcatgtcgatcacttgaagtttggccgtgtccatctgccgttcg

SEQ ID NO: 25153 - DNA, 377 bp, Glycine max
  Clone ID: PAT_MRT3847_122715C.1
ctttacacgagtgatcgtctgatcataatgccgacaactctctgctcttgagctattactacttatgctgcatgctttaactatcgacgatcgttactctgactgtgaaagcaaccgctgattcgtgcgggagagcgtgtactacgcattgggtcagttctgctacaaaatggatcctctccaacagaacacttcataggatgtcaggtggtcaatattttttgataaaccattgcacttggatcttgccttaccttgcagctggtctacattaccttccttactacatttacttaaatgaatacatgcttgtgcgacattgtacatgcgaatgccttaatgactttaccatagacaatgtgtactatacaattgct

SEQ ID NO: 25154 - DNA, 521 bp, Glycine max
  Clone ID: PAT_MRT3847_122716C.1
ttctccactagtttccattacactccatacgcattttactaatccaaacaatgaaacataatgccattccattccatcatctaccaccaatccaaatataaccaaaagtatgaaatccacttaaagagcgaagttataaccacattaaaaatcgtaatagaataatatgcacacacacacataacaaatcatggaactattaaaatctcaaccatgaactttaaaactaacaaccataattccatattttatcctctaaaagtctaaagcacactcttaaaatcagatgaaccaaaccatccaagcaatgtcgcaaaaacctctaaaattaaacaagtcttccccggatctaaaattcacaatcacgagaaaatattcgtagaaaccctaaggagaggcttacgatgttaattggagggagaggcttgctcgataagcttcttgtcccttcgctccatcgccacatcccacatatcgtttccgatgtgcttaggctgaaacaattctcgtatcactcacac

SEQ ID NO: 25155 - DNA, 176 bp, Glycine max
  Clone ID: PAT_MRT3847_122717C.1
attcaatgggacaagggttcttaattttttagtagatagccttttcatttcatttgaataagttatatatataattgttgtggtttttaaccgaaattttaattcacggaataacatcccaccttaaaataaatatgacatctataaaatatccaaattccctttttaaactgatc

SEQ ID NO: 25156 - DNA, 196 bp, Glycine max
  Clone ID: PAT_MRT3847_122718C.1
tttcgtccacacgtacgaccacttaagagcaactcttcataaaggaccagctgcgagaagactacatgatcataactaatgggacacccactctgtctgacgaaacccttactggagcgaaaaaaacaagagcgagctactagtacctcactaatgaagaagattcaaacattggccgatcaacttaacggtgaac

SEQ ID NO: 25157 - DNA, 502 bp, Glycine max
  Clone ID: PAT_MRT3847_122719C.1
ggctcgagtctttttaagagttataccaatgttcttttgtcttaacaatttgtcttaataataattattattattagttctattattagtattatttcaaaatataataacatgtggctaggaatacaaatctgagattgatggcaagaaatgtatatgaaatttttaatttttttaaaaaaaaaaacacattctaaaccgtcttagaatgtatataaaaaaatcatcttagaatcctcaaatatatttattttttttaaaaaaaatacattctaagacggttctctgaaaaagagaactgtcatagctaaaaatcatcttagaagggtatctttttctaagatggtttttatggaaccttcatggaaagtaaagactttctacaatgtcttacgacgacagttaataattgtcatagaaattgtcttttaaccgacgtagaataactattttctaaagtacttttctaaaggtagacaatatggtttccctaaagtatatg

SEQ ID NO: 25158 - DNA, 517 bp, Glycine max
  Clone ID: PAT_MRT3847_12271C.1
aaaaaacaggatacaacaggggggacaattttacaaaaagtttgtttttttggttacataaaaaatcaaattttccccaaatggcaaaaaagggaggggggttgatcaacctacataaaaggggccataaactacaaacctgcgaggggggggggttgccccaactacaaaaaaggggacattttaaactaccacaatttcaacagactaaaaaaccccctgttttaatgacccaacaaattctcttccaaagcttgacaaacttgtcatgactgggtgaagcccccaaaccttttacagtaaaaacccccaatgccccaataaaacctttatgaacaaaaaggggcatcgtttttttttcaatcatgttccaaagctccaatggctgggaacacccccccccccaccgcgaaaaattttttgggtggaaaacacatgagggaaacttgttgccattacagctaaactcgggaacaccctcccctttactccctgatccaaaagtccaaactttgac

SEQ ID NO: 25159 - DNA, 287 bp, Glycine max
  Clone ID: PAT_MRT3847_122720C.1
agggggcctttaaaaaggccccctttattaatcaaaaatccgggaccacatttattgggaaacccaaaattttaaacccccttttggggcaaaggccccttttattcccccccccgcccaaaccaactaacccccccatacaaaataatttccaaaaaacattccgggacctttaagaggggaaaaacttaaaaaatggcccaggaaaggatttctggaaaaaggaaaaaaaaaaaagccccctttttttataccaccttttaaagggaggctttggagggcggggg

SEQ ID NO: 25160 - DNA, 478 bp, Glycine max
  Clone ID: PAT_MRT3847_122721C.1
caagtttgagcgttaatacacttagaagtgaaatggcttctcgacccttggtctctatttataatgagaaaaatgagccaaccggcaagcaaatcaagcttccggccgttttccgggctccaattcggcctgacattgtgagcttcatccatgaccaaattcgcaaaaacaagcgacaagcgtatgctgtgtcaaccgctgccggtcatcaaacttccgccgaatcgtggggcactggtcgcgcagtggcgcgtattccgcgcgtccgtggcggtggcacccaccgctctggccaaggagcgttcggcaacatgtgtcgtggtggccgtatgttcgcaccgaccaaagtgtaccgtcgttggcaccgccgggttaatgtggcgcaacgtcgttacgccattgtgtccgcaattgccgcttcggcggttcccgcactggtccaagcgcgtggccatgtgattgaccagctcaacgaaat

SEQ ID NO: 25161 - DNA, 1491 bp, Glycine max
  Clone ID: PAT_MRT3847_122722C.1
catcaaatcacctatcctcttttgccgggctcaagctcccttctgattccacaaccgaccttcaaattccggccaccggagttctctctcggttttccgaccggccagccaatctgcaattccgattttgcttagatctctcacgaatcccctttctgcaccttcctagggtttactagacaccatgactctttcggacgacgaggacgagaatctggctcaatttctggaatcagaagtcctctcggaggtatctgacaaggaagaggaaaatgtggaggaaccgaaagcaaagagagcgcgcttagaagaggatgagattactaagcaaaaacaaagttctgattcattatctgcgccgaagaacattgttgtcaacaacggggtggtgcccagaaggattgagactggttatttcagtcaaattccaccggagcttttccatcacatccttaaatttctgtcctccgaggaccttgtttcttgttccttagtttgtaggttcttgaattatgctgcatcagatgaggcattatggcgtcgcttgtactgtatgcgatggggcatgcttccccctacaaggaagttaagggaatgcccgtggaaaatgttatacattcagcgtgatggagaggacatggttgaacttgttagaagctgccaaaatgagtttaaggagtactacattcaaatgcaagcagctaagcgaagtcaagcacctcatccttcacagttgaaggacgataggataattcttgacaaaacattagctgatcaagtgtcatcatggaaaagcagcaggggcctcagtgatacagtggtgactgatcatgcttgttctggggaaacgtgctcttactaccatattggagatgtatttatttgtgagaagactggacaagttcatgtttgtgacgatacatgtagagaagtagttatggatcccacaaacgagcttttggtctgtacaatatcggggcactgttttgatagattattgtcaccttcggaaatggagcctgatactgagcagcagcaaggtggtgtgactgatgaggccgagccatttatgggatctggccgttttgcacgagcttattcactgggatacaattgtgctgatgaaaaggagcttgaagctacattgaggttttgctgatccccactttgagctttcagtagtgtggatgatcctatgtctcatcatttacctatctagtatttaacattaaatattttacaatttctcatggctgaagaatatttgcttagtctcagattgtaaaactctgcttttgtgttgtcttttatattaatagtgtatcatgtatgctttaatgtatagttgaatttcagtaggcaatagttaattttctcgatactgctattgttgattctttatgttacaaaagtgatcattcctttgacatttttagattggtatgcaccaaaatgattttgtcaatagtcgtattacttgcttcccactca

SEQ ID NO: 25162 - DNA, 383 bp, Glycine max
  Clone ID: PAT_MRT3847_122723C.1
atgcacattaggaactctcttcattgacattgttctgatttccatgtgtctaagaggcctggttctccccctcttcttttcctgaatccccaaaagtgtcacgcattcatcttacaatactcacaataaaactttgatgactgtttttcagttattgttagcagttgctattatttctattaatagctactaaggttttactccctttctcccattcctgttcttccttgcatagaccctattggtggtttactatcaatacagttttgctaaaaccacataaattaagaaaagagtgaattatattcagtagcagtttcattcccatgtcatttagatatgcagaaacaatacatatctgtcatgaatgtgcacactttggc

SEQ ID NO: 25163 - DNA, 1938 bp, Glycine max
  Clone ID: PAT_MRT3847_122724C.1
atgaagaagcgcactgagtggtccaccgacggacctataattttacatgctaaaggaggcaagtgcatattacaaagttctagatccgtgagttcgactgggggtatgccaggtgcagtcgacactatggttggtgcacccaacaagttagtgaaagcaaccttccttaccagtcttcatcttctcgaggcttttccgctgtcatcgtctccgctagtcttctttattacatttgcattcgagatgaattttagggttttggaaactgtattaaattgcggtatgtttggtacggtgagtcttccagaatacctattaggggttcttgcgtaatttacggtagatgatattacaggagatctccgtatgaagggtgttccaggtgcaatttccataagaacccaacttccggaagatgctacagatgtccccgagaggcgtaggcctactgcctcagcccgtaggcaacgggttcatcagatgattgcggatgcacgtgacatgactgacgatgtccctgatgtggctgcggaggcacctgagatgcgtgcggacgtagagtgtgctgatcgtgctgaggggtcagatgctgatgatgctgctgagggattccctggtgggccacgtgacccgtcagtgctgacatcatttgcggaccacgttgcacatgctgtttggagtggacaggaacgtcctgatttgaagttagtgtcacatgggaggaaggtgacactgattgggaggccagtgcttgagattgaaggcctggtgggtgccacaggattaagtccactgatcgattgttcagttactattggcgatcctggactgatatccgcattcgtggagaggtggcacggtgagactagcaccttccaccttccggtaggagagctgacgatcacattggatgatgtgtcgtcacttcttcatttgcccatctctggcgccttgcacagtttccatgctctttctatggaggaggccagatttttgctgatagagttgttggaggtgtctgccgaggaggccagagcggagacatcactcacacgtggggcatatgtacgactaaaatgggttcgagacatttatgagacaagatgtcaggcccggcaatggattgtcgcagctcgcgcttatctgctgcacctagtcggttgcactctttttgctaataagagtgcaacatacgtgcatgtggttcaccttgacgcttttcgggacctcgctcagagtggtggttatgcttggggagttgccgcactggttcatatgtatgaccagttagatgaggcttgtaggacccccacccgacagcttgcggggtacttgacgctacttcagtgctggatctatgagcacttccctagtgtgcaccagtgcgtgactgacgatacataccaggagacgtccccacgtgcttctcggtggttgacgtcgaaggcgcacatgaagggaatcacaggagcaccctacagggcacgttgtgatgctcagatggggtcctatggtcgtcacagtttgaccggagagggtggtacgccagttcggttacatctagagcatccctccgccgccttgcctgggcaggtatctgcggattacatggagtggtttttccgcatatctcatccattcatgacaccgacccaagcagctgaccagcagagggatgcaccagctgcagaccctgaggactacatacagacgcccagcccccaggttccagtggcatttgacccccctccatatgtggatgattacaagggatatgaggcgattgcacagaggttggagcgtgtgctcaaccttaggatagtcactgcaggcacagaattatatgacattatgcaggactacccgacgatcgcgagagggggacccagtgctgatgtgactgtcagggctcgtcagagacaccgcacggacttttga

SEQ ID NO: 25164 - DNA, 418 bp, Glycine max
  Clone ID: PAT_MRT3847_122725C.1
ccggggggaaaaactgttttttttggacaaaacatgcttacaaaaatatgaacaataaaggccgctggatcttgaaattaccaagcttcagccttaaaccaaaaatcctttcctgactgaaaaatacaagtttttacaccctaataccaaagggatggggaaattctatgacctctaccccgctttaaaaacaaaggcctaaatgtttttccaactaaaaaaaatcataacttttctttttgagggggacaaaatttttttttttgctgctttcatgaccccaatgtccaatagtaactgacccttcatgttcttcacaaccttacctgaattgggtttcctcggttcctaaccatgaacctttttaggacatggcatacctttctccatctcctttgggcaccaccattggttgggg

SEQ ID NO: 25165 - DNA, 274 bp, Glycine max
  Clone ID: PAT_MRT3847_122726C.1
gattcaacccatcgagaaccaactcctgaaggttaggacaacattcaatattggctatcgaaactttatcacccataaggttggcctcccaacaatagcttctacggatacgaagttctcttaaaaggttgcaaccctccaaaactgcaacaagtccttcgtcactgcacatgccattcatctcaagatgcaaaacttctaagctggaacgttttgaaatcgcttttgagatagaaaaatcgacgccctccaaataaagggctttgagcgatga

SEQ ID NO: 25166 - DNA, 489 bp, Glycine max
  unsure (1)..(489): unsure at all n locations
  Clone ID: PAT_MRT3847_122727C.1
aaacccccaaaaattttttttttaacggaaaaaaaacaaaaaaaacgggggataaacccccaacagggagggggggtttatattaaaaaaactttttacgggaaaccctttttaaaaaccccggggtctaaaaccccccagtggataaaaaaaaaaaaaacgggggaaataaccccaaaagggggggccgttttgggcaaatggtttttggcaaaaacggttaaaattaaggggaatcccttcagctaaaaatcttccccacggggccaaacttggggggggcggccggtttcccctggggatntttccaagggcccggggatttttttttttggcggggaaaaaaaatcccccactttggggcccccgttttcccaccgggaattgcaaaggggtcaaaacccaaccccccaaaaaaaaaacatcgggggggggggggggtaacaacaacaaaaaaaacttttttcaaccccgggggatccccaaaaa

SEQ ID NO: 25167 - DNA, 263 bp, Glycine max
  Clone ID: PAT_MRT3847_122728C.1
cccgctcgagctcgagccgtttcagacagggtctgaaggactggattggccaaacatcagacctgtcttccaccggagaccaagtcctggctacatcccagcctgtggttacagtgcagacaggccatgtgagccaccgctgccagcacagagcgtccttccccctgtagactagtgccgtagggagtacctgttgccccagctgactgtggccccctccgtgatccatccatctccagggagcaagacagagacccaggaat

SEQ ID NO: 25168 - DNA, 279 bp, Glycine max
  Clone ID: PAT_MRT3847_122729C.1
agcagggactggctattcagcactatcagcctcatcaataatatgtgatattcgcatatcatgcacaacttacgattgagccactattattccaaggacacgctacaggtgcgacttcacgtgcatgttcaactactactgaatggcctatgctacagacacttatctgcatggaatacctaccacattgcatgcgatacgcacttgggaggagaattgacttctaatgcatgtcgtatatgctgattcacaaggactaatgaacgaacttcctcaaaa

SEQ ID NO: 25169 - DNA, 988 bp, Glycine max
  unsure (1)..(988): unsure at all n locations
  Clone ID: PAT_MRT3847_12272C.1
gctgatagtctaaacagtgcctttcatttaagctacaacatgattttgaaccaaatgcggtgtgaagatggtgatcctgaaaatttgctacgtaattccttttttcagttccaacagatcgtgccattcctgatcttgagaaacaaataaagagtcttgcgtccgcgagggcgtcggttgttattgaagaagaaagcagtctgaaggattatttcaatctgcttgagcagcatagagctttgaataaggagattcgtgacattgtgctgtctccaaggcattgtttaccttttttacagcctggtaggcttgtctctctcgaatgcacatcaagtgatgaagatctacccctcatttttattgaggatcagttgacttgggggttggtcattaattttgaaagggtcaagagtgtatctgaagatgatgcaagcataaaacctgaagatgcatcttacattgttgatgttcttacgagatgtgttgtgaggaaagataaaattggaaaaaaatctatcaagattgttcctctgaaagaagttggagaacctctagtggtttcggttcctatctctcagatcaatacaataagtagtttgcgtctatatataccgaaggatcttttgccattggaagctcgagaaaacacactgaanaaagtgttggaaactcttactagatnttgtgagaaaggaaggccacttctagatcctgaagaagacatgaagattcaaagcagttcatataaaaaagcatctcgtagaatagaggctttggagagcctatttgaaaagcatgaaattgcaaagtcaccacttataaaacagaaattgaaatattatctcagtttttgggactgactgcaacatgttataattatatatatctattgaaagattttctgttgtttagctttcttagttttcctgcttancttgttatagaagacagcactatagcttgtcttgtcaaaaaaaaaaaaaaaaaa

SEQ ID NO: 25170 - DNA, 362 bp, Glycine max
  Clone ID: PAT_MRT3847_122730C.1
gcaaacttgagtttgttgatcgacataactataatcagtgtgatgaaaatgaaggtccatgttttcttcgttgctacacttttggtaccatggaattgccatgcgtacgatatgttccctctcctaatgaacactggctatggtgcccgtactccggatgtaaaatgcgcaagttgaatgcttgctgtggaagcacacaacatctttggctttgagatcattcctcaagagtgcgttgaatcagcaaatgaatgcatccatggcgaacattagagatcagactccaaatcagttaaacatcagacttacatttatgccagatacctcgatttccatcccaatgacacatttgtgttcagtat

SEQ ID NO: 25171 - DNA, 184 bp, Glycine max
  Clone ID: PAT_MRT3847_122731C.1
tcttttttttttttttttttagatcacatcaaccaaagatatggttttttccgatcctttaagttgtccatagtggtacaccggtaacgagtcacacatcacaaacccataaatgtagggagccgggcgcagctcatggatcacaactatctgtttcccacatgcgtgctacactacgctgctg

SEQ ID NO: 25172 - DNA, 304 bp, Glycine max
  Clone ID: PAT_MRT3847_122732C.1
tttctatatagttcatactttgtcggtttctagatagagaaagctatgggcggagttaatccaaacggaccctcaccgtttgaccatgacccctcgcagggggaggcagtgactccatacaccacattaaggacacctatcagagagcaacgacggaataccgccctaccaatcatgcctatattacgccggacggacggtagcggacggtcactcccgtagaccctaccgcacgaactgggggaggactataaaactgcgactgcttttgccagtcgcatggccgctatgcgttcacacactg

SEQ ID NO: 25173 - DNA, 517 bp, Glycine max
  Clone ID: PAT_MRT3847_122733C.1
acggctgcgagaagacgacagaggggatgatcaaaagttcttatgattcttgtattttgtttgttggatttcgttggaagctttcaaggatggtgtacagagtcttcacaagatgtgatatgaactttgtcactgagatctaatttttaaagcccatactaggcaaaatcagttgcagttacaattgatcggtataacttgatgggatgagttggatcctacgtatatccacattccacaacgacaactacaatgacaatcacagttcagtgaagacttaaattctgataaggcacgcaacgttaagagaggtaatcttacctcattttatttggtgcaaaccacgttggctgcaaaatgcatgtgattgtgaactttatcattttctttgtgcacatataatatatatttttccaggctctctttttgtcaggttcccaaagtcaagatatacaatttctgatctctgcatcccaatcatatacattaatatggcttcaaacaaagcacaattggt

SEQ ID NO: 25174 - DNA, 1593 bp, Glycine max
  Clone ID: PAT_MRT3847_122734C.1
gctctcacgatctcaacggagccctctcttcaggtcaccatctagactgcaatcatggctgatggaccacagcatccatcagttgttcagaagctagctggacagtcttacctggtgtccaggcttagccccaactttaactctaggaattattctgcaactggttcttacgtcaatggcggaatgcactcgcctgggttggctgttgtgtcacctgtatctccagttactgtgcatgctccagcagagaaaggagtgagtggatttctagtggattttctgatgggtggagtatccgctgctgtatcgaagacagctgctgctccaattgaacgagtcaaattgcttatccaaaatcaggatgaaatgataaaaagtggtcggctatctgagccatacaagggaattggtgattgttttgctcgaacaatgaaggatgagggtgtgattgctctttggagaggaaatactgctaatgttatcagatatttccctactcaggctctgaactttgcctttaaggattactttaagaggcttttcaactttaaaaaggataaagatggctactggaagtggtttgctgggaatttggcatctggtggggctgctggggcttcttccctcttatttgtctattctttggattatgcccgtactcgtttagcaaacgatgcaaaggctgcaaagaagggtggcgagaggcagtttaatggcttggttgatgtttacaggaaaaccatcaagtctgatggtgttgctggcctttatcgtgggttcaacatctcatgtgttggaattatagtgtatcgtggtctttactttggaatgtatgattccctgaaaccagtagttttggttggtgggttgcaggatagtttctttgctagtttccttttgggatggggaatcacaattggtgctggtttggcttcttatcccattgacactgttcgaagaagaatgatgatgacttctggagaagctgtgaagtacaagagctctttgcatgcattccaaacaatcgtcgcaaatgagggtgccaagtcactcttcaaaggtgctggtgcgaacatattgcgtgctgttgcaggtgctggtgtgcttgctggttatgacaagctgcagctcattttgtttggaaagaaatatggatctggcggcggctaaaaatgatgacgacaatttcctgggataatcatgccgattgccttgtcatttgaataattatggatgagaaatattggtattgatattttcccaaatttaggaccttgatacttagaacccatagtcttgcgatcaagaattttcatttttgttgtttcatgccatcagcttataatcctggagtttgagccccccccttttggttgaaataattaagactcgtttggattgctcatgcgtggttgaaatttgattgtctagtgaaagttttgttatatttaagctattttaatggttatgcaaatcttgattatatgtcggttaaatattgattcggtgcaggattttaattgttgctctcatcttaagcttttggttgtaatgttatgttctaatgagttatcctgttccacagactgccat

SEQ ID NO: 25175 - DNA, 1731 bp, Glycine max
  Clone ID: PAT_MRT3847_122735C.1
ggctcgagggaaaatagcaaggggcaaattcgtcattagatataaaaccctaatgcccctcgttcggtgcttccatttatagtctcagtcttcttctcttcttctcttcttctcttcttctcttctcttgtctcacgatctcaacggagcacctctcttcaggtcgccatctagactgcaatcatggctgatggaccacagcatccatcagttgttcagaagctagctggacagtcttacctggtgtccaggctaagccccaactttaactctgggaattattcctcgactggttcttacttcaatggaggactgcactcttctgggttggctgttgtgtcgcctggatctccagttactgtgcatgctccagcagagaaaggagtgagtggatttctagtggattttctgatgggtggagtgtctgctgctgtgtcaaagacagctgctgctccaattgaacgagtcaaattgcttatccaaaatcaggatgaaatgatcaaaagtggtcggttatctgagccatacaagggaattggtgattgttttgctcgaaccatgaaggatgagggtgtgattgctctttggaggggcaatactgctaatgttatcagatatttccctactcaggctctgaactttgcctttaaggattacttcaagagacttttcaactttaaaaaggacaaagatggctactggaagtggtttgctgggaatttggcatctggtggggctgctggggcttcttccctcttatttgtctattctttggattatgcccggactcgtttagcaaacgatgcaaaggctgcaaagaagggtggtgagaggcagtttaatggcttggttgatgtttacaggaaaaccatcaagtctgatggtgttgctggcctttatcgtgggttcaacatatcatgtgttggaattatagtgtatcgcggtctttactttggaatgtatgattccctgaagccagtagttttggttggtgggttgcaggatagtttctttgctagtttccttttgggatggggaatcacaattggtgctggtttggcttcttaccccattgacactgttcgtagaaggatgatgatgacttctggagaggctgtgaagtacaagagctctttgcatgcattccaaacaatcgtcgcaaatgagggtgccaagtcactcttcaaaggtgctggtgcaaacatattgcgtgctgttgcaggtgctggtgtgcttgctggttatgacaagctgcagcttgtcttgttcggaaagaaatacggatctggtggaggtggctaagatgatgacgacaatttcctgggataatcatgccgattcccttgtcatttgaataattttggatgagaaatattggtattgatattttcccaaatttaggaccttgatacgtagaaatcatagttttggaaacaagaattttcattttggttgtttcatttcatgccatcagcttataatcctgaagtttgagaaccccccccggttgaaataattaagactcggtttgattgctcatgtgtggttgaaatgcgattatttctggtgaaagtttcgttaaattcaagctcgtttaatggttatggttatgtaaatcttaattatatggtggttgaatatttgattcagtgcaggatttaaatagttgcaatgttcttaagcttggttttaaaaaaaaaaaaaaaaaactcgagactagttctctctctc

SEQ ID NO: 25176 - DNA, 1281 bp, Glycine max
  unsure (1)..(1281): unsure at all n locations
  Clone ID: PAT_MRT3847_122736C.1
actgtgaagccaccaccatggcgatgaccaccacaacgacgtcgtctccaccatttctcttttcattcctttctccaaaaccctttcccccaaacccttcgctccctcttccccaattgcaaaaccgaacaccgctcagttccacccatcgcttcttctctgccatccccaaagcgaaacgcggcgtttcagggacccatttgtgcctcgcttctcgcgccaaagccaaacccaccccgtcttcggtggaacaagagagcgacgacaattttagaaaaagagtgcttcaaattgcgctgtgggttgcagaaggtgtctacattctatggctcttccttcttccttatgcccctggagatcctgtatgggccatcagttctgacacattgaactctcttgtgggtctttctctcaatttctttttaatattgcctttcatgaactttgttggaattcgtctgattgatgcgccagttcttcatcctatgtccgaaggactattcaattttgtgattggctggacgttcatgtttgcccctttgctgttcacagatcgcaacaatgatagatataaagggtctctagatgtactctggggcctgcaaatgttcctgacaaatacgtttctgatcccatacatggctatccgattgaatgatgctgatgatgagagtgttacaagaaaactttcacagtttggctcagtgatgacaaatggtgctccaattgttggagtgattggtgggagtgcatgcattgtatctctattgtgggctctttttggtcgaatggatgcaaattttgggggcatagcagatagatgggactacttggtgggttatcttggatcagaaaggctggcttatgctttcatatgggatatatgtctttacataattttccagccttggttgattggagacaacctccagaatgtccaggaaaacaaggttgttgtagtgaagtatcttagatatgtacccgtgattggcttaattgcgtatctattttgcttggaccctaaagaggtctgattattgtgtttggatgattagtttactttacacctttcagttaaaagttactatctcttgaacattttgaagttgaatttcacgttttgttggggggtgggggctcaaattacttgttggcctcaagtttaaacttttggtatgtaagtttgttaaatatttggagggatatttttgtcaaaaaanaaaaaaaaaaaaaaaaaaaaaaaaaaaaaaaaaaaaaaaaaaaaaaaaaaaaaaaaaaaaa

SEQ ID NO: 25177 - DNA, 1103 bp, Glycine max
  Clone ID: PAT_MRT3847_122737C.1
ggctcgaggcgcgtttaagacacaagaactcgatggactctagcttggagaaaactcctttcgccttcgtcttcctccatagcgttagggttttcagagtctcttttcttttccccctcaacactcacttgccgttggccacgtgttgcacacctccaagaccaaaacgacgcgtttttgaaaccgctctttgactctatcccacggttccacataacatcgcagttccgttccgtcgaatcgcgaattcgaaggatatcgatattatcgtgctacacgagattttgaaaagaaaagaaaatgtctatggttgatgagccgctatatccaatagcagtgctcatagatgagctgaaaaatgatgacatccagctgcggttgaactcaattagaaagctctcgacaattgcgagggccctcggggaggagcgaacacgaagggaattgataccatttttgggtgaaaataacgacgatgatgatgaggtacttcttgcgatggcggaagagttgggggtgttcattccttttgttgggggagtggaacatgcccatgtgttgctcccgcctttggagatgctttgcactgttgaggaaacttgtgtgagagataaagctgtggaatcactatgtaggattggattgcaaatgagggagagtgatttggttgaatattacatccctttagtgaagagattggcagcaggcgaatgggtcactgcccgagtctctttatgtggactatttcatattgcataccctagcgcaccagaaacatcaaagacagagttgagatcaatatacagtcagttatgtcaggatgatatgcctatggttagaaggtcggctgcatcaaatcttgggaaatttgctgcaactgttgaatatgctcatttgaaggctgatgtcatgtcaatttttgacgatcttactcaagatggtaattgaatacatatttcttgttctttgtagatggaaagtgtctgtcatttgtctgttacatatttacatgtgtgattgtgttgtagagtctcctgaatgtactttactcctttaatatgcaattgtaatcttggaacagatcaagattctgtcagattgtt

SEQ ID NO: 25178 - DNA, 687 bp, Glycine max
  unsure (1)..(687): unsure at all n locations
  Clone ID: PAT_MRT3847_122738C.1
attaactgtgtcaatttgcttctatattccaaattttccatttaatgattattctttccaaggcatttcaagtaatacacaaacttttgttctttcgtttttctagtttccttgtctatgtgactatgttcacataaaaacaattcaaagtatgacaaacaattgttgtaaaatagtgtatggtactaaaacaaattgaatggcagctagcagcagaagaaactgcattttgttcctccttgtagtgaatgaaatgccagccaaatgacagacacttgaaataattctgatgaaggagttcctctatgaatttggaacaaaggtgccaacatagccaacccccgcaacaaagaaggccatagattgcaggaagagatatatgaagtagtggttcttcccatatttcagatcataacatgcacagaaaaacaggtaggcccccactagaagttccaggaaatgaagcctttcaccgattctgatacgaggcttcctagctgctttgccacctgactttgttttaagagcatctcccaatttctcagtaactacccattcatttactctccctgcctctaacaaacctgntagtgttgccttggtcctatgcattgacataacattttcaaagagtatccagaatacccagtagtggattgaccttggagttccaactgcattaaggag

SEQ ID NO: 25179 - DNA, 199 bp, Glycine max
  Clone ID: PAT_MRT3847_122739C.1
ataatggattgtccgggttattttggaggaaggctatatttaattaaatgatttggccttcccaaaggtaccatcgaattaagtcttcaaaatgagtatttagccaataaaaggatttaaatgttccatttaagctttactcgctggagtctttcacctggcagagattaaaggaatatttaatttcaggttttttatc

SEQ ID NO: 25180 - DNA, 824 bp, Glycine max
  Clone ID: PAT_MRT3847_12273C.1
ggctcgagaaataacacaacacaaaacgatcttttatttctctgtctagagaagaatctagcaagccttgctcgtcacaaaatcaaaggttgcaactgagaactcactccttcgaatcaaaatcaaaaaatgtcggtgactctgcacacaaacctaggcgacatcaagtgtgaaatcttctgcgacgaggtccctaaaacctccgagaattttttagcgctatgtgcaagtggttactatgatgggactatatttcaccgcaacattaagggttttatgattcaaggtggagatccaactggaactggcaaagggggaaccagtatatggggcaagaaatttaacgatgagataagagaatctctgaagcacaatgcaagaggaatattagcaatggccaatagtggtccaaatactaatggaagccaatttttcttgacttatgcaaagcagcctcatttaaatgggctatacaccgtgtttggcaaagtaattcatggatttgaagttcttgatctcatggagaagacacaaacaggggcaggggaccgaccgcttgcagagataaggctcaatcgtgtaacaatacatgctaatccacttgctggttagccttttgtctcaacagttttttatgtaaaatttaagtttttgttttccaagtgatctagcttaaaggggaggagaaagtgagttcttatgtactaatttgagtacttgttcgtacctactgattcaaagaagcattttgattgatcaagtagtaaagtgtatattgctttgtgagatatgcatggaatacgataaacacatctttatggatt

SEQ ID NO: 25181 - DNA, 755 bp, Glycine max
  Clone ID: PAT_MRT3847_122740C.1
cccgacccttaataagttgtgacaaaacccagacctagtgcatagcatattccagtgtttttcatttcatcgtgcattcaatggccaccacagcagctctatccggaaccatggtgagcacctccttcatgaggaggcaacctatgaccaccacaagcctaaagacattccccaacgttggtgaagctctttttggtctgaaaagtggacgaggtggtcgtgtcacttgcatggcctcgtacaaggtgaagctcataaccccagaaggagaagtggagtttgaatgcccagatgatgttttcattgttgacaaggcagaggacgaaggcattgaacttccctactcgtgcagggccggttcttgcgtttcctgtgttggcaaaattgtggaaggtaacgtggaccagtcagatggtagcttccttgatgatgagcaaatagatagtggctgggttctcacctgtgttgctcaacctaggtcagacgttgtcattgagacacacaaggagggagagatcgaatgatcaatatatatatatatgatgtaatcttatccattgctgttctaattctatctatatcttggattttttattttgttatagtgatttggcatatttgtgacaaatagtgagtttattacttttgtcatatttgtgaaaacaagtgaaattgttgcaccttaattcattagtttggtgatgcttttcttactgtttatgcacaatagtttttcttgatctttttctttcctc

SEQ ID NO: 25182 - DNA, 1917 bp, Glycine max
  Clone ID: PAT_MRT3847_122741C.1
cccacgcgtccgcccacgcgtcgcgcccgcagtcctagcgcagagcatattccagtgtttttcatttcatcgtgcattcatacgacgataataggtgaccaacacaaacaatagtgcatagcgtttttcattgtgcattattcaatggccaccacagcagctctatccggaaccatggtgagcacctccttcatgaggaagcaacctatgacgaccaagagcctaaagacattccccaacgctctttttggtctgaaaggtggacgaggtggtcgtgtaacttgcatggcctcgtacaaggtgaagctcataaccccagaaggagaagtggagtttgaatgcccagatgatgttttcattgttgacaaggctgaggaagaaggcattgaacttccctactcgtgcagggctggttcttgcgtttcatgtgttgggaaaattgtgaaaggtgacgtggaccagtcagatggtagcttccttgatgatgaacaaatagaaagtggatgggttctcacctgtgttgctctacctaggtcagacgttgtcattgagacacacaaggatggagagatcgaatgatcgatatatatcataatgtaatcttgtccattgctcttctaatgccatctatctatgtcgtgttttgattttgtaagagtgatttggcgttggctagggtagctagctgaaatcatcgcgagtttattaattacttttgtcatgtttgtggaaacacagatgaaattgttgctactttaatttataatatgttttgttaatgcttacggttttattcagaaaaatgtgtaagtttattacttttgtcatatttgtgaaaacaagtgaaattgttgcaccttaattcaataaatttaaagaaaattttcgtattatcaatgaaaatatgaaaatcaacaagtaccatgttcgttaatgtggtacccttgccctctctttaagcaacagtagttataaaaagaaaagaaaatagaactttgaataacgctaatgcatttttttgttacaattgcattattgcaagaaaaatatcctgcatatttaacaggttaggaggtggttgtaatggtggtgcttccactttcacaggttcagaaggtggaggtggagagggtgagggtgagggtgggcattcctcttccacttctgttgtctttttgtattcaatagccaaaacttctttgttctcaatagccagatccttttgaactattggtccctggggagcatctttgacatactcttccatggcttgcagaaatgacgaagggggctgctcaactttaataaacttctctccacgtccaatgtcaagattacgacatatttcatagaactctgacagtctctcagcctggtgcccaaccctcctgtatatatcaagagctttcagagcatatatcttggattttttattttgttatagtgatttggcatatttgtgacaaatagtgagtttattacttttgtcatatttgtgaaaacaagtgaaattgttgcaccttaattcattagtttggtgatgcttttcttactgtttatgcacaatagtttttcttgatctttttctttcctctttgatggatccgggcagaataagagtaattttaatttttcaactggcaagtaacatgacaagcccaattgtaatgttttgtgtatggcttttgatagtaattgaacaaaatatgggtgaaccatatctgtgataattattagcaagagaagacaggaacaatattaatatattctttcaattaattcacatcttctcaccatattattattatttcttttgtcatacaagactaattaattcatactttttaaaaaaaattagttgatttagttagtgacaaaatttgtccacaattttgaacaaatgaggatatataaccc

SEQ ID NO: 25183 - DNA, 192 bp, Glycine max
  unsure (1)..(192): unsure at all n locations
  Clone ID: PAT_MRT3847_122742C.1
atttgtacctatataatctcactcttctctctgccatagaataagtgtgtggttggtttcacggctaaaagtatcagaattgattttctattccatcatttttttnttgggtaagcctattccgtcanatgtaatcttaaacttcatnaaaatgcaaatcttacgtattggaggnnaaattgattttgcatt

SEQ ID NO: 25184 - DNA, 1028 bp, Glycine max
  Clone ID: PAT_MRT3847_122743C.1
atcacatagtattattatatatacttatctgtcttctctctttttatctatctaggatctaggtgtctactagagtttgctgtccacaaatgttgttccacaaagtttacaagtatatgtaacggcaacttggcaacttgcaagcatatacatgtcaagcttgatcctctttggaagctaacgaaaggctggcatcccggttgttaaaatacagataggtttttttgccagaagatgtacaagtaagcacgttagaaaaaccgttgtagttcccatccagctttgaaaagcatatttttctaataaagtcaaagagctcattatcttgcacaaaaggctgggcagcataatcttcaactggcatccacttcgctgcctcaatttctgaagcctgattctgaatgtcaaacgattgaggttgcaacatgcaaacaaagaacaaatctgatttctcgaagaacgacttatggctttgcctgaatgctaaaacttcaacaaactttgtctctatccctgtctcttctttgacttctctaattgcagcttcacagagatcctcaccttcattaacagctcctgttggcatcttccatacacctgtacctctgaatttgccacctgtctcctgaaccacaagcacctctttgttgttgttgatgacaaaagcaccaacaccgactcgatgtgaagcatttgcaggaagggtatcaggagtatctggaatccaacgtacaagcatcaagtaatctggctcagcatggtggtacctaaatccagccttgactgcaggatcaacaagatttgaatgttgtatgggcaacttgatccagacccccttcttgccctgttggctccacttgtagattgaagcttgcaatatagaagagaagagcgtagaatccatagggtcttggacgtctacaacgactcctccatgatgatcctcaactccactgagcaattcaatcctttcaccttccatttggttgtaatatactaatcattaattatgacctaaaacttaaacc

SEQ ID NO: 25185 - DNA, 338 bp, Glycine max
  Clone ID: PAT_MRT3847_122744C.1
aaattaggtgcttgttataaacaacggaccgaaaaaaccccaagaaaaaaaaaaaccggcggacgaaccaacctgcaacaacacacagacctgcctgccaaatgaaaaccccgcgtgagaaacccacctgaggaagaaatgagcttcgcagacaccataaggatctggggcacaagaaatgcaagggggaggcacacgaaagaaggaccctgaggagggaccaaccaaagcaggctggccgacagagacaacatgccaggaatgccaagccggaaggggacccaagcaaaatagggaacaaagtcagggcgaacaaaaaagacgagcggcccaaaacc

SEQ ID NO: 25186 - DNA, 858 bp, Glycine max
  Clone ID: PAT_MRT3847_122745C.1
gctccttctaatcccatcccatgtgcttttacttttaatccttttttcaagaaaaagagagcttgttttgtttgtgggaagccaggacattttgctcctcagtgtaggtatagagttatcagaaatggcaatcctcctaaatgatgcaatcctaccccccaagggcattggatagaagactccaagaaaattgggccaaagatgcaagagaaggccctagggttctcatgagtcttagggtagattttgggcccatggatcaaaggttggatccacttcttctttgtaagtattagaatagattttttcttcttttgggtcttgtattttggtcattctagtagtatagggttttaaccttgtattttagggcattttgagtagtctttgtagtagggactttttttttttgtattttcatgtatttttggaatgggggtaagcttagctattatagggggtgtgtagctaagctctaacttctcatctcaaggaggtgagcttagctattagagaggtgtgtgtagttaagctctagcttctttaggaatattctcaaggaggtgtgtgtagttaagctctagcttctttaggaatattctcaaggaggtgagcttagttattagaggggtgtatgtagctaagctctagcttctcaagaaagttttctcaaagaagcttctcaaggaagttttcttaagaaagcttctcaaggaagttacctagtctataaatagaagcatgtgtaagtacttgtggtaactttgaatgaatgagagttcttgtgagacacaactcaaagttcaacttctctcccttttttttccttcaatttcgtgctcccccccggacgcgtgg

SEQ ID NO: 25187 - DNA, 423 bp, Glycine max
  unsure (1)..(423): unsure at all n locations
  Clone ID: PAT_MRT3847_122746C.1
gctaacctctgcaaaagtccaaggtcagtctttccattaaaccctaatttcccaatccccttttcctccttcttccacaacacacttcgcttcaatctctgtggtgggttagatcatcgtttttctgcaaaaaatttgttctccgattcaaaaatttaaacttttgcgatgttagtctgtggtagtgcactagtgcgctttgtttcttgggttaatcgatgcgatcgtgagagataaaattaggggatggttggaattttgggtgcgatactcagtttaatttcttcgaagaaagaaattatcgagcttcgatttagggtaaataaaacaataatgtgaacatgttctgatgggtttgtttgttttagatggatgatactactcaaactcctaaagtggttagacctgagagattntgttttg

SEQ ID NO: 25188 - DNA, 195 bp, Glycine max
  Clone ID: PAT_MRT3847_122747C.1
ctccaacgaggttcttgggatgatgttttaaggtgctgtgcattgacattagcacattgtctggagtatttaactggaggactgactaagaatgatgatatgcaatgaaggttgcaacataaccgaagataaaagaaagagaagatggacaatatgaccaaatgagcctgaacgtaaacacctcagaaattgaaa

SEQ ID NO: 25189 - DNA, 524 bp, Glycine max
  Clone ID: PAT_MRT3847_122748C.1
ccatctcctagtatgcggccggcgtaaaatcttgaaatagtttgtaaagacttaaagaagagttaaggcaaagaaaaagatgaaaacttttgaagtattgattatgatcatggctatgttggctttcgcccaagctgatcactacaatcttccatatgtgcaaattgagtcaaacaatgagtctattaaagttagttgtactcgcaaatgtgaattgatatgcgcacctttaatagaaattcctcccgcttattttctatgtgttgacaattgcactaaaagatgccctgaaatgttctctactagtctcaaaaattgcatgactggatgtggctcaatcaagttcattgaagtcaatattgatgttcgtggtcttgctacacatgtggtgaattcatgcttgcaggagtgtcagaagaagaaatagtttgttataagaatgttcaagaaaaagttgtgtgaatattcatgcataattgcaacaaataaatcttaatcaataagtagcacttatcaaataaaaa

SEQ ID NO: 25190 - DNA, 127 bp, Glycine max
  Clone ID: PAT_MRT3847_122749C.1
cataagaaacgaattatatggtctataattagttgcatgaaggtggtttaacttctataaaacttggcagccaatcgggctgtatttatatcgactaataaccccgtccaaactaagatcaaacttt

SEQ ID NO: 25191 - DNA, 537 bp, Glycine max
  Clone ID: PAT_MRT3847_12274C.1
gcacgaggtaaacttgaacagtaatgcaaatatgcaagaatattatgctcatctcttcaaaataaaacagagttcaataaaaactcgaagcaaatgaataaagttgcaaatacagttcatattactgtttgactaagtgttctctgcatttcagttgtaaataaagaaatatctggcattggtttgtcaagtcttttgctactcttgtccttgttatcaagtacaaagagatcaagaaattccagcttattgatattcacaaatagccaatagaattattgaatcacaaagtgtcagtgatttaaagtgattgattttacaccggaaaaggaaactagtagtgggcacacaaagaatctgatgcttctcctttctgcaaactctttctatactatagactgaacatacaaggataaaatatctatatgctcccactggcatccctagagttaaagttacatgcatgccaaataattacacttgttctcctcaccagtactcaaaactcaaaagaagggggaaaagggggtcttaagg

SEQ ID NO: 25192 - DNA, 505 bp, Glycine max
  unsure (1)..(505): unsure at all n locations
  Clone ID: PAT_MRT3847_122750C.1
tgccttttcagggaatgaccctaccaaggtttacagaatttttgtctatatcttgaggcaagctacaaagagtgttttttcaaatgacctggccagacacctcatcattcaattttcctataccttctgtctctcctttccctcttcttttttatttatcaccgaaacccctattaaattaatttttattcccctaaacctaaatttttttttttaataaatacttttatcacaattattattccttcatatatttttttatttatttcaaaagggaaattccttcctccattaaataataacactccattttatttttttctttctcaaacattatttactattattttaataattataaaattttattttctccattatttcttttacctattatacccatacctttttctntaaaaaaataaaaatattttaaattttttaatttttttagaaaaaaaaatattacattttttattttaccctattttcttttttttttctt

SEQ ID NO: 25193 - DNA, 311 bp, Glycine max
  Clone ID: PAT_MRT3847_122751C.1
gttgaatcgttaaaatgttcataaaccagttctactcttacgttaccacatggatccctgggaagggttttaatccagatggagtacgctattgaagctgtgaatcatggctcttctgctatacggctccgatctaatacccacttggtcctcgcatgcttcaacaatgccaactcctaactctcctctcaccagaataagatcttcaaagtctacaatcacatcgtcgtctccatcgctgtcctcaccgccgattgccccgtcctctccccctacatgaaatccgaattcatcaactataattacaccta

SEQ ID NO: 25194 - DNA, 328 bp, Glycine max
  Clone ID: PAT_MRT3847_122752C.1
caccgatcatctcccatgggtaccgttccttcgctgcggcactcatctggggcctgttgtttctctcaatttcaagcctttcaattctattgttcttcgctggatgctcatggaaacaggcatgggaatgccgtggtctatgtgaaggcctatgcttctggggttgagttggtcgcgaagattgatgcttggaatgcccatttggctgactcaggacagactgggatggactctcacgtgctttagggatatagaaggaaacgaagagagcacagctttgtcctcaagagggacaccttgaacactacaattagtgcctacagcctgt

SEQ ID NO: 25195 - DNA, 470 bp, Glycine max
  Clone ID: PAT_MRT3847_122753C.1
ctcccctgctttcaccacctgagagtttctcttgctcgtcccacaaaaattggtactaccaaaagaaaaatcagtcatcgccctgatccccgcttgctctcttatctgattttgttctttccacacactaaattgaagatgggtaggtcttaaggaaataactttggcatcagattctgtttttgatttcatcggtatacagattctaaaattttgttctttctttaattggacgaccaaatctgaatctgagtcctgaacttggatcactcggattcgaatttttcttttttgactcacacccatcttgttatttgttattaatttcctcggaacaagaacaagctttgattttaagagagcgagcaaagagtgttgtgtatttatagacactcatggctgcagcgaacagtggcaaattcgacgtgggagatgaaactcacaagaattcacgaaagggtagtgaaagc

SEQ ID NO: 25196 - DNA, 570 bp, Glycine max
  Clone ID: PAT_MRT3847_122754C.1
gttgaattggtgttcgttgtctctaactgggaatacaaacacacatggttataattattaacaaagtgttaaggtcgagatgataatatatattacaagactgtaggatatatgtagatgatacaatttgttttaattaagcaacaacaatctatcgttcaaggcacccaactcccaactgttctatgaagtctcgaagaatattctgatgcaccagctgaacaaggatttggaagtggaacactgaagaacccagccacaacctgttctgaaaatctgatagagctcgagcacaggaactactttactgttgccaatttttgaagttccttttacactttcttcctcttcctaatatgcttggcaagtaaaacactttttccaccttatctagtgcattgtcgaccatccctctgcctcttgtattccagaagatactaaattaaccttgtgggctaaagttttctttggttttagtaacaggaaattatactaccaatacaaaatattgcataaaagcagatcagactttaactaaattaggggatgaatgagatcggtagaaggatg

SEQ ID NO: 25197 - DNA, 322 bp, Glycine max
  unsure (1)..(322): unsure at all n locations
  Clone ID: PAT_MRT3847_122755C.1
aacaccacctnaccgaaatcaccgaaccgaccgaggcgtacgataaatccttaatatacttaaaagccagtatccatcttctatatctcaattatcacatagggagggaggacacacattccagaggaacacgaatcacaaacatcataacataatcagcaacagcataaccacccacctaggacatccgacaacaattcaactgagaaaaccatcacactaggatgtaacaagagagcagcacctcacggtagccaacttcagccgactcattgaacttgctactcacgacaagctctatgcacggtctctgctgatctcc

SEQ ID NO: 25198 - DNA, 171 bp, Glycine max
  unsure (1)..(171): unsure at all n locations
  Clone ID: PAT_MRT3847_122756C.1
ccacgcgtacgaggacgctgggggaaatatataagccgagttccctctctcttctttttcttcttccttcatagctcaagccatggccacgagacccgagagtgaaaaagaccctgcacaaccaccttgacgtgctctttctggcacagnacaagaaatgacattaatcta

SEQ ID NO: 25199 - DNA, 434 bp, Glycine max
  Clone ID: PAT_MRT3847_122757C.1
cacggttattgtctattaccatgagaaagtttgagttctatgcctcggctatttaaaattattatttttcatttttgaattcttgctatgtcatcacaatttactgattttatccttgttaagtatgtggatcatctaatcatgtcttcttgtcttacacttctctgttgtcatcattgtttttctgtaaactagatcctgctacatcatcaatatgaccataaatcatgtctagttagccatattgatgtgcattgggagttgaaacttgaaattatgaaatataatttttgcttaattttgcatggagtgaaataattttattttttttgcttaattttgtgcatggtggtgagtgatgaacataccattttgataatcattcatagttgtattatcttttcaaattatctttgaaggcctgaacatcagct

SEQ ID NO: 25200 - DNA, 669 bp, Glycine max
  unsure (1)..(669): unsure at all n locations
  Clone ID: PAT_MRT3847_122758C.1
ccacgcgtccgcaagaaacacccactgatctttgttttggtgttgaagaagagaagatcaatggacgactccgccaagtcacctgatcccaccgcatcctttgcttttagatcctcaagcacaacaccacctcagagcaacttgttgagaagccattctactaaagaaacccctttcacaaacttgattcactccccaccacgcctctcttgtcccactctttctcgcagcctccaaaactctcctcttcaccaccgtcgtcagttctcaccccctccctctcctccttctcccacaaaactctctgattctgaccctcaaaccacttaccactgtgcctcttctgtcctcagaaacgatggccaaatcctctccatttccctctcatcaaatggcttggtctacactggctctgactccaaccttgtgagggtgtggaagctccctgagttcactgaatgtggacaactcangaccaaggcttgcagggtggtggctctccaagtgtccaatgacacggtttatgcagcatatggtgatgggcaaataagggtgtggagaagaacttgggataaggggttgaaacatggtcggttggctaccatcccaaagacactaggctatgtccgcagctacatcgccgggaaagacaagacaatgcacaagggg

SEQ ID NO: 25201 - DNA, 881 bp, Glycine max
  unsure (1)..(881): unsure at all n locations
  Clone ID: PAT_MRT3847_122759C.1
agaaagcttttatttgcttccaaaagttgcatacttaaattgatttgcttctttactctcccatttgcttccgaacaagctttttatttatttatttatttgttacaatctcaagagcttaatataatgtttccattttttagtctttaatccattcttttcttcttcctttttgtggtgtttttgtgtatacatattcagatttaagtggtgggtcagctactatggcttcgtctctcttactggcggtggtggttgtgcttgatatggttgcttttgctctcgctgttgctgcaaagcaaagaaggaatactgcctcgttaaataaagacagtgcaggtagaaactactgtcaatatgactcagacattgcaaccaacctaggagtggggtccttttttatcctagttgccagtcaagtgatcattatggttgtaactagatgcctgtgctgtgggaaagctatgagacccagtggatcaagatcatgggcaatttgcttattcatcactagttggtattgtatgatccagggtaacatttttcattgctgcttcgtgcctgctagcgggttctgtgaggaatgcttaccacaccaattaccgcgatctcatgggagagagagcaccttcatgccagaccttgaggaagggagtgtttggagctggagctgctttcattattttcaaaggcataacctcagacctttattatgttagtttttcgaaagctaataataatggtcctcctccctatgctagggacactgntgtgaggatgngaaatttgtagtagtagtagtagtgttgngaaatcgtttgtaatattaactattaagttggatgtgaaaagctacttgtaaattattatgaattnattgg

SEQ ID NO: 25202 - DNA, 363 bp, Glycine max
  Clone ID: PAT_MRT3847_12275C.1
aaggaggggacatccatattctttaaccttttgaccacatcttcacacaacaaaataataggctcaaacaacaccgtcaacaccgttaatcctccaaactacaccatcttctacactctatccataattcaacccaacaccaccgaaccgaataaacgcacgcaagctgttatatcttatgttcactctttatgaccttataaaaacatcaagagagtctgcaatgctatccatgttcctgaacctgttaaacctatacgcccaattagatttcatcctgctactgctgcaccaaattcttcaactgctattgtaatgcccattattgttcctccctcttcacctgcatcttttatgcaatct

SEQ ID NO: 25203 - DNA, 969 bp, Glycine max
  Clone ID: PAT_MRT3847_122760C.1
gccgaatttaaacgccagaaagcttacaaatgcagccaaaagttgcatactttaatttgctttgcttctttactcccccatttgcttccaaacaaaggaaaaatcactctcatctgagaatccaaacctcctcctaatttaagtggtgggtcagctactatggcttcgtctctgttactagcggtggtgtttgtgcttgatctggttgcttttgctctcgctgttgctgcagagcagagaaggaatactgcctcgttaaataaagacagtgcaggtagaaactactgtcaatatgactcagacattgcaaccggcctaggtgtggggtccttgtttatcctagttgccagtcaggtgatcattatggttgtaactagatgcctgtgctgtgggaaagctatgagacccagtggatcaagatcatgggcaatttgcttgttcatcactagttgggtgacatttatcattgctgcttcgtgccttctagcgggttctgtgaggaacgcttaccacaccaattaccgtgatctcatgggagagagagcaccttcatgccagaccttgaggaagggagtgtttggagctggagctgccttcattgttctcttcatgccagaccttgaggaagggagtgtttggagctggagctgctttcattattttcaaaggcataacctcagagctttattatgttagtttttcgaaagctaataataatggtcctcctccctatgctagggacactggtgtgaggatggccaatttttagtagtagtgtggggaaattaattaattgtttgtaatgttaagttggatgtgaaagcctacttgtaaattattatgaaccttatttccttccttttgactcttcaatgatcaatcatgtcacaataggtgctgcctcacgcagcgggttacacttgtgtacccctatatatcctataaggtaacttttcaaattaaaatgtg

SEQ ID NO: 25204 - DNA, 1399 bp, Glycine max
  Clone ID: PAT_MRT3847_122761C.1
aattcggctcgagcatgtttttgtggccccaacaaaatgatagcgctgcacatggacaacttcaagcaccaaccaaggggatgctccactcatagaactcaacatagaaactggaactagaagtagcagtcactaagttttgtgcataaccttaaaccatgtcattgcctaccactactagtggtcactcatctatttactctgcacttacattgccaagaaccacccaaattcacccaaccttgttttctcccaccaccaagttcttttcttccaaaagcccctcatattcaggtctttccaattgtttctcaaacacccttttgtcaagacctttgctttttgctgtcaaggcttcatctggggttggctcagaagcatccaaacaggagagtgacaagagtgaagaagaagaagaggaggaggaaccgtatgaagagtatgaggtggaaattgagcagccctttggactcaaatttgcaaagggtagagatgggggaacttacattgatgctattgcaccaggaggatcagctgataaggctggagtcttcactgttggggataaagtaattgccaccagtgcagtttttgggaccgaaatttggccagctgctgaatatggaaggacaatgtacacaattcgccaaagaattggcccgttactcatgaaaatgcagaagagatatggaaaaaacattgattctggtggtgagttaactgaaaaggaaattatcagagctgagaggaactctgggtttatcagtaacagagtgagagaaattcaaatgctaaatgctttgaggaaaagggaacaaaaagagcgcagggaaaaggatttgagggaaggattacaactatataagaatggcaaatatgatgaagcactagagaaatttgagtctattttaggatcaaagccagaacctgaggaagcagcagttgcaagttacaatgttgcttgttgttactctaagctaaaccagattcaagctgcactttcttcactagaagaagctctgaatactggttttgaagacttcaagagaataagaactgatcctgacctggctaacgcaagggcatcagaggaatttgatcctttattgaaaagatttgatgaatctttcatcaatgagaatgccatcaatgccatcaaatctctttttggatttggtaagaaataacccattgtgtggacaaaagcatacagtttggccgactaaggagttggttgagcaatatggtaattatttcccatgtataactttatagtttaactacataggtccctcattttttgtcccttcagcgggatcttgttttatgtactagtataatcaagcaaaattataagaaacttatttatgataataaaattgtgcatttccatcaaaaa

SEQ ID NO: 25205 - DNA, 419 bp, Glycine max
  Clone ID: PAT_MRT3847_122762C.1
tttattttcgaaccattttttacttatttatttttttgagtttgggtttatttatttttttttttttttttggaaaaaaaaaattcccccaaaaaacatttataaagaaaaaaaaaaaagatttggtcacatctaaaaaaaaaaatttttcaccaacaagcggataattaaatttaaaaaaaaaaaaaaagggccaagggtaggggtttaaaaatttaaacccccctttaaaaaaaaaactttttttctctagaaaagaaaaaagggatttctttcctcaaagaggtaaaattaataccttaaaaaagttaaagggcccctaaacccttaaaagaaatattttttgtgtaacacagaatttttctttggtcaaataaaaccccctaaaatgggaaagaagaagacgatcccggggggga

SEQ ID NO: 25206 - DNA, 507 bp, Glycine max
  Clone ID: PAT_MRT3847_122763C.1
gttgaattgaatagtagtagtgtagcaaggggcatggctttggtggagagggttcaagttcgaattcctctcctgttattttaacactaacaccaacggctgtagctgtaggctttcggtgttgggaaaggaccacgtgtccagcgttgcttggttacaagtcaccagtcccaaccaccataggggccattcagagactcttcaacgtcactggcgtcgcagacattctcgccgctaacaacctccctgagtggaccctaccaaacaatttcacggtggaggagaatcgccttttacggattcccttggagtgcgattgcagtgggcctgggttgtacggagagccctctaaccccctcgtttacactgtgcggaagggtgacaatatttcttatctagcaaccactgtgttctccggtttggtggcttcaacggatatccaacatgggaacaacgtgaccaatttaaggacgggacaagaactgcgagtgccactaccttgtagct

SEQ ID NO: 25207 - DNA, 263 bp, Glycine max
  unsure (1)..(263): unsure at all n locations
  Clone ID: PAT_MRT3847_122764C.1
ctttttgttattatcggtttgataaatagctttctgattgtctcctattacctttnttagaattatgatcctgtaataaaattgtttatttgatcatcattgaatatgtncntnncttctcnctctntactctcagtgatagagtgctgctcgncttatttnaatngtgncngattgagcattcactcaagngctaggatttgatgnatcnaatgggaagcagtnccgtaagngacgaagncactnaaatngattgaagantt

SEQ ID NO: 25208 - DNA, 403 bp, Glycine max
  Clone ID: PAT_MRT3847_122765C.1
tgggttcggttcggtccttttttttactaccaccaccttcggaatcagaaccaccatgggccaccactaactgggaggaggttccctttttggatttaatgactgacctctttcgtggtttaaggggcttttccaaacttgccaggcgtttaattttaatgggcccacctggatctggaaagggcccccagtccccaatcttaaaagttgggtcctgtttatgccacttacttcccggggatttgttaagagcagttgtagcagttaagacccttttgggggtcaaggttaaagaagttttggttaagggagaacttgtttttgatgactgggttgtgggctttttggatgaagcattgaagaacccttcttgtcagaagggtttaatttttgatggttttcc

SEQ ID NO: 25209 - DNA, 535 bp, Glycine max
  Clone ID: PAT_MRT3847_122766C.1
gcacgagggttagaagatgggatgcacaggccgtcgataaacgatatcgtttggctgcttgagcttgcgctgcagctgcaagaggatgcggatcggagtgaaaatgctgatattgttacagatgaaagcaatgaaataaaaagaggaaattagtggctgtatgtttagtattggagagcataactattgttgcaaggatagtgatttgtgagactgctttctgcgaaattatatattgacccaaagttctggaaatgcaggcaaaacaattaaatttgaaggcaagttgcttccatcactagcaaatgaagacaagtgcaaggttacttggtaaatcttaaatttcaacatttttgtttaacacccctatatgttacgtgttcaattaatgtatcatttttctgtccaatggcgatgattttgttatagttttcttgcaagacataactcaatagtctttccacgttgtgacattattattattgcacagaattttttttccctacgctctgttgatgttatgtattatcagaca

SEQ ID NO: 25210 - DNA, 1585 bp, Glycine max
  Clone ID: PAT_MRT3847_122767C.1
atctaaaagaaatgcttgagttagccgttagttgtaatcaaacggctaagtcatcaaatttttatagccaaatataacagctaatgggactttaatcgttcaagttcaaatttacttctacttcgtagaccacaaattggagtatgcagttacaatcaagaagtgtcaacaagatggaatcaataccagcaaacaagaaattatgctgttttcctatctctcttccggaacatgtcaatccttccttccatactgaaactattaatcttcacgagatgaatcatgatataactttttgattcataagtttaatatctactctctcctttcctcctgtttgtccctctttctaagtgtaaaagaagaataaataacggcaacaacaaaatatgccacacaggagagggtatatatctacacaaccaaatacatttactatgaaaatatcatacaataaccaacagtaaattatggttcaagacattacacaccaaaagaaaactacatgatactctatcaaaacatttaacaaccttccttgtccttgatcagtctttgtgaccagcgtaatacaacctaaaaacttttggaagataaacaggcaacagaaatccaaacaaattgaaacaccagaaggccatgttagccacagcaagtaccctcccaacaaagatcctcctatcagacccactgtgcacttcattaaccttgttgatctcactcctaagccaatccacaatggtgaaaatcctccttgagttgtaaaagacaggcacaaaagctctcattggagttgagaacctgccagagaatgccacaccttccatgaagacttggctggacaagagaaaaacatggggtgcagctgctttgatcccttctttgtcaccctcaaatattccctctaaaatataagctattggggcataaagtccaatgatggcccctacaaacacatagagggcaaggaccttgttttttgggttgaaaactaaaggttcctcctttgatgggagaagagatgggaaagccatctttgataagaagtacatgtagattatggagaagagcacaaaggcgaagtcttcaggggcaaccatgccactggcggataagacaacaaccacagctaagcagttgagatggcggaaagagaggaaagttggtttgtgtggtgtggtggtgatggttttgtggagattcttgagtgaatgttgttcttgcggttctttgtggccaacttcttgttcttgtggtaggctaatgtcactgcccgttggaccaacaccacctgacatttttgtgcagctactaagacaaaaatgtgtgaatggaaggaagaactactttgttgggacaatttggtttttgtttaactatctgagcaaaacgggaatctagaactcacaagagaagatgattaaagtgaaaatgttgtaaaatttgaaattgataaggtgaatcaaaagatgatgggaggaatttggtagatgggtgttgagaggaaactatgggagtgaagggaagcagaagcaggaaggaagataagattggatgatgcccccttctgtcgtcttctcgccga

SEQ ID NO: 25211 - DNA, 274 bp, Glycine max
  Clone ID: PAT_MRT3847_122768C.1
tttttacaaacattgaaagaacaacctcacaacttgcttgggaaaagaataacagagggggacaagagattatacgcacatatcaaacctatacaaaacacgagggtagtcactatcgatggccaaactgtagttaatatacaatcgggcaacaaacaagaatctactctagcttgcacaatacgtgaatgtgatggaatcagacagactattcaaatctagtcatattgtttgagaacccatagtgacaacttatgtcataatctaaaggtca

SEQ ID NO: 25212 - DNA, 440 bp, Glycine max
  Clone ID: PAT_MRT3847_122769C.1
gattcaattgattaaaactttttcttgaagggaataatcaaaccccaaaaaaaattcttggacccactaaagagtgaggcagagtacaggaaagcaaagactatacaaacgctagaacacattacggtgtatagcaaacggggggtcaacaagccccgggtttccatgagggaggctcgaaaaaaataaccaatacatgtaagtgcactggctgtactaacaggcattattaattcagggggggggcaagcaaatttttgctaagtgtggaccaatccggaggcgccctgttgattgtcggcccctccctaaaaagatggatttcttccctaccccattccagagtttttagcaccttgggccgaagaatcaacggactcttaaggacccccctttggttgggagaagaggggatcccaaaactgaggggctaagaaaaa

SEQ ID NO: 25213 - DNA, 651 bp, Glycine max
  unsure (1)..(651): unsure at all n locations
  Clone ID: PAT_MRT3847_12276C.1
ccacgcgtccggcctatggacgttctcacgcaaatgaaaagcctcaaagagctcgcggtggcgttcaacgcgttccttggtccccttccggagtctctgacgaagctctccactttagagtcgctggatcttagctccaacaacttcagcggctcaatcccgacaacgctgtgcggtggtgacgctgggaataataatattctgaaggaactttacctgcagaacaaccggttcacgggttttattccacccacgctcagcaactgttcaaacctcgttgctttggacttgagtttcaacttcctcacgggaactattcctccaagcctagggtctctttccaagcttaaagacttgatcatctggctcaaccagctccatggagaaataccgcaggagctcatgtatctgaaaagcctcgagaatttgatcctggatttcaacgacttgactgggaacattccctctgggcttgttaactgcaccaagctgaactggatctccctctccaacaacaggctcagcggcgagattccgcggtggattgggaactntctaatctcgccatacttaagctcagtaataactctttctccgnccggattccgccggagctcggcgattgtactagtttaatatgggtggatctga

SEQ ID NO: 25214 - DNA, 360 bp, Glycine max
  Clone ID: PAT_MRT3847_122770C.1
acaaggcacaaagcatgctcattctaaagttataaaaatggcaacaacctcctacatggctctctcttgccgatccttggctggcaaggccgcgaagctgggcccatcagcccacgaagacggaagggtgaacatgaagaaaaccgtcaccaatcaggccttcttcggaagcccatggtacggcccagaccgagtcaagtactcgggcccattctctggcgagcccccgtcctacctgactggcgagtacccaggtgactaccgctgggacactgctgggctttcggccgacccacaaaccttcgtcagaaaccgtgagctcgaagtgatccactccaagtgggccatgctcggggcctt

SEQ ID NO: 25215 - DNA, 395 bp, Glycine max
  Clone ID: PAT_MRT3847_122771C.1
aaatacatgttacactgccacgcgaagctgcatgcactgagaatcataccccttgcgcgaaactacctacgggtcgagataaacgaagcactctattacttacgggaacgaccatatctttacagacgaatacaccactgtcagcgggtgcgcttgacaatgtccacagacccttcataagggcaaagatgaggaacaatgctagaacaaacactaacagtagataaccagccaagtcaacatcaagctggtatgaaccatgatcgtgaaacacagatacaaccaagctgacccatgagtgcaatattgggaagaaaaatcagaggaagatgccacactgccaagctgaggattgatgaccttcatgctgtgagaggtcgagtctctcaactaga

SEQ ID NO: 25216 - DNA, 490 bp, Glycine max
  Clone ID: PAT_MRT3847_122772C.1
ctggcttgctgcattcttgattttggtttatttcattgatgtttttatctatctctttggaagatatttatgctcccggtagttgtgctttctctctttctatctaataatatttcttctcaagggatattctaaaacttttgaatgaaagcctagaataagtttattgcacattgatattccttgttaaaagacatggataatagcttttaaagtttaacaacgaaaaaagtgtggactggatgacacaatacccatcatatataaggctaagaggtggatttggatgtcggttataatgactctaatgagaattaaatggacaaaagaccaattagtattccttcctgccatttacaatttattcatgacctggattgccacttataatttgtaatctatttcttgttttgactagtctaattcatagttcattttgataggtgaaaaattcgatgaagcaaaaaatgcaggagctgatttggtgggg

SEQ ID NO: 25217 - DNA, 572 bp, Glycine max
  Clone ID: PAT_MRT3847_122773C.1
ggcgacgtggttcctcctctgcgccgccttctggggtctgtcgcgcactccagcggggggtctgggcgtcgttcatcctcgtttggtggccctaccggggcttaccccgctgcactgggtgtcgttgtggcgtctctctaggatgtggggccaccccaacggtgcaacccctgctccgttggtgttctcctgcctttcgtggtttagcttccgattatatcggtaggcctggccagtatctcgttgccgctgtcacttgctccggcatctgggcgtgactttccagcacatggggtccccactcggcaggcacgcgtggacacttgatgatctcgtgccttacgtggataagttagcgattatatcagaagagcaagaaagaatcactgagccagtgtcacatggtccagcatcaaagcgtgaattcccagctcaagagtttcacattcttcagtccagtgttgaaactcgaggcataggcagacgaagggaggctgttgaaggtcaacaatattcccaacaaatgatggagcgtgggcatggaatgtattacacgacgaaagtttatgtgg

SEQ ID NO: 25218 - DNA, 229 bp, Glycine max
  Clone ID: PAT_MRT3847_122774C.1
ccaattctcactcctccaacaccaccaccacccattcctaacacagactctcccacagcgagtcagagaggagtaggttcgttcatcaagttcgaattttgaaccaccccttttgttccgcaatgtcgcgttcgccggggcagccggtttccgaggtggtcggcatacacgcccgcttcgccgatcggctccgcgacgcgctgacctgcgacgatggtagcaacaacaa

SEQ ID NO: 25219 - DNA, 844 bp, Glycine max
  Clone ID: PAT_MRT3847_122775C.1
aatcctcatttttgaaaataaggctcataatatcgagtaatacattcaggctaattataaaactgcggccgctcgggccgggcggcatccttcagtaccaaatatatctcatttgagttaatcttttgtggtttatttacttctgaaagatgagttcgaagaagaagatagcaatacttatcccagcaagcatgttggccatgctccttctgatatcttcatcagaggtggcagccagccattcaaaggagggtgaggttgtcaaaataactaacgaacagggtgatgccaaatttgttggtggtggtgaccttgattttatgatcatttgttttcctcctccccctcgtcgttatcctccccctcgtctttatggccggggtgtttactacgaatacgttgacaatctttctcaaaagcaagcagataaatgctattgtggttgttgctggctgacagagtcgggagattgcagacaatgctgccgagaatactattggtcgcctagaagtggcggtgacatacaatatgaggaggataaaacccacatttgagatagtgttcaggcttttaagccctgaccataaaaaatctatataatatcatagtgttcaggcttttaagccctgataataaaaaatctatataatatcatcagtcgtacgtgagaggatggatacatagtaaggtctgtctttcttatcactaaataatgttagtactaatatgtattgtgtcagtgtgacatgttttaagagaaaaactcaaatatttactgtgtgtgatcctaattaaaaaaaaaaaaaaaccccctaaaaggcaaaaaaaaaaaaaaatttcggcg

SEQ ID NO: 25220 - DNA, 230 bp, Glycine max
  unsure (1)..(230): unsure at all n locations
  Clone ID: PAT_MRT3847_122776C.1
tttttccagcctagttggctcgaggcatagtggaagctatactaatagaggcgccaacatggtcactgtttctgtgggggctatagccagcttctcatcatgttcgatttctctcattcttacccatcttcttatatataaatatttataataaccgtgcttcacttcctggggggggaaggaancagcatataaaacacctgctttctaaccggcggcgcaccagaggg

SEQ ID NO: 25221 - DNA, 346 bp, Glycine max
  Clone ID: PAT_MRT3847_122777C.1
tggactcctgtgcgggcacgtgcctacctcttgatgcaggatgcgacaccggggatagaccctcaccgcattgaccgtatccctagagggggtacgatctgacaccatcgacaacgtctaggcctacagccaaggcatggaatgaattgcgaaggaccaccaacgtgtaagaaagcacgctaagcaactgggagactgaccgacactagctgactgcagcatcaataaagagacgcctcctcaactaggactacgtcaacatgatggcatgcaaatctacaataagacactcaccggcaagaccataaccctagaagctgcatgctccggcaccatcaatgactgg

SEQ ID NO: 25222 - DNA, 403 bp, Glycine max
  Clone ID: PAT_MRT3847_122778C.1
cctacgcgtttgcggacgcgtgggttccttcacacacttccttcttttccttgttcttcgaacaagctctttctcattccatcaccacaacttccgatattgcatcttcaactgttttggttacattttacgcgtaataactgattgtttctttcgattggaaccatcgctcgaagagaatctccggtgacgtcgaagcaatattagtttactgtatgtattagttcggattaataataataaagcgcataagtgataacaacaacaaaaaaagaatatctgagttgaaaaattgctagaagaagattaaacgcgatgttggatcttaatctgactgccgagtcgactcaaaacgacgagttgctgggtgctgtggacaagtttcctgaagcttcgtcgggaa

SEQ ID NO: 25223 - DNA, 556 bp, Glycine max
  Clone ID: PAT_MRT3847_122779C.1
gctgcgccttttcactgtcttgagtccacgcgtgcatgcaaaaaagggcataggcgtgagcacgaggcactataaggtgttgaaagatgggctgcatgagcatgagcacatagaattatcccctgcgtacgatgatcagagggaaaaggatctgatggatcttgtgctcgatgtatattatgatgctcatgcagagctcaggatcacggtggctcatgttatagccttctatatggatcatctatgctgatggcgcactcacgatcaacagaggctaacacttagggccttgtgttctagctccttatcctgcctgcagcatttcataagttgtaaacgaaacactgagactctacccggctgctccaatacacgagaagagagtgtcaccaacactgcgaaacactcagactctatgtgccggcacagacaacaacgggaatcagtttgcatgccttaatgagagaccctgattctgggcacactactactgaattgtgccctgataggttttcgctaaagcaagaccatgatgattggaacgatgatggtgaga

SEQ ID NO: 25224 - DNA, 300 bp, Glycine max
  Clone ID: PAT_MRT3847_12277C.1
aacattctttctttatattacattattacaatcgaaccaattccattccacacggcaattcttaaattctaagaccctcaaataccatacaatctttaccatcttacccatatcaccaatttaatccacatactccttcctttcacctttaatccttcctcttcatatcatccaaatcttctagatactcactcacacacaataccgcttcttaattcattttcaaatctatagaactctcccttatttcaacatccaccttatacttgacaatcacctacctcaattttgccttattta

SEQ ID NO: 25225 - DNA, 503 bp, Glycine max
  unsure (1)..(503): unsure at all n locations
  Clone ID: PAT_MRT3847_122780C.1
gcgagctgagcagttgccatggtcctgggatctgctgcactattcgtcttgagcctgtgtgtcactgagctgaccctccatgctgctgacacctgcccagaggtgaaggtcctggatctggagggctccaacaaactcaccatccttcaaggctgccctggcttgcctggagccctggggcccaagggagaggctggtgccaaaggagatagaggagagagtggccttcctggacaccctggaaaggcggggccaactggacccaaaggagaccgaggagagaagggagtgcgtggagaaaaaggagacaccgggccctcccagtcatgtgctacaggacctcggacctgcaaggagttgctcacccggggctactttctcactggctggtataccatctacctgccagactgcangcccctgaccgtgctgtgtgatatggacacagatggtggaggctggaccgtctttcatagaaggatcgacagcacggtggacttctt

SEQ ID NO: 25226 - DNA, 238 bp, Glycine max
  Clone ID: PAT_MRT3847_122781C.1
tattcacgatacgaacctaaaaaatgctgaccggcacacgtgtatccgcatgattatagacgatccgctttctaatcctccaaatgcactttcatacaaatcaacaatgagagagaatctgtcgaggcacggatacataatccctggaatcaggggaaaccaatggagcgatctgctcggagaccacaaaggcgaaagcgggaacatccagctgtctactcacatgtactacattgag

SEQ ID NO: 25227 - DNA, 493 bp, Glycine max
  Clone ID: PAT_MRT3847_122782C.1
cttgggggggggggggggggggggcaaagcaaatgctatgatatggaagaatacagaaataacagggaggtatatagcgcgatagataataaacttgtaactaatggtatggtaacacctgaaaaaatagaaaccatgatgtcgcgagcaaagaggggggggtgggaggaaaaaaaatagcgtagcgagtatgttacggagtagtagtggtattagtagtatgtctaataattgcatccaggctagggcttggtgttaaaaggctgcgaatgggcatcgggctgcgccaattacgccgagtagggcatgggttgcagatgcgcccttggaccggcaagcttgcaattaagaaagaaagcctaacgtaagctaaaacggcatgataaggaatagcagggaggggaagcggctgacaatagcggtgccaggcagggggcgtagtaagggcgaagggacaccatgaaggacagtgaaaaaaagaatgaacgaggga

SEQ ID NO: 25228 - DNA, 431 bp, Glycine max
  unsure (1)..(431): unsure at all n locations
  Clone ID: PAT_MRT3847_122783C.1
cacccgttcgtaagctaggactcctgtgcaggccgccgtttttttttttttattttttttttttttngggaccaaaaggagtatatgggttcaaccgacgaaaggtgaaatttacatgctaaaacacatgactgactaatccgaccctcgcatgacagcgtatgcctgtcaaacacatgctgaaacacatgactgtcaaaggcaaatgaaatgaactcttcataaaatgatatgtaaaaaatacatgcctaaatcaaaagatggaggatttaggcataagggaattgcatgtcctaggttatagatatgtgtggcctttaaacgaacagagacctggtaaccatagagacaaattcgcaaatgaccctgaagcattggctgatagaaataattattgaaaaggtcccaaaattcatctttgacttggggaa

SEQ ID NO: 25229 - DNA, 343 bp, Glycine max
  unsure (1)..(343): unsure at all n locations
  Clone ID: PAT_MRT3847_122784C.1
taacattataatataaatcaataatagcatccgcaaagtattcgcatttagccaacgacaatcctgccaagaaaatccttccatcctttatcatatatacgtgccacttgttgagcgtngtgtcactctaattcttagtcaagccagtgaatgagaacatgcgtatgtgcttaantgtgaatgaccagtcctgtccacttgtgtgttttaaagtaatgctatgatatagctactggctaacattctttatcctgccagccatcattggcatctctagtgtgcattcattaaagagaactaggtgtgcgacaacatgcgcgagtatgctagccccgtgtgccgg

SEQ ID NO: 25230 - DNA, 405 bp, Glycine max
  Clone ID: PAT_MRT3847_122785C.1
ctgctctagacatgcctatggttattattgcgatatcaggagagtgggaagatgctgccacaattactgccacgacgcatgcagctgctttgactacatgcgctactccacaattgccgccggcaactctcaataacgcgagctttgtcgttggataagggccgcaatcttgtgcacagaatgagcacatatcccatatactcacaccgattgaaactagagcaactacagatacgcgagctcaatatcgatccaatcaggccacgaggtgtggtcctaatagctgtgctatctggcttacgtcggcgcaaatggatgtgcagcatgggaactaccgtactgctaggaaattgcatgagaaagcctgacacgctagtcctaagaattggtctacttggactgtat

SEQ ID NO: 25231 - DNA, 260 bp, Glycine max
  Clone ID: PAT_MRT3847_122786C.1
acgacagaagggggaagatgatgaggaaacattggtagaagaaattgaagagagagagagagagagagagagagagggttggattggttttcttcttccttgtctctagagagaatctaatctcaatcctcattagagatttcttcatgcctctctcagtcttttctgttttccccctttgacatcctcgttttcggcgaaacacaaacaactaagattttatgtatgttctgtctttatgctcgctgttgttatttgac

SEQ ID NO: 25232 - DNA, 1064 bp, Glycine max
  unsure (1)..(1064): unsure at all n locations
  Clone ID: PAT_MRT3847_122787C.1
tttttgaacaataaacaattgatgatattaagttataaaaatagccggaaacttacaacaaagtatatgtggacccgtattgttgtaacatccacaaatttgggcttctagaagccattttaaaacgcaccttttcagccacgtcagcatttgtcattttttttcacactttcttactttaacagaccccatacagttacgcacccataccttggggcgtgtgaaatgacgcttgtacctgtaaatctctctgattcttacgcatctccgtcggagatcaattcggcttacccgagccacccaaacacggttctaacatatctcattccaatttcgcccctcgccggaaaaagaaaacctcaccgcaacgttcgattcagtttccgatggcgccagcgctgaacctcgccgccggaggaattccgctgagtttctcttcctccgtcgaccgctccgccagctttccccggcggtactcggtccgcgccgtcgcggaggaggcggtggagacgcggcggccggcggcgagcctttacgatgtgctgcgagtcgagcgagacgcatctccgacggagatcaagtcggcgtaccggagcctcgcgaagctcttacatcccgacgcggcggtgcggcgttcgccagagacagacggagacgtcgacggagacttcattcagctccgaaacgcgtacgagacgctgtcggatccgtcggcgagggcgatatacgatatgacgctggcggcggcgcacggcggaagacaccgccggttttctacttcacttattcggaaccactcgtcggcgtttacacaacgcgaaggtgggaaacggaccaatgctggtagaggaattagcaaagaaaaatgtggatttgttaacaagaaagaggaatcgccgaatcggtgaaaacgatgtcaaaaagagtgatgagaatcggaaattactaacttagatggatagagcaaacaaagagagagagagagagaggatgaagaagcaaattttgcttctctttttgtgagaatgtaaatgatttttttttttaaaanaaaaaaaaaaaaa

SEQ ID NO: 25233 - DNA, 410 bp, Glycine max
  Clone ID: PAT_MRT3847_122788C.1
ggaagaatgaaaaaaaaaatgaaagtggaggaatgaaaaaaaaacgaaatagagtaaaaaaagagtgaaaaataaaaaatgtttggttgaaataaaatagagtgaaaaaataaaaatatttgaattaaaattggttgataggtaaaaaaaaaaaacatgtgcattatttaactctattcaccgtccctcttctctctatttaaaaccttaagatatttattggctattgtatgtaattttcatgtcggaaagaaatcttaaataaacacttcaacaatcgtattgatataggacatgtctaaaatgatagagctaatgtttttgtagccacttttacttttttagaagaaatgcaatagggaaaaaatcaagaggtctaccgttggaaactagaaatccgatgcaatgat

SEQ ID NO: 25234 - DNA, 229 bp, Glycine max
  Clone ID: PAT_MRT3847_122789C.1
ttatatactacagatgggggcataaaagagaggtgaggtgaactcccgtggtttgtggtaatgttgcatcgacacgtatcaactacaataatcgcatcgaagaagcagttttcggagcatatcatcgtctacgaaaatgaacgtatcatatgtctcgaagcatattcaacacatggtgcggatcatccgtcaggaagctgctgaaaaagccaacgagatctctgtctcc

SEQ ID NO: 25235 - DNA, 1491 bp, Glycine max
  Clone ID: PAT_MRT3847_12278C.1
tgacagcaaaataacagtcacatgatgactcgttacaccctaacgaacgaaagacctcgacaattcttctgatccgtttcgttcagatcaaaacttgcctctttgcaacgctgcttctgacaaaaaaacgttgtaccatccgaaatgtcggacacagtggaacatacagatcaaagagctgaagctattccccaatccacagctacaccaaattggactattcatgtgtcagacataagaacagttaaggttagcaacatatcattggttacttccaagaaggacattgaagaattcttttcattctcaggtgatattcgatatatcgagatgcaaaggtcagagtcagagcacctggaaagtggtcacactcaggttgcttatgttacatttaaggatacacagggagcagacacagcagttctcttaacgggttccaagataggtgatctatatgtcaccatcacaccagtggagaagtatcagctgccccctgaagcacttccttcaagtccaacaaaccaaagccctgatgcagttaagaaagctgaagatgttatgagcaccatgcttgctaagggtttcattttaggaaaggatgctatcaacaaggcaaaagcctttgatgaacgtcatcagttgacctcaaatgcttcgtccacagttgcttccattgatcgtagaataggtttaagtgataaactaagtttcggaacaactattttcaatggaaaggtgagagagatggatgaaaggtatcagctttctgaaatgacaaagtctgctatggctgctgcagagcaaaaggcaaatagtgctggatctgccatcatgaacaattcttacgtaataagtggagcttcatggttttctagtgcctttaccgctatagcaaaggcagccggggatgtcagcacgatgaccaaggagaaggttgaacaggcagcggtggaaaggaatgagatcatttatagtgaaaggaaagggactgttgatgaatttgcaaagacgcacttagaggaggcttcagacattggccctgcagtagttcctgttaattcagatgatgaccgaaatctggcaacaattttataactcaagttaattcagaatcccttattcccacatacacagttggatttatttagttaacatagttattgtcagacttcagttcctgcaagtttgttgtacattgataagtcttgttgattgttatagtgatgtaaaggtttgtctgacagatgtggttcctaaatatggtcaacattcatttcaaaaaattatttgttatttgttattttttgagttatttcttcattcagttctccctttaggtcatatgttttcagagagattttaatacaaacaggacgatcagtataatttaatattgcagaacattatgtcatcgagagcatgccagataaaaaaaaaaaaaaaaaaaaaaaaaaaaaaaaaaaaaaagggcggcaaaagactagtgagcta

SEQ ID NO: 25236 - DNA, 415 bp, Glycine max
  Clone ID: PAT_MRT3847_122790C.1
tcgacaaccattccatcaagtgcagtgggaaacatccttgaagaaaaccatactgttcctggcaaacttttagggcgtaaaaatgccctaactgaagaggaaaggggctctcagcctgtccaatcaaattggcagattccttttgaagacaatacaggagaattgcctaattggggcttcacccaatcattgggtttggaatttggatctgattatggtgctagtttactgggggatgtaactaataatgcaggcccagaaattgttcctgagctgttcacttttaatggtgagttaaaagagcagtctgtgcaccaaaacttctcaaagctgtatacacatgggcaatctcaacctacactgaaatccaattctgaatatgaagttcctggtgaagcaagtatcaattatgcct

SEQ ID NO: 25237 - DNA, 263 bp, Glycine max
  unsure (1)..(263): unsure at all n locations
  Clone ID: PAT_MRT3847_122791C.1
cctctctattcccatttacttttaactccaccccacatttttttntctgcttcttcacngtccacaccacaagtgcttngtttgtttagttggtnacttgcacatnacaatncaactttcaccacatnnaancccangacccaagcncaaacccannaaaacacagncanaanacancacaacacaaaccnttcagtttctccttcatgggccctcctcacatcccaacntanaaacnccattctccatcgcttcaccaccct

SEQ ID NO: 25238 - DNA, 2670 bp, Glycine max
  Clone ID: PAT_MRT3847_122792C.1
gcaataaaataatcacgattcaagagacataaaggttggaacaacaattgcaagcgatatgaactcgatgagaatcaggtatgaactggattagaatcgtgtttctagatccaagcaattgctttaattgtaataaacaaatgggttgaagacccgaaaggcaaacagaattaacagttaactacaaatggtaattgcagggacatcctaaactgttactaaatcctagcgcctagtcctagccgggtcaattgagcaatggattcataaatacataaaatgtcatgttaaataacaattaaacatctattccacttgctattgacaattcttctttgctgaatgaccagtctttcgcttatgacgactgaaatcagaaacaaatctgaatgtttgtccacaatctggctcagcacatacataaggtcgtgcaccagtgtggactcgaatgtgctctgtacgagcccatgcccacttgaaagtcatcttgcatcccttccaagggcacttcaacgggcgctcatcctcatgaactcgacgatgctgcaccagatacttgtgtgaaaaaaacttcttcccacacccttttacagggcagatgtttctcttatgatgcatcagctcctgttttgacccaaaactcatagtgcacccatcaatatcacactgatattctgcttccccatccttcattttggcatggccaaccgaaacctttgcagctgcagcattcttcaccttcatcctttttgtttgcttgtctttcaattttccctcagattcctgagcttttgtggctctcttcctaaggcgtgtgctaggtccaccatcttcctcctcttccatatataaactaaattcctgggtgttattagattgcttattccgcaaatgagcaggctgttttatttgctgaggagcctttgatttcacaagcaaccgagagccctgttttatgggccgagatgcctgctttttcgcttggaaggaattagcttgtttcagaagtgtctttggtttagcttgtttacttcgaagtgctctcctcagcggctgatcatcttccatttcatcatctgaattcatatcatcttcttccatgcatttagcttgcttccttttaggagttctatgcagcagatgagaattattctcagctaagtcatccatgacttctttctcagtgtgtttattttgcctgctcttaggaaatcttctatgctgcttcagaaaatggtcctccaattggtcatcacacatttcgtttttaacctctctaacaatgcctttgttttgccttttcctagagaaatttgtttgctgcttctgacaatgatcctccaattggtcatcaggcatgccatcttcccctgctacacatttggcatgtcttcctctagaattctttctctgatatctacgataatggccctccaattggtcatctgatgcaatatcctcttcattgaggtatttggcttgcctgcttttaggattcttccgttgctgcttcttctttttatgctctagttggtcatcagatattatatcttttccagtaaggtatttgccctgcctgcttttaggaattctcctttgccgcttttgcaaaggactctccatttggtcatcagaaattatatcttcttgacttatgtttttggcatgcttggctctggaattcttcctaagcaactgaagagaaccaacatccaaagaatcttctgaaattgcatctctctccgtatcttcaacttgcttgctgctaagttcttccctctgctgccaatcagaatcatagtccatcgatcatttgaaaccacatcattgtccataaatttagccttttcaataataacattcctcctttgctgcatgtgatcatcatcatcaagcgaatcatcagaaactgcatcactttcagagaagtttgtttggttgtttgaaggttttcgatgatatggaggacaataaccccctttcaaagcagcacggtctctctcaacatacctgactttcttatttctaagaatgctccttggtggcaagttgtgtttatcttcagtggaattatctgaaagtacatttttcgttagcataacttcctttcttgaaccgtccattctctgctgtcattttccttttcttacctgattttctgctagtagcttcacttttgagggtaatttctgatctttccaatttctcatcaggtaatatccacccaattaagagtttctcatcctcaacatcttcaaaatctctttttgctaaaaggggatggacctgattggacatccaaactttaccacaccatttcccagcaacaatctttttctgcctgttgacccttctttggtatacctttggctctacaggtgagcttgctggagagctacaaccaaatgcagagtatataacagaattgtaaggcatctgcttactataaagaggagaacggctaagatttgcgctataaaagagattgattcctagctttacagcccagtcaccattcccaggaatagcttcctcactatccagagctgactggatcttctcctcatcctccttggaagcatgactgtattcaatattcttccacatgtaatcaatacccaaatcttctgccaccatttttgcctcagcctcttcttggcggacgcgtgg

SEQ ID NO: 25239 - DNA, 251 bp, Glycine max
  Clone ID: PAT_MRT3847_122793C.1
cactaagacctgaataggggatcgagaagcaaggaatctattctttaaacaggcatgccttcttttaatcatctccttctgcaccatctatcacctcctccttctctttcaaaaccatggaagatttgaacacgattggcgctgattgtgtggtcatatcatgctgctgccagtgcttgatgcttcaaattcttgtatttgtgttgctgaagcttcccgggaagttgataaggaaaacaagagaatatgct

SEQ ID NO: 25240 - DNA, 621 bp, Glycine max
  Clone ID: PAT_MRT3847_122794C.1
atctatcttttcttcagccacgccgcgctctctctctctctctctctctctcggctcagatccactccacgccgatcttcctcagcttcaatcgtttctctctctctctctctctaatcgcaattcaattctccgccaaaattgaattatgagtctcatcaactctccctcacgggtgacggttggtgatgctaattacatggactggggtggtgctggtgctggtcttaacaatcactacagaactacttacaaagacgaccaaaaatccatgatggaggtggcactcatttcaaacatggatcctgtaaatattgggctgggctgttcagataagccagctcctgttacttcactgaagccaagaaagaaaacaatgacatcagtgtatttgaagttctttgagacagctgctgatggtaagactcggagatgcaagttttgtggacagagctattccattgcaaccgccacaggcaatttgggaaggcatcttgctaatcgtcatccaggttatgacaagtcaggggaagctgtcagcaatgcagcagcacgacctgtcactgtggttaagaagtcccagcctcatggaaaagcaaaccaagtggattatgatcatct

SEQ ID NO: 25241 - DNA, 1132 bp, Glycine max
  unsure (1)..(1132): unsure at all n locations
  Clone ID: PAT_MRT3847_122795C.1
ccacgcgtccggatccactgactctgtttgttttcgagttttcagaagtcgccactctcactttccttccttaataactgggtttcgtttcaacgtcacttcacttctacactgtgcgcccggccaccgagactgacttcaacaattttttttctgtgttgagcaccggagcagcgttttccggcgggttttggtggctccggttgatgacgtggtttttccgtgaccaaaatccatctgggttttgggatcattgacatgtggaattgagtcggtgactcggtggagtagtgtgacttgtgagcgaagatgttcagatggaagagtgagagacacagggtcaaagctgttttcaaactccacttccatgtcacccagatggtgcaatctgcggtggatggtttggtgctgtctatagttccaggggacattggaaaggtaactacgaggttagagaaagcagcagttcgtggtggagtttgtagatgggagaatcctgtctacgaaacagtgaagtttgttcgggagccaaagattgngaaattcagtgagagattatatcattttgtggtttcaacggggttatcaaaagctagctcctttggggaagtttctgtggactttgctgagtatgctgatgctacaaagccctccactgtctctcttcccatcaagaattctcattgtgatgccgtcttgcatgtatccatccagagactacaagaaaataatgataaaagagaggaagaggatagtgaagatgccaaactaaaacccaatgatagaagtttgaggacctacttaagcaatggagagatagatgcaaactctaaaagtgattcttctgaagatgtgtctgccaaagcaaacaccaatggagctgcattgagtgctgattgtagaacatctagtggatctgacattacattgtcaagttctgatggcagttctggacttgatactccgcgagaaaatggactaagaaatggtggcatccaccccaacaacaatggttttccttcagacgtcagtcacccttcagagccccaaaaacctgctgtaaatgcctctgcagtaatgtatgatattcatcagagatcacaatgtgactggtcagctcgctcagaacaca

SEQ ID NO: 25242 - DNA, 228 bp, Glycine max
  unsure (1)..(228): unsure at all n locations
  Clone ID: PAT_MRT3847_122796C.1
caccanncctcataccnnntaccttcanngccatcgcnntgactttcgtgcttcgactaatgaagagtaaacccttctctgaacaatgcgcggcaccataattatatctctcgtcagacattaaccagcnnatttggtgcgaaataacgaagcaagcnncccaaccgtggaaaaatgaaaagaaatgcccttcttcaactgtgnnngtgcaatctttcgcaattgaag

SEQ ID NO: 25243 - DNA, 529 bp, Glycine max
  Clone ID: PAT_MRT3847_122797C.1
atacttttattatgacatactctgaaacaagcgaaaagaaaaatacataatacagaaagactgaaagaagatgcagagtaatttcacttatttgccaatggtcaattggcaacttttttcctgttaaaataaaaagtatgtttcctgcctatatttctgcagggaatttcccctcttctctttctttatcccattcagcaatccattcggttggacagaaggacctaaaatgcgtgccaagtttctcgcaatcggttgccttttcgcccttctgctgaatgcatctgttatactccacatattttacataacattgacgcgttttataatcagtactgtttgctaattctgcaccgttttcagctatgcttggcttttcatcctttttgttcctcttggtatcaatactgtgggttgaagagggaggagggggtggagaaacggtgccaaattcatgagctggccttggagcttgttcaccccgagccactttgttcacgtctctggctctcattttcggacgcgtggg

SEQ ID NO: 25244 - DNA, 362 bp, Glycine max
  Clone ID: PAT_MRT3847_122798C.1
ggaggaagaatgacgacaaagataactttagataaaatgaatagctctagcaggggtctgctctctgaattaatcccgacacgcgttcatgtctgcaaaacatttacccatcactgtcttcgcccatgatatgaatgctttcggtcatggcgtggatgctaatcagataacaaccactcttaagtagtgaccgcattcgatcagatcataaatagtgtgtcactactctgatacaccaactggctatggtgttagcgtagattcgtatctcttgattaggctactcctgatactggtggcacatcaatgcatctgtcgcaggaaaccactgttaccaggtagctcaatggcctatacacatg

SEQ ID NO: 25245 - DNA, 476 bp, Glycine max
  Clone ID: PAT_MRT3847_122799C.1
gcgtttactttgctttttagaaagttagcagattgcgattgtttcaagagaatctttaagcagatgtctaatgttgtgtgggtggctcctgaggacaaggggagcttatggtcacaacttcattatgttccttaggataatatggaaatgcaagatgcttatcttgtcaatctcgaaaatgtgttacgagaattgtcatttgcacattccagaggatgctcgccaattgagaagagaaagctctctatcgcacttgaatggctgcaaaaagctgatgtgcctaccatagcacagattgaagagttccattcgatgcagaggatgatgcatgctcctgtttcaaatgataatattgatctactgttgagcattgatttgctgggtttacaaggagccatgtaagtttttccaaacaagattgtatgtaatgataatcttgtgatggctaacacacaagaattctttgatggtaatta

SEQ ID NO: 25246 - DNA, 451 bp, Glycine max
  Clone ID: PAT_MRT3847_12279C.1
ccaaaagcttattttaacttgcacataagttcaattcatttttccttcttattttcttctcttgtaagtgcttgttgaaaagtatatctaaacggggccaaataattggttgtttttttaacatgttttgttgtattgtgttttttatggttcacttttgaaaggggataaagaacatgcttgtgcctaatttgaatcttgcacagatgatttgttggagatattcttgtttggttgggaatttgtgacgttgatgtctcttctcttgctttgttgtttgtcttgatgttgttggcttccccgagttatactgttcaatgcgctttcgtggaattattactatttattactttttgttgcgtataggaagttttaagggattagttattttctttctgaatgtccttggtggttggcagttgagcacttcagtgtcgttctccaagcaagt

SEQ ID NO: 25247 - DNA, 1144 bp, Glycine max
  Clone ID: PAT_MRT3847_1227C.1
tttcacagtggcatttgctcgtctctaatgttgcacgttttaattgctgataaagaatgattctgaaaacggttacagcatttgcatgctagttaagggttgtaattcaaatgttttatgtgccttttttgtattgcaggttgtcaattattgggcagggaagggaatatccggatttacagtttacaagtttagacttaggaggcttgaagggcaacctacattaacccaaatcaggtatattttacttatggacgtgtacctcaaactctaacaaaaatacgaggattggtttgtgaggatatcactgaaggtcaagaaaatatgcccattccggccaaattagggtgatgccccccctgttcccccaggcaagttcaataaggggtttgcaatatatacatatatatagtgatataattaatataattagtttttatttttcattcaatcgttgattgtcatggtttcgaattcggaaagtctctttgtatatgcaagggtaaggctgcgtacaatgaccttctcccataccttcacatagtaaggagtcgtttctggcacaggggtttcacatattgtaagtttgttaaggttgcaaaaaatgtgaagcttcccatgaatgccactggatgcgaatgtaaaggcatttgtaatgacccaacaacctgtgcatgtgcattgcgtaatggctctgattttccctatgtatctcgggatggtggcaggttagttgaagctaaagatgtagtatttgaatgtggtccggaatgtggttgtgggccaggttgtgtgaaccgaacttctcaaagaggacttagatatcgtctggaggttttccgtactgcaaaaaaaggatgggctgttagatcctgggattttataccttctggagcacctgtgtgtgagtacacaggattacttgccagggcttaatttgttcaaaacattttctgttttgtgcctttgttttacatgaatttctgtttatttatgatgatgtcaagcattgatgcaatgataatgttgtcctccatgatttacatttttagtggaatcaaagctgtaattttttaaccttgtgtcaatttttattctatttttaggatgcaataaatgatctaaagccccccctctgtcgtct

SEQ ID NO: 25248 - DNA, 523 bp, Glycine max
  Clone ID: PAT_MRT3847_122800C.1
gttttcgtatgcttaaaatgctgtggtgtgcacagaagtcttggctctcagatatcaaaggttttatctgtgacattggatgaatggtcaagtgatgaaatagatgcaatgattgaagttggaggaaattcttctgctaattcaatttatgaggcttattttccagaaggatttacaaaacctggaccagatgccactcatgatcagcgtgtgaaattcatccggttaaagtatgagcatcaagaatttttgcaacctagtttgcgcattgtgtcaggaaaaagcaaccccccaaaaagtatatccaaagggattatggatagttttcgaattacaagtgattcacagcatatggaaggaatggtagaatttattggaatgttaaaggtgaaagtgatcaaaggcacagatttagctatcagagatatgatgacaagtgatccatatgttatcttcaaacttggccaacagactgttcagacaactgtaataaagagtaatttgaatccagtctggaatgagg

SEQ ID NO: 25249 - DNA, 476 bp, Glycine max
  Clone ID: PAT_MRT3847_122801C.1
ctttttttttttttttttttttttttttttttttttttttttttttttttttttttttttttttttttttttttttttttttgttaaaaaaaaacctacaacaaagggtagagggaaacaaaaaaaaccggggggccccaaatcggggagaaaaaaattttgggaacaaaaaataccaattaaccggtttcaaggggtaaacccacattcccccatccaaaaacccaatataaggtttccagaattaaaaacacccaaacattcccggttaacatttaaaagaaaaaaaaaaaaaaagggacccgaaaactatgggaaaataggaaaccctacctaacgaaaaaaccgaccccctaaacaaatttaatcaatccccctaacgggcggatttaaaattggatttgaattattttaggggagcaaaaaaggggagggcgggaacttgccctggttccttttcgggaaaacggccatgg

SEQ ID NO: 25250 - DNA, 481 bp, Glycine max
  Clone ID: PAT_MRT3847_122802C.1
ctctgttccaaaaccctaatccttcgtcttccaaggagatggcaagttctctgtctcaaacctcaacaacgctcttcactttcgtaattcttccttcaacacaatctaacacttttataatttcactttgcaggctgattctcccctcgcaaggtaaaccctaaaactctctttggattcgatattcctctcgcgcattcccccaatatgcctcggccattgataattggcagatctgagttcacgcatgcatttttttttctaacatgatctgcgatggacgtttttttttttgttttattcgtacttttatggttttataaaacaaaagaaaaataaaaagaattcttaatagttttaatgagaattattggtttcatgtgatcatttgaaggaacgtgtagtcgtgaattaattgtgttgctgtttgatggaaagtgatcactctgagttttagatgctgggttaatgaagccatgtt

SEQ ID NO: 25251 - DNA, 296 bp, Glycine max
  Clone ID: PAT_MRT3847_122803C.1
ggctcgagcgttactgcacaagggtcgcgtttctatgtttaaggtggttcgtgtgattggagcagggggcgctgttgccttatggtgggccctatatgtacttgacaaactgtataccgtctatgccacatgagcagacgctatggatgaacaagtgacgggacatgcctacgctatggtatgagcgagtcatcgactgcagatctatgctacgggtctggccgacttatgcttaatagacggtgccgtacgtggctgctctgatgttattgatctggcaagttcgatcatgctcg

SEQ ID NO: 25252 - DNA, 444 bp, Glycine max
  Clone ID: PAT_MRT3847_122804C.1
ggctcgagctcttaagatcttctgccataaacctccaaacccttctcttatccattgctctctttggccactgagatcatagacacaactctgccatattcaatcttttatttgcttttacagctatatttgtttctgaatcatgccacacttttgaagtccaaacgcattcaactaggattttcaaggctgtatatacataaattcagctactgaggtcgtgtgctagaagcaaaatcaagaacaatttgatctttgttcaatttggtggatcattgggctgttgatgtgattgtgaagcataagatgcttttgtaaaatataagggatttccaaatgatggttagatcgtgttggaagcctattgctgatggtgatgaaagagatgggagtggagaggtgatggacttctatggtacaaggatttggggaaccacctttatg

SEQ ID NO: 25253 - DNA, 562 bp, Glycine max
  Clone ID: PAT_MRT3847_122805C.1
cagaaatccattcactgcatgaacatgaaacttaaggccagcagaagatgtcagtacttcctctcttcagatccctatagcagtagccttattcaacaaagagcagtatatggactaggtttaaacaaacttggtaaggcaaatacggctcgtgttcattacaagtctgaggagcatgatataacagaagcaaagatggatcctctggaatcaactgaagggacaggtgaatccattctcctggaaggaaatgttccacaagtatcttcttggtggcagcagtttcctaagcgatgggttattgtattgctatgttttgcagcatttctgctgtgcaacatggaccgtgtgaatatgagcatagcaatacttccaatgtcacaagagtttaattggaacagtgcaacggttggcctaattcaatcatcttttttctggggctatctacttactcagggtgttgccatgcctgctatgaataatatgctttccaagtggattcctgtttcggagagaagcagatcacttgccctagtatatagtggcatgtacctaggttctg

SEQ ID NO: 25254 - DNA, 708 bp, Glycine max
  Clone ID: PAT_MRT3847_122806C.1
caattacaaaatcaactgagaaacatacttgccggtcaaaaattcttacttgtcttggatgacgtagggaatgatgaccgtcttaaatgggttgagctgaggaatttaataaaggtagggggtgctccaggaagtagaattctagtgactacacgtattgattccattgcttccatgatgggcacggttgcctctcacaagttacaacgcctttctcccgagaattcatggtctctttttgtcaagtgggcctttaagaacgaaggcgaagaggaaaaacatcctcatttggtaaatatcggggaaggaattgtgaacaaatgcagaggggttccattggctgggagaacatcggggagttcactattttcaaagtttgaggcaaatgagtgggaatatgtgagagacaatgaaatttggaatttgccacaaaataaagatgacattttacctgcacttaaattaagttatgatttcttgccctcctatttgaggcaatgttgtgcattgttttcactttaccgaaaggattatgaatttcatagtgtggaggtagctaggctgtgggaggcacttggtgtccttgcaccaccaagaaagaatgagacaccgaaagatgttgtcgaacagtatctggatgagatactggcaagatctttccttcaaaatttgtcagtttgggcctatgtatcaatctaaatgcatgat

SEQ ID NO: 25255 - DNA, 343 bp, Glycine max
  Clone ID: PAT_MRT3847_122807C.1
atttgttttgttggaagtttacctttttgggctcgctctgttttaggaaacccctcgggatgccttgttagtgattcctaactttgttgatagaaattgggcgtccttattggctcgaaagtaaaaactgagatttttgacttttgcccgaggaccactggagaaggatgactgacgctcaggctttacttgtttcacgggagccaatccaaaaaaccgctctaaataattgtatatacccttccaagctttttttgttttatgtgcgtgcctaaaatgaagaacgacgcaaacttgtttgctcttgcgaaagcattgaccgaagacctgctttttaccttac

SEQ ID NO: 25256 - DNA, 209 bp, Glycine max
  Clone ID: PAT_MRT3847_122808C.1
taaatggcaagaagcatcagagagcactgggcatgtctatgcgtgttgaaagggcatcacttgaacagctatgcaggcgcttattgatcttcacgtggaggacaatgcaaccgcgacgatacacaaggtataagaagttcaataacattttccctccatgagtgaatgcagatcgatcaaattgagaagatgactacttcaattgaaga

SEQ ID NO: 25257 - DNA, 242 bp, Glycine max
  Clone ID: PAT_MRT3847_122809C.1
cttgggagaaaaacaacagctcatttactaatgtaacgtgcacttgtgacaatgtttttgttttccaagttgatctcagaagcacctaatatcgtaccgagtgatctttaacttttcattgaaaagtatccctacgagaatacaaaaacctttctcttaaatgtgttccctcagtgcgtaaatcgctgccctccaaataggcacaagtccactatgttgaggacatgaatcattaaaaataa

SEQ ID NO: 25258 - DNA, 419 bp, Glycine max
  unsure (1)..(419): unsure at all n locations
  Clone ID: PAT_MRT3847_12280C.1
ctctttcctttgaattgtaactttgccggtctctactgcctcgtggctccgtaaaagatggtgcgcgggcctaagaagcatctgaagaggctcaatgcccccagtcactggatgctggacaagctgagcggcatcttcgctcccaagccgtcgcctggtccccacaagcagcgcgagtgcctgcccctgctgcttatcctgaggaacaggctcaagtatgcgctgactggcaaggaagtgcagtccatcctgatgcagcgcctggtgaagatcgatggcaaggtcaggactgaccacacctaccccgtgggcttcatggacgtgctggagattgagaagaccgacgagcacttccgcctggngaatgacaccaagggccgattcgacgcccaccgcatccccaaggatgaggactcgta

SEQ ID NO: 25259 - DNA, 479 bp, Glycine max
  Clone ID: PAT_MRT3847_122810C.1
acgcgtccggttatagtaatacccaaccaaatggcttttacttacaattactgctactatacttggtagcaggaagcaccctctccaaggcaattaataaagggtgcgttggttcacactttcaagtttcagagagttagaagagctcgaccaattaaagaccattttcttttgttttcgccgaatgagttactattactacgtaacattagttaagttaaggataaggttgcagatcgttaaggtaccttcaagccaatcgtgcatcagatcaccgcccctcccgatcagaatgcagcctttcagaacttttcaaggatagtattgaaaaaacaaaaaccattccagttttcttttctgcgtatatagcatacgcatatatacatacacactgcatatctgcaactgagtgataaattaggcaggccgtgcgttaatttcttccctcttctttctgctgctattgatatgatgggact

SEQ ID NO: 25260 - DNA, 255 bp, Glycine max
  unsure (1)..(255): unsure at all n locations
  Clone ID: PAT_MRT3847_122811C.1
tcgcagttcaggagggatgagaacccgcgatcgcaggatgccgaaccttagccccggccacgaagcccctagatgttaatattctnganacggncgcacacgacctgcttgagggagggcgagaccgtaaggaaaaggaggacaccctcggggcaggccacagacgtgcagaaccaaatggtgtcgcaggttaggactatttggaaagactctcctatgcgacatacgacggcgtgccagatgtaaactcacgca

SEQ ID NO: 25261 - DNA, 427 bp, Glycine max
  Clone ID: PAT_MRT3847_122812C.1
tttctcttttttgggaaccttatcacaaagtaatgccttctactcaatgattcctgctaggggaatctcaaatttacatgtaagttcccatttgaccccctctagaaagatgaccctagaattcattatctatgggatgtcgaatgagtgaccaaatggcctatcccatccatgccctaaaagaaaaaaaaattgttgcgtgagagaaaacactaaatgcctaaattttgctatgctgcttttcccacacttagcaagaaaatagatgtactaaataaccctcaatcttatcttatgtcctccccccattgatgaacatctgcgtgttaccgcattttgccgcatgcccccctgaattaattaatgatgctcatgacccacaattgtatgaattccaccttctgtagcaaaatcaattttattcaga

SEQ ID NO: 25262 - DNA, 339 bp, Glycine max
  Clone ID: PAT_MRT3847_122813C.1
cgaaaaaatttattttaaaaaaaaaaaaaaaaaaaaaaaggggggtaaattaaaaaagagagggggaaaaaaaaaaaaaaaaaaaaaaaaaaaaaaaaaaaaaaaaaaaaaaaaaaaaaaaaaaaggggggggcccccctcttgggggcttgtccccccgggatttaatttcgggccggttcctgggggggtccccctttttcttttgggggggggttttaggggtgggggaaatcaggggcatgggtgtttcctgggggaaattgttttccgttcaaaattccccccaacatacgggccgggagctttaaggggaaagccgggggggccttaaggggg

SEQ ID NO: 25263 - DNA, 380 bp, Glycine max
  Clone ID: PAT_MRT3847_122814C.1
aggcggtgagggtggttggaggtgaacagctcttcagatctgttgagacttaagcaggaccgttgtctaggagagagaagccaaagcaacagctgggaaaaaaatagagtttctgttgaaaagttctagttattgatgttgaaagagagaaagttaagtacccaccccctataactaatgtacatgagggaaataaattattatgtttacaaatatatatgttattttcagtattaaccatatcttattacttcatgttatgttttgattaatggttcacaaataggtcctactgatttaggattagatttacagtttgataaccatgagagagaaagaaatatatgctatcagcctataacaattcttgtttaatggac

SEQ ID NO: 25264 - DNA, 442 bp, Glycine max
  Clone ID: PAT_MRT3847_122815C.1
gggaggaattccgaatttcgggcccctcaacttgttatgaaatcacattggaagccctttctcgggtcctaacttggataaaaattttttttgcctcagttggtgggcttttgccttcccccttattaaaattaccttttgttttttaaaaaatttggtgggctttttggggaaaaatggcactacccttttcgggatttttttctaaaaaagggatcttttttttgttttttttaaaaaaaccccccatcaaaacccttgttaacccttgggttttaaaaaaaagtttttttaaaatacctttttttacgggtgggggaataggggccagatttggaaataccccaatttggccccttttagaaaaaaaaaagatttcctttaatttcgaaacccaaaaaatttggttggggggggcgaccacaaaaattttaaatttttt

SEQ ID NO: 25265 - DNA, 581 bp, Glycine max
  unsure (1)..(581): unsure at all n locations
  Clone ID: PAT_MRT3847_122816C.1
tcgatctatcgctagaaatgtaccagatgccgtgcacacttgtgtttgtgtgtgtaaaagtcggtgtggtcaggggacccggggcggggctgctgcttgttcggttttttggtgtagaaataatctcggggtgtggtgctggtcgagtgaggtgggctggggccggggccggcaggtaaccttggtatactaggtcggctcctaggggaagtcagggagttaactaccatgcaagcaatgaagccacgtgaaaccgcccaaaaacaacgtgacgacgacgacgacgaaagtaggcggtgatcaactgttttgtccagatactaggcaacatcggacattaaatccgccaagtaacaaaggtacagtgctgctggatgttaatgctctgtctaaattggttgcagagttagttacaggcagacggtaggctagctaattagacggngaggaccggggggtggtgggccgggtaaggaccgggggctgctgtgttggtaaatgntcgtgggttcaagttgtgtgggcgcagcccggtgcggtgctggttgattctcagaacggtgtggtgcaactagctttag

SEQ ID NO: 25266 - DNA, 807 bp, Glycine max
  Clone ID: PAT_MRT3847_122817C.1
ttctcatgaacaaaatgcgtggattcgccactaacgtttatttgaggaaggcacgagaaaaaccaaaagagagtgtgtgaatcatgaaaataaggttgtgtgttttccttatttatagggaagatattagggggacgacaagggggttgttgcccttactcctacgtatcctcaggtgcaatgaggaattcagacctacataattctttaagtctaaatgtttgtgtgttacattggttttatgtttttgaaatattgattttaattttgaacaaaaatcgtttaaggctttggaccttgaaacgatgttttaaactttgaaaagcggagagaatcgttaaggcgttggaccttgaaacgatctcaagtgatgtttgatgaaaaaccgagagaatcattaaggcgttggaccttgaaatgatctcaagcgatattttatgaaatgaagaagtttgtgagttggttttatttgagtttttcttattaaccttcaatctcttttaaagataacttgcggcactaatgatcggttaaaactcactttacaagagaaaagtgattaccgatgataggagaagtagatgaagatgcacaaaacaataaagaggacccctaagggtccataaatcatgtccaaacccttaaagataaacactaaccggatgaagaatgaagaacgaatgaagaacggtgtagaagtcgattacggacgcaatttggtagtgcctcggccttgtttttctcttctttctccttcttctctctaatttctctcaatttctttcaatatataaaggctaaaacccc

SEQ ID NO: 25267 - DNA, 562 bp, Glycine max
  Clone ID: PAT_MRT3847_122818C.1
ctggcccccaaggacatccgggtaaactgcgtggttccaggaattctcaaaactgacttcagcaaagtgtttcatgggaatgagtctctctggaagaacttcaaggaacatcatcagctgcagaggattggggagtcagaggactgggcaggaatcgtgtccttcctgtgctctccagatgccagctacgtcaacggggagaacattgcggtggcaggctactccactcggctctgagaggagtgggggcggctgcgtagctgtggtcccaggcccagaagcctgagggggagtctaggcgatcattcggatctggaggcagagtctgccattctgccagactagcacttagggggcttactcatgctaggctcgaggaagaagaaaaacgcttacgcattctccttaggacttatctgcttgtaaatttggctgatccaattaacatgaggggttcttggtgtgcgactcgcgagctgaaggatattatggagctggtgcttcggaggaatcttaatggaaaggagtataagctcacgcctttggaggatatcagctccta

SEQ ID NO: 25268 - DNA, 318 bp, Glycine max
  unsure (1)..(318): unsure at all n locations
  Clone ID: PAT_MRT3847_122819C.1
ggtttgtatagagattttatacggtggtgggggggaagagcgcttgaaggcgtctcgtaagggtaatgagtataacgagggttagcatctggacgtgcatttgaggtagtcaagatctggtactgctggaattaaaagggagggaggtatgacgcgagattgttagnaggtattatgacttagaggggtgcagttataaagaaaggaaatgtagcttcgttcgagtggcttttgggtcaggctgggggactaaatgtgctaatgaggggttgcattggtattatgtgcaataactattgggactgtgtgatgattatg

SEQ ID NO: 25269 - DNA, 212 bp, Glycine max
  Clone ID: PAT_MRT3847_12281C.1
tacttgcgttattagggtttagtgagatagtgcgcggggtagtgacattacagtgtgagcataagattttcagagtcggcgcgtgatcttgccactactagggattcagggaatcgcgcacatcacttacaagtccataggctactgcatcatgcccccattggagtcggtcgatcctccccagaatccatacatggctagctggcctcgaa

SEQ ID NO: 25270 - DNA, 153 bp, Glycine max
  unsure (1)..(153): unsure at all n locations
  Clone ID: PAT_MRT3847_122820C.1
cactcnnttgatctctcgcccggccagccatcccaaccacatggttgctgagaagacataaaaaacggtgaagatttgctgcattggagctggctatgttggcggcccaaccatggctgtaaacgccttgaagcgtccacagaccccggtccc

SEQ ID NO: 25271 - DNA, 254 bp, Glycine max
  Clone ID: PAT_MRT3847_122821C.1
ggctcgaggggattctgctcccacagtttctagcgggttgaaggcaaggtatctgtccacctcgcaaggatggacgtcggctatgtcttggaggaggaaagcaaccactgctgatgacagggatctctggattaattgtccttccgcaagttgagattcaggccaatgatgatttgagactggttcctagatgacacatttagtgtagtctcaatgccagcggttttaacttatcctgacacctaaactttggc

SEQ ID NO: 25272 - DNA, 389 bp, Glycine max
  Clone ID: PAT_MRT3847_122822C.1
acgatacgcaatggacttaacatagttacccccacagagtacttttcagattcaacctaccctttctttctagctcctatttttttttcttcgctacacctattctttcttcttccaatcaattcgaaaaaatccaacgtcaactgctctactctaattcataggtttttttattggattgatcccgggatctatcgaaacaattgtatgggcatataaaaaaaaaaaagcaaccaagtcatcccttagcacaagcactaagtaagcaagctaccttttttttctactttttttctataagaaaaaatcacccatcaaatattgaatgactgagcactcaaatcctatcgcgagtcttgatacatagtatcttaagtcctttccacaac

SEQ ID NO: 25273 - DNA, 2137 bp, Glycine max
  Clone ID: PAT_MRT3847_122823C.1
tccagctctcctcacacgtccgtggagttaagccgggtcgatacgtaaatccagctagcaagtttattccatagaaatatttactgcaaaagtcacaacatacaaattgaatcttaacatctttaaaactgaacatatttcaatcaaatttgactaaaaaaatcttcctttcatattacagaagatcttatcagcataagattaattatttttatctcaatcttctgaacagtgtctgtctagtgtctaccaatcaacaactcagatggagaatgcagaaagtatacaaattgtcccaacgaacatacaaactataacgagccatccaactaaaatatgaagacaacactgtcatgaactctggacttctgattctgagcaacacattctgaaatccacattaagttcctgatctcctgttcccttaacctcatatatgcgaagaacacagcataatgaaactgttgctcaaaagccaagcaaagccttttcacctcctcctcgtagaatgccttgtcaagcatctggctctctccatatgatagcttagcaaaaatagattgataggggggatatttttccataacagcacgaacctgatcaatgtcctcgcagacagcaagttcctcatgaccatatgggtatagcaaaccaaaattagagtacaattttctacggtcatctctggtaagctcagtaccaatgctatttatggtaatattcacagcccttctatcagcctcaaaagctagaaggtcagacattatctcagctgtggcaccaccaagtttctgacaaaatctatagaagtcttcaaggtatgccttgtaaagagtgttcctcattatttcaatgttcatatcatccaagtcctctgatgtaatgcactcagagaagtatggagccagaggagtgtcaacaagaaccagcctgtaaagctcccgcatattctgagcaacagccagagtagcaatactgtcaaacatgccgagtggatggcatttttctagtaattcttgaacatctctctcatgcaaggtgccagtaacaatcaaaacaacattgtctatcatgtgaccatatgtgatatactctaaaaaaggttgacaacggttctgtggcttggcataacatgttcttgtaatcatcaaccagcttaagagtacacttctccacaatcgttgtggtatgcaatggagaaggctcgttttggaggtaaggaccgtactcggtggcggagaggtgcatcttgatgtcgtcgagggtttcgcattggcagaggttgttgtaatcggcggtggtgaggaggccggcgcggtggccgcggacgatggcctctaggaagccgccgtggatgttgaaggtgagagcttcgaatccgtacatttcggatcggatctgatgccggtttcggatctcgaaattggttgaaggaagaaagggaaccagacaaaacaaaagaaagaagatcagaacctcctcctccttcgggaaatttctgcacgaacctgatcaatgtcctcacagacagcaagttcctcctgaccatatgggtatagcaaaccaaaattagagtataattttctacggtcatctctggtaagctcagtaccaatgctatttatggtaatattcacagcccttctatcagcctcaaaagctagaaggtcagacattatctcagctgtggcaccaccaagtttctgacaaaatctgtagaagtcttcaaggtatgccttgtaaagagtgttcctcattatttcaatgttcatatcatccaagtcctctgatgtaatgcactcagagaagtgtggagccagaggtgtgtcttcaacatcccgcccgtgcagcgcccccgtatcctgcgcaacagcctgggctgccatgcggccatacgtgccgtgcgcttggcacgttgccaacggttctggggcttcgctctcctgcttcgtgccagcacccgtccaaacaacattgtctatcatgtgaccatatgtgatatactctaaaaaggttgacaacggttctgtggcttggcatagcatgttcttgtaatcatcaaccagcttaagagtacacttctcgacaatcgtggtggtatgcaacggagaaggctcgttttggctggtgccgaatt

SEQ ID NO: 25274 - DNA, 341 bp, Glycine max
  Clone ID: PAT_MRT3847_122824C.1
aggcgcttaattttctggccttcgggggcttttttatggccgtcctacctggcctaatttttcttcatcctaataattccgcccccttccttccccaatatccatttcctgggcttggaaggatgcctggggttcctaaggaggcccccgtttttttggatcagctcaggcagatcctggttgagttggcaaaggagggggatggggggcagtttcatagcccagggaccctccttttggctttggggggggaggtgggggaattgtctgagattttccagtggaaaggtgtggtttttttgggctttttctttttttatgtctttgttcggttttttttt

SEQ ID NO: 25275 - DNA, 146 bp, Glycine max
  Clone ID: PAT_MRT3847_122825C.1
ggctcgagctaaaattctgtgttctctggtcaagtggctatttatatttttttatctgctactgggaacggaaccagttctgaggccagagttcagctctcctgccacgatggactcagatgtcacagtacacactagggtcttgg

SEQ ID NO: 25276 - DNA, 581 bp, Glycine max
  unsure (1)..(581): unsure at all n locations
  Clone ID: PAT_MRT3847_122826C.1
cgaanattttttattttttttaaaaaaaaaaaaaaaaaaaaaataatttaaaaaggtttttatattttataaaaaaaaatattaaaaaaaataaaaaaaaaaaaaaaaaaaaaaataaataattaaaaaaggggggggccgtttttggggttccagtttttcttccccttgcttgcgacgttttactttttttttgggggcccctaatttcatttccttgcccgggtttttcccccgtcgggcttgggaaacccctggggttccccatttttttcgctttgcggcccttccccttttccccggttgggtttttaccaaaggggccccccccgttcccctttcccaccttttgccccccctttttggcttttgggccccccctttttccggcccttttgccccgggggttggggtgtttccccccagggtgcccttttcttttgccggcccctttgcccccgttcttttggtttttttcctttcttttttcgcccgtttcgcgggttttccccgtaaggttttaattggggggctccttttggggttccgttttagtgttttccggccccttgcccccaaaa

SEQ ID NO: 25277 - DNA, 545 bp, Glycine max
  Clone ID: PAT_MRT3847_122827C.1
tgggcggggggggggggggggggggggggggggggggggggggggggggggggggtgtgggggggctgggcggggtgacccaaaaccctttaagatgcgtgggtagtttaagaggaattagatattaggagccatgtggggatgtaaagtgtagttagactgaattgttatatagggatagcccatatgggccaaaagtttggcaaatgaagttgggttgaatggcaaatgagccactaagcgcgggccaactgcaatgcctttagcgtcctggggtacatggccagtaggcggttgtgcgcgcagggggtttgtaagggtgcttacgggcgggttaaatgggggcaaactggttaagcttgggcaagttcgacgttaagggccaggagtttgggccttaaccgacattgtagtacaactagcttggcataagagtgtgagtatgcaaagcgtaagaacccgtgtcaatggcccgcgcaggcggtgtacagagcttggggcaccagttggtattagtgtagtagaggtgggccggttggtggtgc

SEQ ID NO: 25278 - DNA, 193 bp, Glycine max
  Clone ID: PAT_MRT3847_122828C.1
tcgtcacaaccttcacttcctcacattttaatacttctcgttcaacactatatcaaacggctctttctttcttttccaaaaatctttcccttagaaagccataaagcaagtccctcccatgttcacatttttcttgaaaaacccctaatttatatttctactcttctctatctcattacaaaattcatttccc

SEQ ID NO: 25279 - DNA, 155 bp, Glycine max
  Clone ID: PAT_MRT3847_122829C.1
gtaaggctatatccaactggaattctaaacacgactgggattgactgagtgacttcgataattgccacagagtgtgtacaaactcctctgaccaacagaggatgccagcgggtggagggagatctgcccctgactgctcatgcgggatagacaca

SEQ ID NO: 25280 - DNA, 652 bp, Glycine max
  Clone ID: PAT_MRT3847_12282C.1
ggtcgacccacgcgtccgggtggtttgtgttgtggtggcggtgatcgggttcgttattcggcataaatggcaggtttcggaggccaggaaggaggagatcaagaggcttttcattttggccgcggaggaaactgccagggccgagaaagaggcgtcctatgagtacggcacggcggtttctgccgctccgaccaatctatgcgctgtgtgttattttcccgccaccgcgcgctgcgctcagtgcaaatccgttcgctactgttcttttgaatgccaaactgttcattggcgtcaaggtcacaagttagaatgccgtcctcccagcacaactcaccagagtgatggtgcaacgagtgatcttggcagcaaggtagtagagcaaggctattctggaatccatgttgggaagtctgaaagtgaaggcaaagaatgtaaaatagcctctgaaaggcccccaatttttgatatctgcttttctccaaaagtttcatctggaaaggatgcaaatattagagttgagtctcttgcagagggaaatataacagattctaattctgaattgtccagtaactcattttctggattctcagcttgcacgggttctagtgattcatctggaggttcctctgtgtgtgggagcgtgatgtggaat

SEQ ID NO: 25281 - DNA, 438 bp, Glycine max
  Clone ID: PAT_MRT3847_122830C.1
gaatgcaaaacaaagtctaaggtgctgacatcacagatctctatatgggagaaactgacaattcattagccctatatcagagcggcaggataatttagacgttcacacacacactttgtggcctcttattgagtggtacaacgataatgatgatcaggaaacatatgggagtaacaagggtactctacacattaaggtgccatgaaaccaggactacaagatattgttgcgtgccaaacttgacatatatgtacagagcaggagccatgcttgggaagtctgctctataccgaacaattatctgcagtcacctgaggaaagaagctgcactttatggcctcagaatgggagcgatcccatctgtttattacctaactcacttgcagcatccatgagtgaaggacttgaatattgctgacgagacaccttgggaaaaga

SEQ ID NO: 25282 - DNA, 316 bp, Glycine max
  Clone ID: PAT_MRT3847_122831C.1
cagcctataccttgggagaccactttataaaggtggtggccatggttacacttctactcatatttgacctgctgttggctctattgatgacactgatgcacattatggaagtaccggtgtctatggactatactccgataggctacaacgagagactactggtggctatgctagcgactctgtgtagcctcttgatatcatcggcggtccttactatggaaccaactccgtatacaccggtactggtacgagaattggatccacgggcggtatccgttatggaggcactggtggtactgattatggtaccactgga

SEQ ID NO: 25283 - DNA, 382 bp, Glycine max
  Clone ID: PAT_MRT3847_122832C.1
atgaaaaaattttcacttatatgaaaactatcgccaccgtgattgcacagtgttaactaatttttttaaacaacggaaatgttcctatgatagagacaacaatcaatctcgggggaagaactaaaggccttatgaaaagagagtattgaaaatatgtgtcttatgaaatcacactgccatttataaaagcattgttgatgctcacatcattctaacaccccacgtccctataaatgctatgacccaggttttggacaacatagacaacatacgagactttataccatggtccagcttatccggcccaaaaatcggattcgttgcctacttatacatcaacagaggtcttgctagcggggcacatatataaatgaccaaccca

SEQ ID NO: 25284 - DNA, 346 bp, Glycine max
  Clone ID: PAT_MRT3847_122833C.1
aacgcgactgagccacggctctaaataataatgaactggatacatgtaaagttgtgaccgtgccaaccgacaatccttataagggaagtcatcccaaaaatgtggctacattaagtaggtacacctagaagacatatgaagcgagggcttggcatgctgcatggggtcagggaggatcatatgttgatctgccttgtgacaagttaattgaggaggaacctgtatagtccacattttgtgacacacttatcataaatatgaccaagcgttattgactaggactaatgctgtccctcgtaacaggtccttcatgccatctgatacgccatccacacttgaaatattt

SEQ ID NO: 25285 - DNA, 265 bp, Glycine max
  Clone ID: PAT_MRT3847_122834C.1
ggggggttgtttttttttttttttttttttttttcaccaaaaaaagacaatgccccacttttttttttatacctcactcgaggttctgccaacccaatggccatagagaaaacctccaaactggcttgaaaaccttaaaaggccttattctttggcttttttcatattgggagccttcccttcaagaaaaaaaagccgccccaacaacctatgcctgcttggctatgggggctggaaggttatccttactagcaccaaccccctt

SEQ ID NO: 25286 - DNA, 211 bp, Glycine max
  Clone ID: PAT_MRT3847_122835C.1
gggcggcccttctttttttttttttttttaataaaaaaggccatggaatcctatatacaccttctagccagcagaaaatattatacaagggcagaaggcatcaccctcttccagtagattaggatccccaaaagaaggcctttacaagaccccgattgaacctatcgggacctgaacccaatgatttccaagaaacgctgtgactcagcat

SEQ ID NO: 25287 - DNA, 240 bp, Glycine max
  Clone ID: PAT_MRT3847_122836C.1
caccaaaccaactcacaataatactactctcaattgctttctctatctccactaaacaaaacaaatcgtctaaacaaaaacgcgggcgggtcacacactcccttacacactacactaaacacattaaaacacatcatttaacacctacatcaactcattctctctcttatcttttcaaaaaaataataacctcattaaatccaaaacttgcacatacgttctcactatcactctcacaaa

SEQ ID NO: 25288 - DNA, 341 bp, Glycine max
  unsure (1)..(341): unsure at all n locations
  Clone ID: PAT_MRT3847_122837C.1
gacgactgatttgtatacatgacatgctttgnctgagaagctgtttcatgggtcgtggtgcaatcatatgatctcagatgtacaagtttttggcaaattaccagctagcgctgaccagtgcagcaacttgatgatttgagattcttttcaatgacagttaatgattgcatgcgtgcacatccacactgacattaaaagcatgatcttctaatcttgttccattgatttgcacaaactaacctgtctaatttatatgttgcagatgatntttcattactctacatctatgttaatttgacaatgctacctatcaactggtggtttaaaagagagttattttt

SEQ ID NO: 25289 - DNA, 781 bp, Glycine max
  Clone ID: PAT_MRT3847_122838C.1
aattcgagctcggtaccccggggatcctctagagtcgacctgcagtgattttgagacttgagcttggagaggcttcttccttcttgtctccttcctcatgttgcttgtggcggcactattgacggtgtagttgtttgaggggttatgataccagggacgtccatgatagcgtggatgccatggtgtatccatgtttagcatagcattcattgatagtatgtctggttcggccatagtaggtgcaaactttgatgctctttccgacgcgaggagtttcccttcgaactctcatagtttttgttgtgatttttgttaaaagaggaagggaagcgtttgtccacaacattaacgaaactattttgttcttccatgggagtgggattcgaggtatgttgctctcatgttggagtaccatggaaaaaaccttgttgacagttggcaaaggatccatgagcaatacttgggagtggacaacaaagaacctttcatcaaggccttttaggaatcgtatgacaagatcttgttgatggtaagatcttgttagacatgcacaggggagtgacaggcctatagttatcaagctcttcccaaatcgactaaagctttgtaaaataatctcttacttgagtgggtattctacttgaatccatagatttcctcctgtagttcagcaatatgcaggaggtcaccctgagaaaaatcgttcttttaaatcattccaaatgtcaatggcaagatcaaaataaatcatactctgaaatagatggagacaaggagttta

SEQ ID NO: 25290 - DNA, 376 bp, Glycine max
  Clone ID: PAT_MRT3847_122839C.1
agagaacataacattcactcaattcctaacacaaacgtaacacaattaatctaccaaaaacagatcagtggcagagggacatatatggtgatggccaggctcaaattgtgcataaccatacactgactagacatagagttcgatgagagcgtagatgcaacagtaccaatagatcaacacacaacctctgagcctcttccaacgctgaatagctcaagtacacctctaactcagtatctctacctgcgaggagtataagaaccactgttaattataatcctaccttctgcaaaattccgcatttaatatagaccctatacactctaattctcctgcatgcataaaacactcatcgatgcacacccacatgactttg

SEQ ID NO: 25291 - DNA, 322 bp, Glycine max
  Clone ID: PAT_MRT3847_12283C.1
attataaaagcaaaggcaataaccggaattaaaaaatgtttacattgtgaaagcgcatttttgcagctttttccttgctatttatggaaggccttaggtactcacacggaattggaacgaagagaatgactccattttatactttagtgtccattgcttatgaaacccaggtcctttcgggatcgacactgtgaagaggcttcaaaggggggggaaatttttccaaaacccactctgaagaagaatctagtcacaaccctttaccggtttctttgtgcgtgaaatcgctagctttcgcgttcctactatttaaggtattatg

SEQ ID NO: 25292 - DNA, 147 bp, Glycine max
  Clone ID: PAT_MRT3847_122840C.1
catgggatgggggtactgaatctttcaccaaaaggggggcgaaccatccgtgtctaaccctcgtacatatctttcgtcgtgtgcgattgaaacttttaaccacgcattgctgttcccagtttaaatagaaggatcgcccaaataagt

SEQ ID NO: 25293 - DNA, 360 bp, Glycine max
  Clone ID: PAT_MRT3847_122841C.1
ggctcgagctcgagccgaattcggctcgagacaactacaaaggttgctgtatgagataagatcttgaagtaatgctaagtgcctaacacctgcagtgaacaatggcctctgcataagcatcctttctaaagccttcacttgctctagacaagtctgagtgtgtgaagggacatacacttcgtctaccttctgctgcatcaatagagagaagcaaccataccacacgatcaagcctcatcatcagagctggtatctatggtgatgagcttgtttagacctgtaaaacagtggcttaaccactgaagggtattatggccatggaagactaccatgcctcctgggagaagcgaatgcctttcg

SEQ ID NO: 25294 - DNA, 390 bp, Glycine max
  Clone ID: PAT_MRT3847_122842C.1
attattggaatctgccaatgcccccttaattaattaattatatgtttgtaactcgatctaactagctagtaaaatcatcatctactccaacgacaacacaatcctctcccgtttattaccaactacttcagcttgcataattctcaaccttaaaaacattatgttgcactgtttcagctcttctgtaaggtcgagcaacaataaactgtcataatgctggccattcataacctactactcctctcatctgccacattgacgtacgccacaattacacacaggaaaagaaaaaacgtctcagatgcaactgggaaattctggctgccctcagtggaaaaatggttggcaactgccaaaaagggtcccctttttttctaaactaaaatccaa

SEQ ID NO: 25295 - DNA, 158 bp, Glycine max
  Clone ID: PAT_MRT3847_122843C.1
tatggggaaagctgtgacggatcgcgggtacggattcgggattcgagggacgagccaggttttcttttttgtaccaaagagggctgctgactacgttaaacgggcagaaccatatcatatgaattggggaaattatggtgagggcaggacggacaaat

SEQ ID NO: 25296 - DNA, 131 bp, Glycine max
  unsure (1)..(131): unsure at all n locations
  Clone ID: PAT_MRT3847_122844C.1
ggtgttatcttttatgtaacagaggcccatgattttgtaaagccggtaagagacaacaaggtagggacggaggcagggaattangggattgacccacataacagagagcgacgttaacaaacatggctaaa

SEQ ID NO: 25297 - DNA, 132 bp, Glycine max
  Clone ID: PAT_MRT3847_122845C.1
cattgaagtggttcccatgccagaccaaaaaagaatgagcttcgtttgggacctttacaggcaacggtattcaaaccggggccgtggagctttacattattgagatttttgagaggaccctttacaattcac

SEQ ID NO: 25298 - DNA, 620 bp, Glycine max
  Clone ID: PAT_MRT3847_122846C.1
caacttttcaagtcctggaagggatttagagcatcattccgtgactgcacaggcaacattttcttcctcagacaaaactagggaggttagtgaggataagttgtcccccaaaccagcaacatgtattggtcttccagatcaggaaattaacaattcagagaagcagtcaagcatttgtgatgaaagatctgacaataaagttcaagaaattaagttggtgtcgaatctctcccatgatgttaatcatgtcaatacatctgaagcctgttatcctgttagagatgagatagttactgaaggtaatgtagaatctacaaaagagaaaaatgatttggaatcgtctttggatccaaatggtttcatcataggaaaggaccaaaatattgatatctcagaaattcctgatggtgcaggatgttctgaatgtttgaatcaggacataccagaagagaaccaatcatcatctctactgtcatctcctcaatcttccatcactaagaaaattgaagagctagaaaatggtacagatgtatctgggcgaccgagtcctgtatctgggtcttgatacatcattttcagatgatgactttggccctgggcactccagatatcaacctggt

SEQ ID NO: 25299 - DNA, 471 bp, Glycine max
  Clone ID: PAT_MRT3847_122847C.1
acgagaaaatttgcttctttgtttaaagtatatgtaacactttaaataatggctagtttgaataacaactagtttgaataacaagttattttaataaaaataaaagctagtacaatatttcataaacttttttttttataaaagtaacagctacaattttataaaaataactttttttaatttcaataaatatttaaagtaactttaatttacatcaattgtacataataggaaatattaacaattcaactacaaacattaggaaacggtaaaaatatatagcttctccacaaagatcatttcattcaatctttttttttcactctaacaacaacgctccaaaggcaaaaaaggaaaaaagttcctggccacctacactcctcaacaccaacccatgtgccctccaaacatttaacaaatgatgtgcatcgtcatcgccaagttgtgcccatgatgtcgaagatgatgtgg

SEQ ID NO: 25300 - DNA, 279 bp, Glycine max
  unsure (1)..(279): unsure at all n locations
  Clone ID: PAT_MRT3847_122848C.1
aanaaagaancacatnacaatggagtacncggaggttaggaaccctctgatcctggtggntcntcgcgnctnaanccnaccgagatcttccgggnngaaaaacattgtgtttctgtnaatctttgcnggctagtaanaggaggnggcngtgttactgccagnggngtncaggtatcggacganaaataccagaggggnacggaactantntcggcaaattcacagaggccatttcacgcangtgggactnaaangcnttaangaggnngnggaggaant

SEQ ID NO: 25301 - DNA, 126 bp, Glycine max
  Clone ID: PAT_MRT3847_122849C.1
aaaataacacacacgggaaacatcataactgacaataaaggacgtgtgaatatgtgctgcggcatgaatctaaaacagggcttgcatagttgtgaattgaatgaaaggagcttcgatgacatcaca

SEQ ID NO: 25302 - DNA, 352 bp, Glycine max
  Clone ID: PAT_MRT3847_12284C.1
tacggcgtgcgagaagacgacagaagggcatgctattatctacaatgaaccaaagaaactctttatctcaacatgtgtctgtgagtgtctgtgaggcgggacggagcattggtacattacatattgtgaatcataatgtaataagctagctgaccattgcctttctaacatgaaccagtattctgatgagacacgacatggatcccatcacactataagctggttcaaccattaggcttgctcacgatcatttattcttgagactcgcataccgtgtaataaacatttcctacttgagtttttatcgtatctcaccatctacatagcgtattacactgatgcacactatttg

SEQ ID NO: 25303 - DNA, 453 bp, Glycine max
  Clone ID: PAT_MRT3847_122850C.1
gggcttggaacatttttacttcaagcattactatttatgtaaatacctaaacttggattcatacccgttgaatccaagcgataaaaaatgaacagcccaaatttacaactcaacctcaaccttatcctttttagcttctccacaattcccttcagcgaggtcctccttttttgcttacactcttgcttctggggatgaacttaccaaagccattactggttttctcattgggaattggggagttaaacgaaatgggggactcaaaattttttttgggcaagctcaaatcactatgatgtagtttcaaatgttcaccaccattttggggacctttagggacttgacaagttgactccataggggtgtctgaatcaagtaaaaagtcttccaaagttgcaagggattttaactgctggccaaaaaaagcaatggttttttggccctcagcaaatt

SEQ ID NO: 25304 - DNA, 305 bp, Glycine max
  Clone ID: PAT_MRT3847_122851C.1
agaacaggtatttgttaactaataccgtgcagcaaaaggcttggtgagggaaatatgaacgtgttggtaccactcaaaaacgtgcccgtgccggcaaggtagctccattcactgggcttaagtacatggctgtcgtgcccacccgtaagaccaaccaggaacttaccttcatagatcgcaacggtggaggagtgctatgcctgcaggtatggccacgagctggcaaatagatgcgtgtgactctattctacgtgccagacattgatgatgcacatgtcggtgacgaagtacaataccttcttatg

SEQ ID NO: 25305 - DNA, 275 bp, Glycine max
  Clone ID: PAT_MRT3847_122852C.1
acaacaatgaaaagttttagcgcatggggggaccatatttttccgaaggacttgtttgaaagagaaaaaaaaaaatgttctcttcacaagaaggcctttgtgacatatcatttgtttaccttttcaccgtacacttcttttttattaatatgggggcataccaacgacagccacaacccacgaatgtgactcacattgctccaaaaaaacgtggctctcaactgggagaaaacactcattggggagcgttttgcccggcggctttgacaaaatca

SEQ ID NO: 25306 - DNA, 923 bp, Glycine max
  Clone ID: PAT_MRT3847_122853C.1
ccatcgcacagttagtatggatgatatcattctcgtgaagaatgaaatgaaaacgacaatcaatgatgttttattgggagtaacacaagccgctctcactcgctacttgaatcgagcatatgatgtaggcgcaaatagcaacggtgtgaaacagagatctagtgtcctcaagaagattcgccttagggcatcaattcttgttaacattagacctgctggtggaatacaggaactagcagatatgatggcagagaaatcaaaagtcaaatggggtaattgcatgggatacatcatcctccctttctctattgttttgtataaagatccattggaatatgtacgtcatgctaaggccacaatagaccgaaagaagcactcattagaagcaatttgctcttacgcttgtgcaaagctggtactcaatttattaggtgtaaaggttgctgctgccataacacgaagagttctctttaacactactgtagccttctccaatgtgcctggtcctgtggaagaaattagcttctatggtcatcccgtggcatacattgctcctagtgtatatggacacccacttgcactgaccatccattttcaaagctatgctaacaacatgaccatttctctagcagtggacccacttgttatttcggatccttaccttctttgtgatgatttagaacaatcactcaaactcattcgtgatgctattcagaaaaagcacactgtcgatgctgtctaatagtatatggtctaattatgagattttaggaaattggacaactactgattatttttcatttgaaatgcaatttatatgaattttttaaacttataattggtgtatcataatattcgtaaacttatagaaaaaataaggataatatgtaattttgattttcttattttattttatcctcaat

SEQ ID NO: 25307 - DNA, 723 bp, Glycine max
  Clone ID: PAT_MRT3847_122854C.1
ggctcgagttttatcggtcgagcatctgccaaaaataagggccgaatagctcgctatcttgctaacaaatgttcaattgcttcacggattgactgcttttctgaaaggggtactactacttttggggagaaactccgtgagcaagttgaggagcgacttgatttttatgacaagggagttgcccctcgtaagaacatagatgtcatgaagtctgctattgaaagtgttgaaaccgaatatacagcgatggaaacagaagcaccagttgaagtttcaggcaagaaagccaagaagaagaagcataaagcttccgttacagatgatggtgataatatggctgtagataagatcacagagactacaaatggtgatgcattggaggatcataagtcagaaaagaagaagaaaaagaaggaaaagaggaaattggacttggaggtggaacttaacgatcaagccatggatggtggtgctaatggggttgaaagcgaacaagatggagcagttaaaaagaaaaagaaaaaggataaaaggggtgataatggagaagtactagaggctgctattgagactaagaagaagaaaaagaaataaaaaaataaagatgctgagtaaactacggagtgctattttaactggtgaaatcggatttgtcatgatactattttggataatgtctagtttattttttctgctatgaacttctgtcagttgctttgcttc

SEQ ID NO: 25308 - DNA, 424 bp, Glycine max
  Clone ID: PAT_MRT3847_122855C.1
ggtggcatgatcttagccctgaccaactgcacctctggcatattagggggacacataaacccggcgttgacttcttggctcgtttgaggtgaggcatttagacgaagtccatggccagtttgttcgtctgacgcaacgcttgccttgctatcttgcgtgcgcctgttgctggtcgacgggttcacgagggcgaaaactccatactgtgccttgaatgccagtgccacctttcttggccttggttgcaccatggatgacggtgaacatgctaagattgatgcctctttcatccttgaaacaccgtctgcttccgcaccgacccaaactcacactccatagacttcctgttccttatatggcatcccttgccaccatgtcttcgtcctcggtcttggttcacgttggctacttgcccaagccggaa

SEQ ID NO: 25309 - DNA, 1701 bp, Glycine max
  Clone ID: PAT_MRT3847_122856C.1
ggctcgagttttatcggtcgagcatctgtcaaaaataagggccgaatagctcgctatcttgctaacaaatgttcaaatgcttcacggattgactgcttttctgaaaggggtactactacttttggggagaaactccgtgagcaagttgaggagcgacttgttttttatgacaagggagttgccccggctcgagcccattgtttctcttgctttcttcatacatggattgcctaggcctctgttcacacgtcctaatgaaggcattttaatttctcctggattatatctgcactaggtaatcacaacaactcaaagaaaagaaggctggccaattcaaaatcagtttaggtgtatcagatccaaagattggttgtcagatatctgaactccctaaaattccttgccaaagtaacgagtttgacagtgagcttcttcgtggtgtgcgcctccattttgatagtccagggatttggaaaaggcacaacttggtctggggcatagttacagcagagcaaaggtgaaattcaatgttaaccgtgccgataatatcgtcattcaagcaattttccttcttgatacacttgataaggatattaattcattctccatgagagtcaggtggtttgtgttggacagtgaattctctgataagtatataattttcatattctaaatagttttcttcctttaggagaattattaaacttgaagagttgaattctctgctgttcatcaattgtgtgccgagaatggtattcttggcattttccagaactgctgaagattataaatgataattatctgtatgccaaagttgcaaaatttattgaggataaatcaaagctgtctgaagacaagattgcagccgtaactgacatagttcgtgatgaagataaagcgaaggagattgtggaagctgccaaggcctccatgggacaatatttgtccccagtggacttgattaatgtccaacaatttgcacagagagtaatggacctatccaagtacaggcggaagttgtatgattacctggttgctaaaatgaatgacatcgcactaaatttggcctctttaattggtgaagttgttggtgcacgattaatttcccatgcagaaaggggtactactacgtttggggagaaactccgtgagcaagttgaggagcgacttgatttttatgacaagggagttgcccctcgtaagaacatagatgtcatgaagttggctattgaaagtgttgaaaacaaagatacagcgatggaaatagaagcaccagttgaagtttcaggcaagaaagccaagaagaagcatacagctgtcgttacagatgacatggctgtagataagcccacagagactacaaatggtgatgcattggaggatcataagtcagaaaagaagaagagaaagaaagaaaagaggaaattggacacggagaacgatcaagccatggatgatggtgctaatggggttgaaagcgaacaagatggagcagttaaaaagaagaaaaaaaaggataaaaagggtgataatggagaagtactagtggctgctattgagactaagaagaagaagaataaatcaaaaaatagagatacttaataaaactatggagtgcaattttaattggtaaaaacggatttgtcatgtaactatttttggataatgtcatgtttattttttctgctatgtacttctgtc

SEQ ID NO: 25310 - DNA, 828 bp, Glycine max
  Clone ID: PAT_MRT3847_122857C.1
tgtctcgcgttcgctggaaatccggcttctacgctcgcgtctcagtttcagttttggatctctctcttccctctcaccaatctgcaggatttgaaaaatggcagattccaaagctggattgaggaagccagcgtttaccaaggttgatcagcttcgcccggggaccagcgggcacactttaactgtgaaggtggtcaatgctaagatggtgatgcagaaaggtcgttctgatggtcctcaatcccgtcagatgcgaattgctgaatgtttggttggcgatgagactggaatgatcatattcactgccagaaatgatcaagtggatatgatgaaagaggctgctactgtgatcctgcgcaatgccaaaattgacatgttcaaaggatcaatgaggcttgctgtggacaagtggggccgtgtggaagtcacagaacctgctagttttactgtgaaggaagataataacttgtctctcattgagtatgaactggtgaatgttgttgtggaatgacttattgggacctcttggaatttctaatgagaaaaaaactcatcatgctcatcacagttcacctgagtttaggaatagagatttgagaagccagtagtaccaacagttgcttcttactgttgcaacagactatgtggatcttgtagcttaaccactgaacagatggtggattgaagtgcaagaaaatgggaattggcttccagatcatgctttttgttatgctctctgttgacattttagattatgtgtttcttcatctactacggattgcatgtatcagaatattaatatatggcagatggttgtttatatttgag

SEQ ID NO: 25311 - DNA, 943 bp, Glycine max
  Clone ID: PAT_MRT3847_122858C.1
cggctgcgagaagacacagaagggggaatcaggggcaaaatcccgtgaacctgatgatataaacttgtatttctctccttaaaacccgacctcgacgtttgcgtcgctcagtctcagtctcagtttcagtttcggatctctttcttctctcacaccaatttccaggatttgaaacatggcagattcaaaatcaggattgaggaaaccagtgttcatcaaggttgatcagcttcgcccggggacaagtgggcacactttaactgtgaaggtagtcaatgctaagatggtgatgcagagaggtcgttctgatggtcctcaatcccggcaaatgcaaattgctgagtgcttggttggtgatgagactggaatgatcatattcactgccagaaatgatcaagtggatacgatgacagagggtgctactgtgatcctgcgtaatgccaaaattgacatgttcaaaggatcaatgaggcttgctgtggacaagtggggccgtgtagaactcacagaacctgctagtttcactgtgaaggaagataataacttgtctctcattgagtatgaattggtgaatgttgttgtggaatgacttattgggagtcctggaatttctactgagaataaaacaaatccagcgaagaaatcttgttttttttgtcagagacatattatcatgcccatcacattcaccttagtttaggaatagagatttgagaagccagtaggtaccaacagttgcttctgactgttgcaactgactctggatcttgtagcttcaaccccagaacatatggtggctgtaattgcaacaagaaaatgggaattggcttccagatcatgctttttgttttgctatctattgacaattttagattatgtgtatccgaattttatatatggcaggtgaatgtttatatttgatgtaatcctttgtttagtctcc

SEQ ID NO: 25312 - DNA, 186 bp, Glycine max
  Clone ID: PAT_MRT3847_122859C.1
ggtacattatggctctctccttttatgtgatcgtaactggcggcctttaaagtgccgactcagacatgtggcgatggattctctctgagcaagattctagatcgatacctcacacacagcacagcgacatcaacttgtactttcattataagctacttgttttttgttcgagtgtcaaaatgattg

SEQ ID NO: 25313 - DNA, 1330 bp, Glycine max
  Clone ID: PAT_MRT3847_12285C.1
ggtgcgtccctccccacaggcgtcagcacaggcggaaagaccgaagtgatagtctttcagttcagcattcagattgctccaatctttttctatagtctatacatatattaatctatttcaatattttattaccaagaagaatcattgctgggcataagcatacacaatcctattccttaaaaaaaaatgcttggagctgtagcagcttccacatcactatgcttttcaccatccacatactccaccagaattgttgttctcagaagaatctcaaattcaacactggcattgaacaatggtcactctttcttactcttatcagctaaacctatgcatttctcttcacacaagagcagtagaagacaaccccatttccttgcacaagctgctgcatcttctgcagtaaatgctgaatacgtggaggaaccagcaacaaatgtgaaattccagacatctttgagttttcccggttgctcaaattcattaactttgtttggaacaggatacagagaaaaagtttttgcgattattggtgtcaaggtctatgctgcaggtttgtatctagatcaatctatcgcccttgaattgaatgcttggaaagggcaatcaaaagaagctattcaagggaattcttccttgttcgagaccattttccaatcttccttcgaaaaatcattgcaaattattctagtcagagatgttgatggtaaaactttttgggatgccttaagtgatgccatatcaccaagaattcaacaacccacaaccacagatgaaactgctttgacaactttccgtggtgtctttctagatcgccctcttaagaaaggagctatcataattttgacatggttgaacccctccggattgcttgtttctgtctcctcaaatgggcttccatctaccatggatgctacaatcgaatctgcaaatgtggcttctgctctttttaatgtattccttggagatagtccggtttctccctccttgaaagcttcagtggctgaaagcttgtcaaaagtactgaaataaaaaagtttagcgtttcttgataaagttgcatacatccatattttcttgaaattcttcgatctttaaatatattgccgtagcctatattctcctgatatctatgtaagcatgctccatggtctactgatgtatgcctagtgtacaagtggaagctgttacctagttccagtgtttatttctactgatctaaatacttgatttggacattaatatacacttggatcaattccaatttcctaaaaaaaaaaaaaaaaaaaaaaaaaaaaataaggacaaaaaaaaaaaaaaaaccaaaaaa

SEQ ID NO: 25314 - DNA, 218 bp, Glycine max
  unsure (1)..(218): unsure at all n locations
  Clone ID: PAT_MRT3847_122860C.1
ggtttgacttctatgctctcaaaaacctggctttattaattattactttgggaggaanggaggtggacggccgctcccacgttatcactggccagcgcccctcctcccccttccgacctggttttttttggtatagcccacgtctccgggcggtgggggcctcaaactgcatctccgtgtcccttctcccccgagtgggggggggggggcccttggcc

SEQ ID NO: 25315 - DNA, 899 bp, Glycine max
  Clone ID: PAT_MRT3847_122861C.1
gtcccgtgaacctgatgataaacttgtatttctctccttaaaacccgacctcgacgtttgcctctctcagtctcagtctcagtttcagtttcggatctctctcttctttcacaccaatttccagcatttgaaacatggcagattcaaaatcaggattgaggaaaccagtgttcaccaaggttgatcagctttgcccggggaccagtgggcacactttaactgtgaaggtggtcaatgctaagatggtgatgcagagaggtcgctctgatggtcctcaatctcgtcaaatgcgaattgctgagtgcttggttggtgatgagactggaatgatcatattcaccgccagaaatgatcaagtggatacgatgacagagggagctactgtgatcctgcgtaacgccaaaattgacatgttcaaaggatcaatgaggcttgctgtggacaagtggggccgtgtggaactcacagaacctgctagtttcactgtgaaggaagataataacttgtctctcattgagtatgaactggtgaatgttgttgcggaatgacttattgggaatcctggaatttcttttgagaataaaacaaatccagcgaagaaatcttttgttttttgtctgagacatctcatcatgcccatcacattcaccttagtttaggaatagagatttgagcagctagtagtgccaacagttgcttcttacttttgcaacagactctggatcttgtagcttaaccactgaacagatggtcgctgtaattgcaacaagaaaatgggaattggcttccagatcatatgctttttgttatgctatctattgacaattttagattatgtgtatcagaattttatatatggcaggtgagtgtttatatttgacgtaatcctttttttagtc

SEQ ID NO: 25316 - DNA, 1496 bp, Glycine max
  Clone ID: PAT_MRT3847_122862C.1
cggtttcgacactcgcgtctcagcctcagtttcggatctctcccttctctcaccaatttccaggtcgcattccaatcttcaatctcctttcccttttccttcaatctatttgtttccttttcactctcataactcgattttcatggaaaaaaaaaaacaaaaaaacttcgctctttattgttgggtttctcgaaatttttatagttttttttcccgtgaattttatttgaaatttctcaagtatgtttgatggaattggaaaattggtatgagtttggatcttatactctatccatgttactaacttgatattattatcaatatttgacactgagatattgaaaatttcaaaaccttcttaccccttttagctggggttaggttaggtagattacaggctccgctatgttaattgagcttgcttgtttctgcttgtattttagttcacattcgctaaactaggttttttcccttagctggaaattttggattgaaaagttgaataagggagcatttcatattcaaaacctatgtacaagaaatagttcattcattagaactttgattttgagctatgcatgaagatcttacaagataggcttaatgtgcagtgctgctatttgtatgttgtcttagtggaagtttttgtaggatttgaaaaatggcagattccaaaccaggattgaggaagccagtgttcaccaaggtcgatcagcttcgtccagggaccagcgggcacactttaactgtgaaggtggtcgatgctaagatggtgatgcagaaaggtcgttctgatggtcctcaatcccgccaaatgcgaattgctgaatgtttggttggtgatgagactggaatgatcatattcactgccagaaatgatcaagtggatatgatgaaagagggtgctactgtgaccctgcgcaatgccaaaattgacatgttcaaaggatcaatgaggcttgctgcggacaagtggggccgtgtggaagtcacagaacctgctagtttcactgtgaaggaagataataacttgtctctcattgagtatgaactggtgaatgttgttgtggaatgacttattgggacctcttggaatttctaatgagaataaaaacaaatcaagcaaagaaatctagcctttttatttgtctatgggacatctcatcatgctcatcacagttcacctgagtttaggaatagagatttgagaagccagtagtaccaacagttgcttcttactgttgcaacagactctgtggatcttgtagcttatccactgaacagatggtggatttaagtgcaaatgggaattggcttccagatcatgcgttttgttatgctatctattgacattttagattatgtgcaccttcatctaccatggattgcatgtatcagaatattatgtatggcagagatgggtgtttatatttgagaaaatcctttgcttaatctcaatatttaatctttatcatgttctaaaaaaaaaaaaaaaa

SEQ ID NO: 25317 - DNA, 2483 bp, Glycine max
  unsure (1)..(2483): unsure at all n locations
  Clone ID: PAT_MRT3847_122863C.1
ggctcgagctctttagcagcagaagcatgtgtgaattgaagctcaaatgaattaagactaaggaaacaatgaagaattgaagaagaggaagaggaggagtaacaaaacaagtatgtcagaatcaaacgcaattgcaaatggtttagctggtgcaggtggtggaattattgctcaaatcataacttatcctcttcaagcggtaaatacgcgccagcaaactgagagaacactcaagaggaacaagcaaagttttacctccaactcaaccactgctcctggcactcttcttcagatctttcaggtcattggaactgagggttggggtggactctatagtggcctcaagccttctcttcttggaactgctgcttctcagggcatttactactatttctatcaagtttttaagaacaaggcagtgaccattgcagctgcgcggaaagtgaaagggcgtggagatggtactgttgggatgtttggttggcttgttgtggctgccattgctgggtccctgaatgtgttgttcacaaacccaatatgggttttggtgactcggatgcagactcatactcaagcacaaaggaaaatcatggacgaaaagaaagaagctttaaggaaggctgcttctgaaagcaccatagcagactcaacattgcaagacaaattggctgaactgaactctataaaacctcggccatatggaactatacacgcggctaacgaattctacaatgaagcgggtatagttggatnttggaagggaatcatccctgcccttattatggtatgctatccatcaattcagtttatgatttacgagagctcattaaagcagctttgggcctaacgcgccgctgaggagctggggaagacgaggatatctgctttagaggtctttttggtgggagcaatagcaaaacttggagctactgtctcaacatatccattactagttgtcaagtcaaggcttcaagcgaaacaggagattggtggaagtagctcgtatagatactcaggtacttttgatgcggtacttaaaatgatacgttatgaaggactacctggcttttataaggggatgagcacaaagatagtacaaagtgtttttgcagcttctgttctattcatggttaaggaggagcttgttaaggcttttatggttgtggcagataagagcaaaaaagttgtatcaaatataagtagttgactttcttcttttggataaagaaagtaaaacaagtagttgacttctttaccatatgaaagggataactccctcttgatctacctctccctgttggttattcacagattctggtgagagaatcatgaacttgaagtcttcaccaaataatggatgaaactaactccactagtctagatgagccatcctctctggacatatgttatctctttgaagtgctgcagatcactttggaaactgtcacatagctgatgttcaagatccaaggaactgtcaaactcttaaacatgaaagtggcttcctcctacagcagattattcttgttttcagtgactgcccttttgtgttctgaactttcattactaagtttgccatatatcagtgtatttctgtgtttagaaagcattattttccaaaaaattaaaaacaaaatgcattcatatataattctttaataaataaacaaacaaccattatgcttgggccctttaccgtcacgtggagccactgcctcggcggatccctttcttgtcctcttgtctcggcttctggcaaagcaggtgcttgccccttgttcctcagctagatacgcaggtaacttttgatgcggtaactttaaaatgatccgctatgaaggattacctggcttttataaaggggatgagcacgaagatagtaacaaagtgtttttgcagcttctgttctattcatggttaaggaggagcttgttaaggcttttatggttctggcggataagagcaaaaaagttgtatcaaatataagtagttgactttcttcttttggataaagaaagtaaaacaagtagttgacttctttaccatatcaaagggataacttcctctcggtctacctcttactattggttattcacagattgtggtgagagaattatgaagtcttcaccaaataatggatgaagctaactccagtattccactagtctagatgagccatcctctctggacatatgttatctctttgaagtgctgcagatcactttggaaactgtcacatagttggtgttcaagatccaaggaactgtctaactcttaaaacatgaaagtggcttcctccaacagcagattattcttgttttcagtaactgcagccctttgtgttctgaactttcattactaagtttgccatatatcagtgtatttctgagtttaaaaagcattcttttccaaaaaattaaaaacaaaaaatgcatttatagataattctttaataaataaacagactaccattatgctaaaaa

SEQ ID NO: 25318 - DNA, 490 bp, Glycine max
  unsure (1)..(490): unsure at all n locations
  Clone ID: PAT_MRT3847_122864C.1
aggaaggtttcccgtcatcactgtatgacgtcctccttctttggggggggggggggggcttattagaagtacgggtaatggtgtaggtttccggtataaaaaagatatgagagagaaacgagacctataaaaggagacaagacaaaaagcacgcaaaaatagcaagacaagacaagtataaaaagggccccaagagagtacaaagaatgagtacagcacacgggggggaccattgccagaacccgttatggaatgatgtgtaaaaacataaaggccgctgccataaattcgcattgtcccgaaaggtgcgcgacaaagcggtgagcctatgaagcacccaagcggaaaccccgaccaccgataaagttgtttcgagttggtgaaatcgcccgggtggggtggcgcacaagtacgtagcataccgncgttaataaaacgtaatggcaccaaaagaaagagaacgagttagaatggccagggtgtgcgtttt

SEQ ID NO: 25319 - DNA, 542 bp, Glycine max
  unsure (1)..(542): unsure at all n locations
  Clone ID: PAT_MRT3847_122865C.1
aaaaaaaacaaaattttttatatcatccctcaccaaaaattaccaataaagcaattggcgaccctacatacccgtctatgtgacaggtgcaaaatattacagagttgtatccatgaaacaataagttggcacatacatggagactataaaaggagcccacaaaagggaaaggggaggaaggggacaacacagtcttggcaagaatgggcactttcctccaaaaggatagccccaaagcaccaaacaataagctgtgaactaagacctggagaaactgctgactccacagttcctcgaatgcaatcctctctctggacaatggcaacttcggtgcacagagctccgagcacttcaaaaattcagaagcttaagaagctgtggcagccgtcgacttctctaattnttctttttcaatttctgcccttctctgctcagcatgctgggcaacaccattagcaagagcttgataatttgaactcaagcttctggggtaagggtctcaaacctcgatggatccaaggattgtatcactttgatggaat

SEQ ID NO: 25320 - DNA, 504 bp, Glycine max
  Clone ID: PAT_MRT3847_122866C.1
attattatttttgcgaaatttacaattttcccttcaaataatgatgtgatgttaaagtgcatgattgtgatttactaaatgtaaaaatacacatatttgcatatatttgagccagtaataaaaaaatcacaaactacgtgtaagactaatgtgaaaaatcaagaacatcaagatacagttttatcataattaaatactaaaagagtccactagtgacaaagccaaagaatgtataggacagtaaagttattatttttagtattttgcttctactatattcaacaagttaaaaaaaaggtttagcagctttaatttttttttatagcaatatccattatacccctttgcgacttattctatctaatataagttccttagcgaggaacctatgtcacaaaggacattttgaagcgcattggattctacctttgacccaaagaggttcatgcattatagcatctcttgtatcaaaatcaaaagacattatggcctacggattccacc

SEQ ID NO: 25321 - DNA, 971 bp, Glycine max
  Clone ID: PAT_MRT3847_122867C.1
cttgccacaaaatatttatataatgaatgatcaaactgttttacaacctgcagagtaagggacccttgaaaagctttgtataacccaaaactgatgccttcatcaatactcatggactatactctcaacccaaaaataatgaccgaaaaaggatgtaaaaaaaacaaaattttttatatcatccctcaccaaaaattaccaataaagcaattggcgaccctacatacccgtctatgtgacaggcaacaaatattacagaaatcgtatccatgaaacaaaaatacgttggcacatacatggagactataaaaggagcccacaaaagggaaaggggtggaaggggacaaacacagtctttgcaagaatgggcactttcctccaaaaggatagccccaaagcaccaaacaataagctgaactaagacctggagaaactgctgactccacagttccctgaatgcatcatcctctctctctgggcaaatggctacttcggtgcacagtgccccaggcacttcaatactgcaaactcttcatgatcaaagaccaacaactggtgaccagaaagccgacaaatgcctcaaatataggcaaccctctgattttcctaaagaatgggtaactgagaacttgagaattaaaaaagcaacagtaataatgtacattcagaagcttaagaagctgtggcagccgttgacttctctattttctccttttcaatttctgcccttctctgctcagcatgctgggcaacaccattagcgagagcttgataattaaactcaagcgtttgggtaaggttcacaaacctcgatggatccgatgattgtatcactttgattgtatccacaaagaaaacaaaaggatcaacatcgtcaattggggactgcaactcttcatcatcactaaagtcatcatctgaatcatcatcatcatcatcatggggccggaaagacttcgcctgttcggcca

SEQ ID NO: 25322 - DNA, 1907 bp, Glycine max
  Clone ID: PAT_MRT3847_122868C.1
gcgtacgaagctggatctcttagagcggccgcctttttttttcgcttccctcaaaatatttatataatgaatgaacataactgttttacaacctgcggagtaagggacccttaaaaaagctttgtataacccaaaactgatgccttcatcaatactcatggactatactctcaacccaaaaataatgactgaaaaaggatgtaaaaaaaacaaaattttttatatcatccctcaccaaaaattaccaataaagcaattggcgaccctacatacccgtctatgtgacaggtaacaaaatattacagagttgtatccatgaaacaataagttggcacatacatggagactataaaaggagcccacaaaagggaaaggggaggaaggggacaacacagtcttggcaagaatgggcactttcctccaaaaggatagccccaaagcaccaaacaataagctgtgaactaagacctggagaaactgctgactccacagttcctcgaatgcaatcctctctctggacaatggcaacttcggtgcacagagctccgagcacttcaaaactgcaaactcttcatgatcaaagaccaacaactggcgaccacaaagccgacaaatgcctcaaatataggcaaccctctgattctcctaaagaatgggtaacagggaacttgagaattaaaaaatgcagcagtaataatgtacattcagaagcttaagaagctgtggcagccgtcgacttctctaatttttctttttcaatttctgcccttctctgctcagcatgctgggcaacaccattagcaagagcttgataattgaactcaagcttctgggtaaggttctcaaacctcgatggatccaatgattgtatcactttgattgaatccacaaagaaaacaaaaggatcaacctcatctttgtgactctgcaactcttcatcatcactaaagtcatcatctgaatcatcatcatcgtcatcattgggccggaatgacttcgcctgttcagccaactttctaagtgtgatagtatcagcatcctctccctcatcagcatcaactcccatttccttgtcaaaaccatttccttcctcatcttcatcatcagtttgaaaaccatccatatcatcatcatcttcagcttcttcctcttttgcagcctctgcaacttgttccttgtaggcaactagaagatcaagattggcccggaacacccgacctaaagcctccgctggcaattgatcagctgggagtgccagtaatgatgttaaaccaaggcagcatactttcttttcatgttcccttttaaaattagtacgcattccactcttcttaacttgttgaagcaaatggaaccaaagatggaatatttctgatgcaacacctagcttttgcaatatgctgagagtcaaagctgcattgtagtaaagagcatctgcaatcacttgcatgaaaagacatttcaaatctcgattttcagtgtgacgcaagcgttcaactgtaattctgagatatggctcaacccagtgatcgacttgtcctctgcaattctggaagacaacttcgataagctttggagccggcacaatatcattgtcctccatatttttatctgacataatagatgaaatcatgttccataaactctgttgatagtcgggttctttgcaagtaaggaaatgagcagttccccttgaaatatagttgtccaaaggaaccaaaatatttggaaagaaatcaattgcccaatctgccagtgcttccatcatcaatggccaaagactccacatatccaatgatattgttggagagaaaaaagtcatatatgatacaatctccaaaacttcttcgaaaacctcttgaccatcagttgttaacattctacgcattatgggaagcaaagttggc

SEQ ID NO: 25323 - DNA, 273 bp, Glycine max
  unsure (1)..(273): unsure at all n locations
  Clone ID: PAT_MRT3847_122869C.1
antctcgaactcngcancgtggcgattcggacgtacgcgatgngaattagtcaacgangananccacgcgngactganccngaanatggaatcaaccncgcgnggcgaatnaaacnccgnctgcgtcttgnatnngcaaatatactacgaagangctcgttcgacaacatatgcnaattctcgttcggnctcnacccgggangtctcctancgaatctcccagtcncggacctcgccgtcgcgtttgaccnngcctcaaagcnctccgncgaa

SEQ ID NO: 25324 - DNA, 677 bp, Glycine max
  Clone ID: PAT_MRT3847_12286C.1
cgagtatccactcaaatacttctctcaaaagtggtgctttgtgacactaattatgccattccattgtctctcttgtggttagttgtgcacaaattttgtatatttaaacaccaaaaaagagatcatgtgatcttaattattaagttacgttgattccatgcgttgcacacacaacttctatcgcaagatggttccattcgcatcttaactactggacttgtgacaatagtgctcctggacccaccctttatttcttgcaattaatttttcataacctttttcaacatcttttatttcttgcaattttcaacttatataatagtctagtcttgcgtgtctatgtatgtgcaatatccgcctaaaaataatatttttcgcaaataaaaaacaaacttgattaacaaacatccttaggattattaattgtaggagtcatgattgtagggatcatatatattatttatttgatgaatactatcaatgagctccaagttgagaaacaagaagagtacagcgcaagccaatttagcagagcttttccatttcttgagcagtgcaaatcagagttgaaggattgaggctgagttgaatctcattactggtcaaattaagataatgtcttaaaaggcataaaatatgttttgcaattatatgtatgggtcgggctttaccctagg

SEQ ID NO: 25325 - DNA, 345 bp, Glycine max
  Clone ID: PAT_MRT3847_122870C.1
atattaacatcctcaaaggaaggtggatgttatacacattatcgaacctatttttattaccagactataaaatcgttgcccactgaactaattaaagaacgactgatgtgcattgacacgcgcgggttaaaacttatgcaaacaatatggtgtgaacccacacactatttgtcacacaaaatagaacccaatacaaccagcgttggcaccgacagggtaatttcaagttaaggctgagcagagaacattattcccagagccttacaaaaccatgaaattttgaatgaggcatctatacacatatgcaatatcaacaatattaagctagcttatcatgaacaaggg

SEQ ID NO: 25326 - DNA, 460 bp, Glycine max
  Clone ID: PAT_MRT3847_122871C.1
ccccaaaaggcgaaaccggtggccccaaccggacacaactaacagatcaacatgccgcagaaaaatccgattttggttggtgcctaaagacacggaaaagcatccaacaaaggggaattctttggcccttacgaaattaagggaaaaaagacgcttaaaatgcacctaaaaattgcgtttcccacccctgcttagccgataaaaatacaatgctggaaaggtttactaggttgaagcccaaagagattttggcaggctccctacctcgggcggagaaaaacaaaaacctctaaattccctcaagccctcttggaaaaacccacccctccctggacccgggggacaacccggaattaccggaccgtaacctggaggcgtaccatcttcccctaaagggaggaccattacaggtgggcgaaccaagggtcaaaattgtgacccggggaaaagcgtgacccgc

SEQ ID NO: 25327 - DNA, 470 bp, Glycine max
  Clone ID: PAT_MRT3847_122872C.1
aagaccataatcgccaatgggtaaacataaaagaggcattggctcgaggccgatatgactggatgtgcaaggcattggaggtgtttttaagagttatggcagaggaaagaaagctaaagaaggaggaaaataatgttgattcttcttcaagttcagtgctagatgtgtcagaaaatcaaaatatgtcatccaaatactataaaagaacaactaccacacaacaccatagtatgtcatccagaaccaatatcctggcccatgcttcccaggagatagctatccattttggttattgacactactcttgcagtgtgcttctttatgtggcacagtaacttccattttgaaaaaaaaatatatttgtaatgacactgtcacagttggtttgcttgaacacttgcaaacttaatttagggtaattttaattatgaaaaagtgattttggctcgacacccacttgtgttggggcg

SEQ ID NO: 25328 - DNA, 1615 bp, Glycine max
  Clone ID: PAT_MRT3847_122873C.1
ttgcatgcctgcagtgtgtagtatcccctactcagctcatacctcaaacccaggcctctcggctacaacaacgcgtttcctctctgcctcttcaccaaattccagtgttcaaaatcaggtctttaggccaattaacacccctataatgtccccagccaccaacataacaatgccaaatggtgcaaaccatggtatgcgtcggggatcaagacctactttggtgagaaacaaataccagcctcactctgtaccaaggccagcactgggtgtacgtagtcacaccatccaaagggagcgaggaaatggttcaagcagtttaagacctaaggtccttcgtcctcatatgatgtccaggggtgtaggcagtgctgggaacacttcgatggcaaataattctcatggatcatctgtcttcggcaatgctggtaatatgacacaacaacatctcaattattgtaccacaacaggaatgccaaattacagaaattgcaatgggccatctgatctttgtcacccaacaaatatatcattttactcacagccgagctctctaccagctagcctgagttgtgttaaccagcataatgtggctgctgaaacacaggcatatagccagccattgccccagtcaaatatcattcagggtttcgatcaaaattgtatccaagttagtcgtgctccttcaagttatgtggcacacccaaatagcagtcagcatggaaaagagcctcaaataagaagtcaaaatggaaatgccagtggaattactacacaatgtggaacagtaagtcaaaatacttgccaaccacatccacatgaagagtcaccaagggaaactgctggaaaattttcagcatttgactcaagttggatagataatactggtcaaagcattctacaaagctaaaaatctgtagtgcaaccacccaatgtcaaggagatcgatgctcagtttactgcaagcaatgaacctctgattgaaagctctcaattacccaattcaatggttgatttagatgactgggttttggaaaaaaacccttttccagtgttaacagatggggttttaccatctgatatgaatataccatctccagatctttactcaattgatatgaacatgggtttatggtaaatgagtttaaggcgactttgccaatacctatagttcacattgcaatcttcaatggaagtgtgcagaattggttgacagttgaatgatgctacaacggaagtgttcagctctgagtaatatttgacagcttttattttgaggctcatcaacttgtgtttagagcttaatatgttagatgttccctaatcactaatcgccgtagttgatgcataaacagcataggctaggctagttttttcttaatttggtttgcatgtagtgatgacaagtcttagggcatttgcctagcatatgtacccatgagagtaatggatgcaaacacaagatcaaagcgagtaaaactgtcaataatttagaagtggtgttctatgattctatcccagatatgtcttttccttttcaattgtgtagaccataactgatgtttctatttatataaagtttgttcaagggaaagaataatgccatttaaatggaaaa

SEQ ID NO: 25329 - DNA, 541 bp, Glycine max
  Clone ID: PAT_MRT3847_122874C.1
tttttcgaccagtaattttttcggtttgccataaactattgttacaacaagtacaaattagggaaagtatggagagtcaacaacacttcaaaggccaaaatgtagctgttatcgattaaagctagagaaaactaagttcgcaatttttccataacataacgcacatacgtaacctaccacattataaatcctaataatccaaatcaaaccacgtactttccccataacttcccaaaccccaatttgcacgatgggattatggattcattatttgttattcttcacaggaaggggatcaatcttgataggaaaactatgtatctcatccctccatggactcttgacagaccccggttcgatcgtgttcaacgcaacccacacagcagggttacacttgaacccagacccgaatgccatttgccaaaccctgtcacccttcttgatcctccccttagcctcacaggacgccaactcgtaccacaccgagcttgacgacgtgttcccgaacctgtaaagggttattctaaaaggctccatgtgc

SEQ ID NO: 25330 - DNA, 342 bp, Glycine max
  Clone ID: PAT_MRT3847_122875C.1
tggcttggaacctttgggctgatttatgtgcttgattggcggtaaaaggttattggaggggggttcggtctcagaggatagtctacgctagggaaaggagttctactaatatcggacgtctgattctggatagtcaactatacgagtgagagggccgaaatcgtactataagaggtccaaagatttgaagaaccacacgtagggtacataggatatcgtaagcgttctaaagtttctactccgattatatacatctatcgaaggttcattgtctacatttaggatatgaaatttataggagattgtgtacatacattgtgaaactaccgtaaccacggcgta

SEQ ID NO: 25331 - DNA, 174 bp, Glycine max
  unsure (1)..(174): unsure at all n locations
  Clone ID: PAT_MRT3847_122876C.1
ccggaattaccgcgtcgaccacgcgtacgttactgtgggcacatcttacaatagtgagcacgcatantcgatgataaaacactagattgacttggtggaacctgatatggatttggatnggaaggaggactataagaaaccttaaacagacatacgaaaaaaagattgatgcaa

SEQ ID NO: 25332 - DNA, 1496 bp, Glycine max
  unsure (1)..(1496): unsure at all n locations
  Clone ID: PAT_MRT3847_122877C.1
cccacgcgtccgcatcgcctcctccaacaccaccgccacctcctggattcgcagaaacgtcgccgcctaccacccctccacccgcatcgccgccgtctccctcggcgacgaggtcctctcctccctcccctccgccgcccccctcctcctccccgccctccgctccctccacgccgccctcgtctattccaatctccataacgacgtcttcgtttccacccctcactccgcctccgtcatcctcaaccccttccctccctcccaagccttcttcaaccaaaccctagaaaccttcattctccctcttctccatttcctctctcaaacaaattcccccttaatgctcaacctctacccttactacgtcttcatgcagaacagaaacctcgtccctctcgaaaacaccctcttcaaacccctccctttctccaaacaaatgctcgaccccaacactcttcttcactacaccaacctcctcgacgccatgatcgacgctgcttacttctccatgaagaatctcaacgtcactgatgtaaccgttctcgtcaccgaaaccggttggccttctagaggggactctaaggagccctatgcaactccttccaacgcgctgacgtataattcgaacttgattaagcacgttttggatcggagtggcacccctctgcacccggaaactacttctagtgtttacatatacgagctttttaatgaagacttgaggtccccgcctgtttctgaggcgaattggggtttgttttatgggaatgctacgcccgcgtatttgcttcgtatgtctgggattgggagttttctggcgagtgataatgccaatcagacttattgtgttgtggaggaggatcatggggtggatttgaagaccttgcaggccgcgttggattgggcgtgtggaccggggagggcgaattgttcggagattcagcctggggagagttgtttccagcccaataatgttaagaatcatgcttcttatgcttttgatagctattaccagagtcaggggaagtctcctgggtcttgtgacttcaaaggggtagctatgatcacaaccagtgaccccagtcacggtaaatgtatctttccaggaagtaagaatttaaccaacaagacaaaggaagtggtgaacactactcaatcaagcaatgcaggggataatttaaggttcagaacctttagaagcatgaaaataagtgcaatcaacaacattttgcacaattactttgctgctttcaccattttgttgttattccttctgtgaggtgaaaaaaaaaatcttgtttaggttttttgtttttttgggggggacgggggtgtggatgtgggaggatatttaggattattttgtgcttcctttcaagaaagtaaaaggggggagggggtcttgtaattgaacgtgtatcttgaaattatatttgttatttaatttgtgtagtctatgaacataatggaaatgactcttctcaatgaaannnnnn

SEQ ID NO: 25333 - DNA, 331 bp, Glycine max
  Clone ID: PAT_MRT3847_122878C.1
tgggcccacaggaaatgtaagatgctgataaagttataccccattttcatttcattacacagctccttttctctctcttttctctcaccccactttcgttctttatctctatcttcactaacataacataggatcctttcattgtacttctcactcatgaaagagatacatatatagaaatagaaacactctttttgagaaacaatcatataatcggcatcatcatcatcattcatagagtgcagagaatgaattcttcttctgctcagagcagcgactatgatctctccatcaagatcttactgatcggtgactctgctgagggaaaaag

SEQ ID NO: 25334 - DNA, 494 bp, Glycine max
  Clone ID: PAT_MRT3847_122879C.1
caaaacaaggactttagtcgacttgatgaactataaaccacacaccccgagctctaaaatgcagtcctttgagtaccatacacctcgcttgactgacaagacgtgacctccctgaacccattccaaaatcgtaaataatgatcatacaatcgtcgaacccaaccaaaaagaagaaagctatcaagccgtatacggcaccgcagtacggcggtctttctctatcccacaaaggccagggaaagcgcagaaagtacttggtgacacatgaacctgccagaactttgcaatgtccgggttatcgatctttctagtttcgccgttgtatgttgggtggctgacttcttccttgagtacttcccggcgatggccgtcgcccaagtatttcatgaatgtctcgctgactttgacgtattggtttacgccctcgtgggcgtcgatggtgctgccggtggtccaggagagcagcatgggctcgatgagtggagcgtccgtga

SEQ ID NO: 25335 - DNA, 294 bp, Glycine max
  unsure (1)..(294): unsure at all n locations
  Clone ID: PAT_MRT3847_12287C.1
acgncgcangcacgcgtacgtaagctcggaattcggctcgagctnnccncgcnggnnccgnttcngcgntcganttcggtttttcgtactgcgganatgcgagcanngatctcncntcatattngncangctntnntccagngtnnaaanggttgctgngagcnntnctgccncaangtacnggatcnggagccgatnggcnnatgccnagtnacaagacngntgnacggnggtnatgnggtttnantactntctncancgngactgnngcnggaacgcagngtcacntnnagt

SEQ ID NO: 25336 - DNA, 478 bp, Glycine max
  Clone ID: PAT_MRT3847_122880C.1
gggagagagagagagagagagagagagagagagagagagagagagagagagagagagagagagagagagagagagagagagagagagagagagagagagagagagagagagagagagagagagagagagagtatagtaaccgcaatttcattataataatcaccacactatatgtttttagaatgataactaaccctatgacaaatttttttgtgttgaacatcttcctaacactcggtattgcgttgtcttctaggaacgtggaagttttgcagctgtaaacgccctcgtttacagtatggggtctgaattcgatgaaaactgtctgatacctgtggcatgtgttaaaacatgtttgtactttatggaataatacttggtgttaatggctgtgttattcgatgctgtattcgaatctcttgtatgatctagtatttttttaaaaaaaccatttatccatttaggtattctaggatgt

SEQ ID NO: 25337 - DNA, 120 bp, Glycine max
  Clone ID: PAT_MRT3847_122881C.1
aaatgaaccttcttatatcatagggggcttgtcagctctcctaataaatcatgtggtgacgttttacacaaattagccgaattaatttctcttcccttccaagagatgcaatttcaggaa

SEQ ID NO: 25338 - DNA, 1045 bp, Glycine max
  unsure (1)..(1045): unsure at all n locations
  Clone ID: PAT_MRT3847_122882C.1
ggctcgaggctgtcacacccacgcagtcactgtgctgcgtttcatcattcggcggtggttcgcgatcggatcgggattcgagggcggaacgaagtagattctggaggcaccgacacggtggcgctagctccgttcgttcgttttggtgctttttttttttttttttttacaatccattgttttgcctgtgctggattcttacaatgtcgcgtcgttttttgttgttccttttgtgtgattcggtcgatccaaaaaatcgacggtgattgattggaacgatggcgtatcgacggagacagcagcaagggttttcgaagccttctttttcgacgtttgaagaaaaaacgactcggaaccctaacaacccctttccgctgccgaacgacgacgttgaaggttccgcttcgtcgtcgtcttcgtcttcgcttgctgcgaaagctattagagcttcttcggcccgtcgcgactcttcgttgtcctctctctacggcctctcctctgcttcttcttctccggtttcttcttctcaacctactccaactcctcctccttcttccaaggattcaagaccctatgaatatacatctatgaagaacatgaatgagtccaagaatggattttggggtgttctggccagaaaagccaaatcaattattgaggatgataatgtaccccagcaatctgaaatgtctgggactgggaggtcccaatttcctggtgtagcatctaggagcaagttccaaaattcaaatcacttagaggatagcaatctcaaaagggacggtccatcatttataaagggattggatgctatcacatcttctcttactcatattggtggtaccattggtaaatccttggaggaaggtttaacaattgttgagaatcggacttcagatatcattcaagaaactcgtaaacatattaagaagaagcctggaaactctgtaggacaaaatcaggagacaaaccattctactacattgcatcaatcccaactgcggaaccagatgtcaccgaagcanacagaccaagaacttcactg

SEQ ID NO: 25339 - DNA, 177 bp, Glycine max
  Clone ID: PAT_MRT3847_122883C.1
ttgagtggaagaaaaacaatttttattattaaatttagtaagtaatacattaaatctatgtagtaacgtactccgagtgtaattaagaatctctcatcctattaataatacatatgataagatcattaattgtaaatatcctagctatatatctatcttattatagctacaaattaa

SEQ ID NO: 25340 - DNA, 893 bp, Glycine max
  unsure (1)..(893): unsure at all n locations
  Clone ID: PAT_MRT3847_122884C.1
cgttgctcttttaatgcccttctgggtttctgctntattccatgagctgtgcatcgctgttccttgccacatattcaagttgtgggctttcggtggaattatgtttcaggttcctttggtcttcatcactaattatctgcaaaataaattcagaaactcgatggttggaaatatgattttttggttcatattcagtattcttggtcaacctatgtgcgtactgctatattaccatgacttaatgaataggaaaggcaaacttgactgaaggtgcacgtggataagcttttctgtttttggagtgtataattgatgtcgatatgttgatcaatattgttttccacgagtactttcatctaccatggcagtggctgctctgaaggatttccacctgatataccaggtcgcgaggctaattcatcttgatctatgtacttatcaactctcctctggcaattgtatcgatatatgcaattttgagagccatacactggcattgataactgccaaggaacagtgtagctgttttctgttaaatgttaattagtagagagctagatgtaaataatttatgctcaatatatttatttcttcctattcttcaagttccacggatgaatgatgatgtctttttatatagctgtttctttctgctacaaaacttacataacactttataggtgctgtttatgttgtttgctaattagaattgaagtttcaattcgataatcttcataatgaaggttaacatttaaaaattatgtaaattatcaaaataaaactataattctgattaanaaaaaaaaaaaagacagaaaccgaaaaaaaataattgggaaggatattttggaaaaaacctataaggatcggattcataggactgtttttgttaa

SEQ ID NO: 25341 - DNA, 278 bp, Glycine max
  Clone ID: PAT_MRT3847_122885C.1
cccggtcgaccccgcgtccgccccgcgtccgccccgcgtccggaaccacttggggtaacataactcctaacactggaaactttgctgattctgaatcttcatttcacttttcattcaataccatgtctcctttgcctgtccgagataccaagacaaatgattctgtatctgatgatgctttttcaaaccgcactgggaatgatatggggggtttacaaacaaaatgctctgtaaaagacatgatgaattcttccaaggggaggaattacccccccatc

SEQ ID NO: 25342 - DNA, 335 bp, Glycine max
  Clone ID: PAT_MRT3847_122886C.1
gaccaatgtcgtatcttgactaccgaggatttgctagttgctaccttgagacgcaagcctctctatggttctctctataaatagtggatctctcttcatccccacattcacttttgatttgattcttttccccactttcagaacagcagcaacaaggtatagagagagagagagagagagagccaaaataaaaacaaactagtactcaacaaaaagagaaagagaaacctcttaaacacgcacccttaattcctacctcaaagaaagtactactcttcaaaaattttctattcactgaagaaggatctttgcacttgcacttgcagccatctatc

SEQ ID NO: 25343 - DNA, 162 bp, Glycine max
  unsure (1)..(162): unsure at all n locations
  Clone ID: PAT_MRT3847_122887C.1
gttttcggcgagttcggagattacaancntctaccttcttccgnggattccaaactgcaagctatcngcgnaagcttagcgaaacaagaggacaagccgtgttgctccgtcgaagagttnaancccgtgatacacgctgctnagctgncagaggtcnantct

SEQ ID NO: 25344 - DNA, 1033 bp, Glycine max
  Clone ID: PAT_MRT3847_122888C.1
cggggtcctcaaaccggcgtaaaagaaaccgtctgaaacgctcctcctctttccgttctctctctctggggcacttgatttcgtcaaaaggcaaagggatgtgttcccgagtgaatgatgttggtttgtatttgctgatgcaattggtggttatgttggtttaagaagcgaaactgaaagaagagggagggtcctcaaaacggcgtaaaagaaactgtctgaaacgctcctcttctctctcaaaaggcaaaagggttgtgttcacgagtgaacggtgttgatttgtatttgctgatgcaattggtggttaggttggtttaagaagctaagaactgttgctactacttcacaatgggcgctgcttgttgtgttgctgccagagacaaaaccatacaaagtggatcaaccagtgacaatttgcatcggaatgttcgatgttctccaacatggagctttcgttgggatcatcgagggcgtgtagctggtgaagatacttctataaattggttttctgacggtattagcaggaatgatggatcagagaataaaaatgaatcaacatatatgtcagaggacggaagtccactgcagaatgatcaacggaaaagatgccaaaaaccatcaatttcgcaagtaactgctgcacataggagaaattcaacttcagaccaatctttttcaaggactgtttctacagatgtgagcgtcgaacaggtgaataggttggcagaatcatcaatagtatcttgcccatctcccacaaaaccatcactgccttcaacttcattatcagcatctcctttatcatctcaatgtcacatacctccatcgagctcggcacctttgaggtggccctgccattccccaggacaccacctatcacagcaagcttattatagccgtatcccagcagttaagtcacccagcagcttctctttgtctgacgaaaggcctgtgttttcttcatggagcaatgaagtgggtatgcactcccatggtggatcttcaaattgttggtctatacctggctttt

SEQ ID NO: 25345 - DNA, 2144 bp, Glycine max
  Clone ID: PAT_MRT3847_122889C.1
tcgaattttctcccccaaatcgtatatctacggttaaatgcaggcgatgtgtaattctatgtagccgtgtaactgaatgattgatgtacctttttttttaattgaaatgaagttttgtttacatgataccagttttaggatcaaaaggttgaatcagtgaaaattgggcattcgttgttctcgtatgcttctcagtaaactggtgattttagtgagtataaattgaaaaggtttgctaatgttaaattggtgtagtgtggtaagatgggaggaggatttagagtgcttcacttagttaggccatttctctcgtttcttcctgaagttcaaactgctgacaggaaagtgccatttagagagaaggtcatatacactgtgatctctcttttcattttcctggtttgtagtcagctccctctatatgggatacactcaacaacaggtgcctgatccattctattggatgcgtgttattctcgcttcaaaccgtggaactgtcatggaacttggaatcactccgattgtgacttctgggctagtaatgcaacttctggctgggtcaaagatcattgaagtggacaacattgtaccagaggaatcgagccctgtttaacggagcacagaagctacttggtattttgatagctgttggtgaggcagttgcctatgttctttcggggatgtatggtagtgtggggcaactcggagtaggaaatgctatcctcatcattatccagctctgttttgcgggtataattgtgatatgtctagatgagcttcttcaaaaaggatatggtctggggtctggaatttcccttttcatagcaactaatatctgtgaaaacattatatggaaggcatttagtcccaccactattaacagtggacgtggagctgaatttgaaggtgctgttattgctctgttccatttgctgataactagaacagacaaggtccgtgctcttcgtgaggcattttaccggcagaatcttcccaacgtgacaaatttgcttgctactgtcttgatcttcctaattgtcatatacttccaaggtttccgggtggtcttgcctgtaaggtcaaagaatgctcgtgggcagcagggttcatatccaatcaaattgttttatacctccaatatgcccatcattcttcagtctgcccttgtttccaatctctacttcatctcccagctgctccaccgtaagtacagcggaaacttctttgtagatctattgggaaaatggaaggaatctgaatatggaggtggtcagtctgttcctgttggtggtattgcatactacatcactgcaccatccagcttagctgatatggcggccaatcctttccatgcactgttctatcttgtgtttatgctttcagcttgtgccttgttctcaaaaacatggattgaagtctctggttcatctgctagagatgttgccaagcagctgaaggaacaacaaatggtaatgcccggacaccgtgagtcaaacttgcagaaagagctgaatcgatacattcccactgccgcagcatttggaggcatctgtattggtgccctgacagtgttggcagatttcatgggggccatcggttcaggaacaggaatattgcttgcagtaaccatcatctatcagtactttgagacatttgagaaggagagagctagcgagcttggcttctttggtttctaagttctgccaatgagctctcccacaccccttgtttgagggatcgttatacttgtaggtcgtttaacatcgtaagggaggacatagtctagtttgttgtcattttttttacttctttttcccctttcaactgaggaagtatgtagtacatcgttaacatttttgggtttcctcaaaatatacttgagtttatcattggattgaatctatattaaagtctgatagcaatgtttaaaaaactggatcttaaattcacctgcttagtgatggaaattggaaatcgcttagtgcgttgtacatttcctcgactagcctgacattatataaaactgattttaaacttttttaatgtgcaaatgttaaaattaaaattagaaaaataaaagttatatattgatggtgtaaatttttttacataactattatttaattataattaaaaaaaaaaaa

SEQ ID NO: 25346 - DNA, 102 bp, Glycine max
  Clone ID: PAT_MRT3847_12288C.1
atatcatatagctgagattgaagtttgttccatatttgtgattgttcaggcgcacgcacgtttgtaataacagttttatttgttaaggttcaatttaataag

SEQ ID NO: 25347 - DNA, 473 bp, Glycine max
  Clone ID: PAT_MRT3847_122891C.1
gttcaattaaaaacaatgatgaagaattttgcctactacttcagtcaaaaacaacaacatcaacgtttttgtaggtttttcccacacagccttggattcttggttcgttttctagccttccatgtccaccccttctttattcaactttgttattttgtgattctttctctgcttggttacctcggtctcaaggcctccaagccaaggaccccccttagaccaaatgacttggacctcttttacacctcagtttctgcttccacagtttctagcatggtagccgttgaaatggaggttgtctccaattctcaactaattctcctaacccttctcatgtttgttggtggcgaagttttcacttccatgctcgaccttgtatttgctaggtataaattcacccggagtgtccaaaataaagttacaccaatcattcttacctgactcgaacaagattacctccggtagatgatact

SEQ ID NO: 25348 - DNA, 1003 bp, Glycine max
  Clone ID: PAT_MRT3847_122892C.1
ccaaaaataaaaatgtgcgtgagaagaaagaaacatttttttaacaagatattagtaccaaaaaataatgattaatctttccagcaaaatgaagattcttttctaataaaatttatttcatatctaaatattaattaaaatacaaaataaaaacacaatttattaccacttttgttttgagaagaggtgagagagaaagtatgtgggagcttagtggacattaaaatggaaggagcccttccttttccggcactttcttttgctttcagtccccacttccctttttattaacacttcacaaaacaaactctctcatctcctcacacttcaaatccaaatatctctgttctcaatattccacccccttttctcttctctcttctttctctattctcagatccattgctttatcccacagcttccaccactgcatccaaacacgcccttctctcatgtaagaacctctctctctctctctctctctcctttccattcattcatactattattattatttgtgaaattagattgtgtttgtttgtttttatgttgttggaaggaaagggattattgagatgatgtatatgaaatgaaaatcttggatgtgaggctaaggattctcgtatttgtctctattcatcgttatctaaccgcaactacaactttgtttctttcgtagtcattatcctaccgccacaccgaactagtttatttttgtcttgtttttgggctcatcggaaaaaatcgaattactcgaatataccgtaataatcgtcaataaaataaaattattttcttcgtgactttttttattttaaaataacaaaaaaatagtatttattttgcgtgtgaaatgcaaaatgcaaccaccacgtttaagtgaggtgattgcgctgcacgacgcgtggatatagctgtaccttaggtacagccagttgtccgtgatattcaggcacgagattacatgataaaaaaaaaaggtcaaaatttatggctatttaat

SEQ ID NO: 25349 - DNA, 250 bp, Glycine max
  Clone ID: PAT_MRT3847_122893C.1
tttatgctcagcggaccaccaaggaccggaccgaggagttggacgaaaaggtcgaccctttacactgccctctacattgagacatccagtgggacgggccggtggagggagcagtggttagaggcaaagacagggaaaaagacatgaggcaaggatcaaggcacggtcctcgtaacgagaaaagggaagaggaaacgggcgtttgagcacatgagccagctcacaatgaatgtcacataggtgccggcaa

SEQ ID NO: 25350 - DNA, 698 bp, Glycine max
  Clone ID: PAT_MRT3847_122894C.1
cgtgagacacttgaaaagaacgaagaaaaggggaaagggtttcgatttcggaagaggaacaataaggagagcttctgaaagagagggttcagtgttcctaaaatgaagacgacgaagggcggcaaggtcatgaaccctaccgatgcttaccgaaaggagcttcggaagaaagaattgaaaaggaataagaaggaaagaaagaaggtgacggaagtggggattttgaagaaagatcctgatcaattgaagaagcagattgacaacttggaaatgatgaaggctgatggtgctttggataaagcaagaaagcacaagaagagacagctacaagatacacttaatcttgtcctaaagaagaggagggaatatgaagacaaaatgcgggagaagggtgagaccccagttatgttcagtcatttggggcttcctcgaaggagaacaactgcagaagaagaagaaagggttaagcacccaaagcctgaggactctgtttattaccatcctacattaaaccctacaggggctccaccaccagggaaacctcctatgtttaaatcatctataggacccagaattcctttgtctggtgcttcatcaagtgctggtgcatcatcctcaggaacagagttggaggatgatgtattaactgtacctccacctcccccgccgccaacactgcctgatggtagcagtgcgag

SEQ ID NO: 25351 - DNA, 2464 bp, Glycine max
  unsure (1)..(2464): unsure at all n locations
  Clone ID: PAT_MRT3847_122895C.1
ccagcgtccggcgtttttctcttcttcttcttctgcgcataacagcaccaacaatggtgaagcattacagacccccggggaagaaaaaggagggaaatgctgccaaatttgttattaggtcacaggcactcaagcagcttcaaatcagtttaccccttttcaggaaactatgtattttgaaaggtgtaactccccgggagcccaagaaaaagttcaagggaactcatcagacttattaccatgtcaaggatgtttccttccttcatcacgagcctttggttgaaatacatagagcgataagagtgcatgagagaaaaattaagaaagccgaggcaaagaaaaaccttgaacgtgctaacaggcttcgcgagaaaacacccaaaccgaagatcgctaggattattcggcagaggtacccaagatttgtggatgcactcggagaattggatgactgccttacagtggtgcacctttttgcagcattacctgcatcagagagtaaaaaaattgacgtggagtgtgtccataaatgtcgaagattggcacatgaatggcaagcattcgtatctcgcactcacaagttaagaaaaacgtttgtatctgtgaaaggcatatactaccaggctgaggtcgagggccagacaataacatggttaactcctcattcactacaacaggttgtatctgatgatgttgacatcactaccatgctaaactttctgcaattgtatgagcctcttcttagttttgttaaagtccgccgataccattctataaatttgaagtatccccccatacttgatcctcagttggaagctttggcagcagatctatatgctctgtcaaggtatgccagtgccaataccagaccctctgtactgatttctgaagcttctcaagctgaatctgaacaagtggagaccaagcaaaaagaggcagagactggagataaaacatctgaactaagacttgctcaacttcagcatcaacttccttctaatgaacctggtgcactaatgcacctcgttgaggaagttactggtgaagatgaagaggaccaggatacaaaagaatgtaaaaagctctttaaaaatatgaaattcttcataagcagggaggtaccgagggaatcaatgttttttgttattcctgcttttggtggcattgtttcctgggagggagaaggggcaccttttggggaatctgaccagagcatttctcatcagattgttgacagggaagcacaaggacatcggttcctctcaagagaatatgttcaaccacagtgggtatatgactgtgtgaatgcacggattattttgccaactgagaattatttggtgggaaggactcctccaccacacttgtcaccttttattaactacgatgaagaaggagcatacattcctgattatgcaaagaccattaaacacttgcaagctgctgccagaaaggaaatccttccacttcctggtgttgggaaggaagatctggaagatcctcaaaatcttctggttgaaggtatcattgatcgagcagaggctaatgatgcagctcagagaaagcagaagatgatgattttggagcagcaataccgtgatgatttgaaaaaagaacttcaaggtgttacatatacttcagcaggttctaaagaaacatctactggagtggtacagactggtgaatcaactgccagtgttcaagaaaatgttgatgatgacatgagtaaagttatgatgtcacgtaaaaaaaggaagctagctgaagccatgaagatatctaagaaactgaaggaagctcagactgatcgcattaaacaacggaaaaagaaaatagatgaagctcaaaggcaaaggagttgaagagatgctgcattctcaaggattccagcacgacttcattgtgtcatagctgatgatttgaaaggttaagtcatttttgttcggagtataggcagttgaacttattctagtcttgttctctatgttttgtaaccgatatgtttctaggccaaaaagaaaaaatattttgatttagcaccggatgtttttataacatctcaggtttgagcctttgaaagattaaactatggttaagagactaggggtatttaaaatctaattaaattattctttattgtcaaagtgataaaaaagaattcaaattgataatagcaaggtgctaccttgtattttaaaatgagcagattacctgattgagttcggaaagtgtaatcgattttacaatcatcttcttttgttagggtccttttgatttaaagatatgaaagtgaattgggatgacaaaagaggaaatgtttaaattaaaataaagtgttgaggaatgagatttgtctttttttgaaacttaaatgtactcaagtgtaattaaatcaaatttattattaggggtgtaagtggtttttggttaaaaannnnnaaaaaaaaaaaaaaaaaaagggccg

SEQ ID NO: 25352 - DNA, 209 bp, Glycine max
  Clone ID: PAT_MRT3847_122896C.1
ggggagaatgtgggtggggtggtaattcgcgtacatctctctccccaaaaaatacaggcccaactcaaaacaccaattgggagttgataaacgggcatacaacgaatgcttattgccttcaacccccctcgatccttttttttcagcttgccgactttttatgcttaagtgcttaagtgaaaaccatgctttttttttttttaaccatt

SEQ ID NO: 25353 - DNA, 191 bp, Glycine max
  unsure (1)..(191): unsure at all n locations
  Clone ID: PAT_MRT3847_122897C.1
nacgtcgcanncncgcntacgtaagctcggaattcggctcgagcttnncnnnncatcttagatgtaccantgctncntttagtagnantttgttcgtgtnatcttgngtgnagttgtgntgatccctncaaaagtgcaantagaacttgtgntncacataanaccatatcgtactctnntaannaaaatan

SEQ ID NO: 25354 - DNA, 259 bp, Glycine max
  unsure (1)..(259): unsure at all n locations
  Clone ID: PAT_MRT3847_122898C.1
gagtttncaccanatgtacgtgatatcacactggtagatcncccatgcatgacnnaagggncctgtgggnnaccagcnnctgaattgaagctcgcatcagaacaatgancatgtcataagtcaaactncactgtncatctagcgtnacacangatcaattgcaatcantgtctcantgnaggtgntatctatgnaagaccacnggancaaagtgantatgnaggatatgcgaacgtcagaagnagccncgctgtagagg

SEQ ID NO: 25355 - DNA, 629 bp, Glycine max
  Clone ID: PAT_MRT3847_122899C.1
gtcactggcgtggaaggctagatagcgagagtaaaattgggcttggtcttttagtggtgttcttcggagtccgaagtcttcttcttaactgtcttccaagtgtgtttatcaggcagattctgtgtgtgttgcatgtattgtttgtaggcagtggtgttcagccctgaaacggctatccattagagctgtggtgatcggagagtccctcacggcttacttggttgaagggtgagccctaaaagttagggcaagtgacttacaggcagcaagcctgccatgagctgttgagttgtgtaggccctttgctggggcacaagctagctaaagagagacagcacgattgccacaactcgatggggggccggccggaggtaggcgtaaggctacattgactaagtgccctaccgtggctaccggtgccaaacacagcccaaacgtgaagcaacgtaaacaaagagttaaagtggctatcagccggtaaggtaagacgccaacaatagccgatgcttggaaagcaacgtatagtacgagagctgcctaaaaaagcaagcccgcaattaatactaattagcgtaaaacaatacgtacgaaatatgcagaaacgcaacaaccgcaagccacagcgctgc

SEQ ID NO: 25356 - DNA, 587 bp, Glycine max
  unsure (1)..(587): unsure at all n locations
  Clone ID: PAT_MRT3847_12289C.1
ctcgagccgattcggctcgagaattaatcatttaaaaattataaaaataattataagttttaataaaaaaaattaaatctaatcataaaataataaaaaaataactacaaaaaagtaaagttttatacttttaccttttgtatcaggattatttaataataaaataaaaattacaatctcgaaaaataaagatttaagcataattatttttaatatttcacaattatataaaaattatatttagattttataaaaatacaatttattaatatctagttatctaagaaattaatttaattaaagttaacatatttaattaatttaaaattaaattttagtaaacaaaaatcttaaaagataagttataagataaaatataaaaaaattaaaactcaatactggtagtaataaaaatattcaacagttaagtttgtaaaaatttaagtgaaaaaaatttaaataaaatttattttaaaaatagattataaataaacacaaataagttaagtaaaatgaataaattaatatataagaattattntaaagcaagaactcggcaagtaattttcagctgttatcaaaacata

SEQ ID NO: 25357 - DNA, 441 bp, Glycine max
  Clone ID: PAT_MRT3847_1228C.1
ctttttggccccgggtttcttaacccaatgggattcacgattgccaggctgaaaacagtttggccctccaggataaaaggtgggggcctccttttccgaaggaggggctgttcttacccaaaatgggaggttttaccttggggaacaaaataacgaccccgaacgtgcaaaaaaacttccctgtttggcagatctggttgggaaagatagcatctgggactgctcacagggcacatgcttcatcagagggtggtactaaatacctgcagcacatctgcggctgggtttctttcgcaaaaggaacctgtttaccttgtagcggcggaatgaaggcccaaaagggcctaaggtggcgagtttggaggatccaatgtctcataccaaactggagagattgactctctttcgcaaaaagctgacattcttcttgttgtgggagga

SEQ ID NO: 25358 - DNA, 262 bp, Glycine max
  Clone ID: PAT_MRT3847_122900C.1
acgacctaaccccgcggatggcgccgaatctggacaggcaccttgtgttccccctcctggagttcctgcaggagcgccactgtacgacgacaaccacatcctgaaggcgaagatcgacctcctcaacaacaccaacatggtcgactacccatggacatccataaaagcctatatcacaccgaggaggtaccccacgacatggtcgaccgcaggccgaggtagtcgcccgcctcaagtccctcgaggaggctgccgcccccct

SEQ ID NO: 25359 - DNA, 358 bp, Glycine max
  Clone ID: PAT_MRT3847_122901C.1
acaagggaaaagggtgctacatttaaaccccagaaaatcaacgtattaaggaaggggaataccccaccaagcataaacctacaaaacagttatcaaggaaacgatcgaaaaggctattcccgggggaagttaaggatcttaaaaaaaattaacaggggaaggaaaaaaattgggttttgaaagaacaaaagccctaataaggcgtttccatgaaggggataaaaactctattcgagggcatcaatccaatcaccataaatcctacggattttatcgggacctttccactttggaggggctctctggccgggcctctgaaaaccatggaagaaggcctttgtgaagggactccaatatg

SEQ ID NO: 25360 - DNA, 376 bp, Glycine max
  Clone ID: PAT_MRT3847_122902C.1
tattccacttacttttaggaaagctggtaccccctgcaggacccggcccgaatttccgggttcaaccaagccttccgccgcttcttcgatacggctgaaggagggcgaaaggactgaatttccagaaccccttcgggttttagaggcaacaggttttaattaagccctgtttgtatcccgcttctgaatctttgagggttaaaaggaaggaaagggatgcgctaatgatggagcaattgaacttctgcgggtgctctccaacaaattgaaagcaattacaatgcccttgatggttgattggtttcctaggggtgcagtgaatcttccaaatgggtggatctccccgaaaactcacggggttctaaaaatcttttgg

SEQ ID NO: 25361 - DNA, 341 bp, Glycine max
  Clone ID: PAT_MRT3847_122903C.1
actcacgcgttcgtgcgtattatacgatagtatatagtttgattttttaccaaaaaaataaatagtttatttctattaaaaaaatttaaaaataataaaaaaataaaaaaaaaaaaaaaaaaaaaaaaaaaaaaaaaaaaaaaataaaaaaatataaaaaaaaattaaattatataaaaattaaatatatatattagaaaaaaaaaaaaaatatatttatgtttaaaagatgtaaaaagtagtgaattgtaaaaatgttggggtttccctcctttatgggaattgggaaacaataccctgtttaacacgggggtgctatttatctatgtgctcccataaaa

SEQ ID NO: 25362 - DNA, 2541 bp, Glycine max
  Clone ID: PAT_MRT3847_122904C.1
ggtaattattcattgcatgtatggatcttatatcaaagagtgacgtaagattgatatttacagttgcttcgtttcttacatttatgcacgcgtgaaaaggttgatccaattgaaaaacctttatctttcaagaatgatggctgacacatacacgcgacaatacttacaactgtcatctattattaattattgtgtgcatatgccaatcctactcatgcacatattatggtgcaaatacttgatgcttatccagcaatctggtgcgtgattaatgggtgacgcagtgtgttcccacaaaaatatatcatatgatatatctcatcttttataaatacacaatctcacttttcgactccactaagagatcacagacatccaatgacgatgacgagttgtgtcaacctcaaaatatggcttcttaactttgttatcttgtttagtatggtttccttgtcccatggaggccggcgatgagaaaaagatggaactggaacatgtgaccagcttgtcaagaagagatcatgaaagaccaaatcccttttttcgagtgagagcagttagcttgggtggttggttggttactgaaggttggatcaaaccttctctcttcgatggcattccaaacaaagacttattggatggaactagtcttcggttcaagtctgtgtcaacagggaaatatctatgtgccaagtctggagggggaaatgtcctacttgcgaacggcacaggtgcttcaacggcttgggaaacaattacattgtggaggataaacgaagatactttcagattgagggtgttcaacaaacagtttgtggggttagatgggattaacgttgttgctgtttccgatactcccatccattctgacacgtttcgaatagtaaaagaaagtgacagttcaagtcgtgttcgaatcaaagcacccaatgggcactttatgcaggcaaagacagaggagctggtgattgctgatgtttccaatgctaacggatggggagatgatgacccaaccatctttgagatgacaatcgttgcaaccttacaaggggaattccaattgacaaatggctatgggccaaataaagctccggaaattatgaaggaacattggaacacttttattgttgaagatgatttcaagttcatgaagagtcatggattagatgctgctagaattcccgttggctggtggatagcaagtgatccatatccacccccaccttatgtcgggggttccttgcacgcattagacaatgccttcaagtgggcacagaaacatggattgaaaatcattatcgatcttcatgctgcacccggctcacaaaatggctttgacagcagctctacaagagatggttctctagagtggggaaaaacatatgaaaacatcaagcaaacagtttacgttatagacttcctaactgccaggtatgcaaaaaaacccgagcctttacgcagttgagctcttaaacgagcctttgtttcctaacgtgactctagagagcttgaccaagtactacaatgatgcttacaatgcagtgcgcaggcactcttccacagcttatgtggtgttatcaaataggttggatctctcaagtcaactagaaatcccaaacaccaaggaactcttccctcttgccacaggccttaggcgatgtgtgattgatgtccactactacaatctctattatgatatatttgaagacatgaatgcgcaagagaacattgatttcatctacaaagtccgttcatcacagttggataatattacaaccgtagatggtcctctcactttcgtgggtgaatggactgctgagtggaaggttgaaggggctaccaaaaaggattatcaaagatttgtcaaggctgaattagatgtttttgggcgagcaacatttgggtggtgttattggacactcaagaacgtcaataatcattggagtttggaatggatgatcaagaatggctacatttaagttttaaaaaaattcctcttgccgtgtgcaccctctattcctatcatattatgcccttttaatatttctcaatatcaattatgatattgatatcataattaatgtctacgtatagatctttaacgttcttcacttccggaaaggcagaaatatcaaagttgtagaccctttcattagtgaaaacggttcaaaataatgaaagtctcttctctgtttttaacataaaaaaaaaaaaaaaaaaaaaaaaaaaaaaaaaaaaaaaaaaaaaaaaaaaaaaaaaaaaaaaaaaaaaaaaaaaaaaaaaaaaaaaaaaaggggcggccgcatgagatatattatagcgtcacaaagaatgaactataatcacaaggcctaatgactggttggcttttagtttgatttttatttacatgtttagaaattgaaagtccttcaactaattaaagtttttgaagaaaaaaaacaaacaaacattctttgaagtttgaatataatcaaaaccaaatatgtctccccatgtacatgtatattcagagcttattattttttatggtatatacga

SEQ ID NO: 25363 - DNA, 480 bp, Glycine max
  Clone ID: PAT_MRT3847_122905C.1
ggctcgagcgcaacgcaattttacccaacaaaactctctctctttctctcactttctaataatggagagcctcccgcttgagacggcggagaagatcatcctgcgctgggactccaccgcgtcggaggatgcccgcgacaagatgatattctccggcggcgtggaccgcgatgaggccgatctctacctccaagccgtggacgaaatccaacggtccctctcctccgtctccgtctcctcctccgacaaagtcaactccgccatccagattgccatggcccgcttagaagacgagttccgcaacatcctcatctcccacaccatccccttcgacccttccacctccgaagacgatccctcccaaaccctcccagaccttcttccttcctccacctcttccccaaaacaccctctcaccaacctcgaacaagattcaacagaaactgagccagaaactactaacaccaccaccaccaccac

SEQ ID NO: 25364 - DNA, 361 bp, Glycine max
  Clone ID: PAT_MRT3847_122906C.1
aaacacttctaatcaggaccacctaagtggtaaacactgtttattgagcgcagactctgccataataatcatacacatacattgtgtcaccaattctggccactttttattgggtggattggataaatgagcatgctccacatcttatggatcaaataccaaagggcggaaactgaattttagaaccatcgtcaactttatactcaccatgcttgtacgacacattcatgcgtaacaaaccttgggctctgcattgccagacacttattgacaattctgcatacacttgataattggagcacccagtacatgatccttagtggggatggcaacgaagtattccagcggtgccaccaaacct

SEQ ID NO: 25365 - DNA, 605 bp, Glycine max
  Clone ID: PAT_MRT3847_122907C.1
tttggtttttttttttgactgttttttttttttgtttttttgtagttggtttgttctctccggcaacaaaactaaaaagacctaaagccgggtgtagccctgtccccaataaaaaagaaaccacccgcaccaccgggcctggggacttgggaaaaaaaaacccaaggggcctttccctttttttgggaaaaccaaaaataaaaacggtcccccctttccccggggcccggggggggacccggaaattcgggcccgggcccggcggggttcccctttttccttatagggagaacttttggacctgggcggaaccaggggcataccggttcccgggggaaaaaggttaaccgttcacaattccccccaacatggaacccggaaccttaaagcgtaaggcccggggggcctaaggggccccccccccgccatatttgggttcgggccaaatgcccaatttgaaaacgggaaaccccacgggccaaccggaaaaaaaaacccccaaccccggggggacgacgatttggccaccccccccccccgggggggtttccctcttacccccgggtaaaacgggcgaaaaaaccctttgtccccccccccccccc

SEQ ID NO: 25366 - DNA, 454 bp, Glycine max
  Clone ID: PAT_MRT3847_122908C.1
gtgaaattgtaaaagacacagaaaaatgtcattttctaatttgttttctgaagtataaaacaattaacaaatgagatataaacataaaatcgtaattgatgccactaatgtgttattactatgtttgcatgaaaaaatattatgattatctgttcaggccatcatgaaattttttatataatgtctattattaagcttgattgagtattacttgacattataagcatagaatgaatatcatgttaaaggtgttggatttggaaaaagatacaaagtaacacgttaccaataaaaagtacataatgtgtcaaatagttaataaatttactagtactatatcactttaagaaacggtttattaggattttcctttatctaaacaaaaaaagtattgattattaatcttttttcatcaacttatcatggattattgggttctataatttaatgcctg

SEQ ID NO: 25367 - DNA, 203 bp, Glycine max
  unsure (1)..(203): unsure at all n locations
  Clone ID: PAT_MRT3847_122909C.1
ctctctcttgttacacattctacattctctctctattatttatcaccctttttctctcttttgcaaagaaaacaatttaattaagtcaatttgtaccaaaattggcttctacaagttctgtggcaaactattggtgctttcatacaacgggtggatgncnatgggttgaaaatcaacggtgctcttctaatgtcctgatggaa

SEQ ID NO: 25368 - DNA, 190 bp, Glycine max
  Clone ID: PAT_MRT3847_12290C.1
tgggggggggggggggggggggggggggggtgggggggaagaagagagatcgaagcaagacaataacattaccggaatataccaacaggcgtacccacaaactcgacccaccatacgatttacaccaatggtgaacaaaaatgtaaccgcttagcgctgggaaaattagagttgatgccccctaattaag

SEQ ID NO: 25369 - DNA, 187 bp, Glycine max
  Clone ID: PAT_MRT3847_122910C.1
tcatctctggatctggctgctcagccctcagtagtggcgtacccaatgaattaccctgatttaccaaatgattcggtctgcgcctaacataatttttcaagtggttacggctcaaacgtttcaacctgtaaaagggctccaaatacttaagcctgggtccttcctgcttgttagtattaggtctacc

SEQ ID NO: 25370 - DNA, 279 bp, Glycine max
  Clone ID: PAT_MRT3847_122911C.1
aaaaacaaaactgatagggattgtcttttattaaaaaaattcacaggaacatcaagaattcacaattaacactccaccagaaaaaaaccttatttgataaatttttccttacaaaagtgatccctaaagccaaagggttaaaagataaccccttaatagttttgcgcttttggtataaaatttttcccccaccccccacccattaaaaaccccccttgataaaaaacttaaaaaaagtttcggggggggggaaaaaaataaaatacctacgggacagta

SEQ ID NO: 25371 - DNA, 440 bp, Glycine max
  Clone ID: PAT_MRT3847_122912C.1
gttacttttatccgttaaacctgtattataacatgtgtcgtgacaattatttcgactacaatctaaatatgcacttggttcattcaagttaacctattgtgaactagggagtttcttcgtgcactccaactattgcttcttacacttttcattagatttcaaaaagtccaattcggattggatttttcgaaatgcaatgagaaatgtatgaaattttagcctctgaactaacattgtttgatactgtaaataatggaaggaatggtccagcatttgacacgcgaaggaagaaaagaaaagcatgcgagtcccatactcccatggaagaatagtttaccaagcttaatggctaagtccaccaatacacattaaaaaaatgaatctcatatttttatggactaaaagggcttgtctcaatagatcaaaagtctacattcaag

SEQ ID NO: 25372 - DNA, 440 bp, Glycine max
  unsure (1)..(440): unsure at all n locations
  Clone ID: PAT_MRT3847_122913C.1
caaccgtggccgactcatctcattaccttgattaactnctcgatagtgctttaggtnattttagaacctttaacatcaatccttcccctccaagtgcagaatcaactactaatagcaagaacgatagtccttctttgccatcggtggttcaaagattcaacatatgtttacccaatctgagaactaataaaaatgagaaacacaatgctttcaaagacagccacgatatcaatacactcaacaagctcatggatcaaaccaaacacgctgttaagaaagcttgagtctatatccccacccactgcctatgatttacttaatgatgcctacatggaagaatgtgacaaacaatttcaacaccttactgactctcatgacatggaatctattctccataccatcatgcatcaacttatgtccaaagagatacttcattaacc

SEQ ID NO: 25373 - DNA, 434 bp, Glycine max
  Clone ID: PAT_MRT3847_122914C.1
ttaacggtgaacacgcccggccgaagttcgaaggtctagaaggctgacagcccctttcctacgcactgcggctaactatgagtatggactattctggcactagtatcaggaaggaaaaatagaatcagaggtcaagctcacaggaattctaacattaggagcatcgcaaccaggtgaaactggaaaatatggcacaaccatagcacctggactatacgcgcctgtccaccaacattttactggtgctcgaatggacatggcactacaatgcaagcctggggaagcatctaatcaggttcgagacgtgaacgtcaaagatgaaaagacaggagacaacaatgttcataacaatgcatgaaatgctgaagaacaactgcttaaatcacaaatggaagcaaagcgtgattgtgaccctttatctgcgtcaaactgga

SEQ ID NO: 25374 - DNA, 113 bp, Glycine max
  Clone ID: PAT_MRT3847_122915C.1
actcataccgaaactcggaattcgactctagcagagagagatatggcagattacgacgatagagacgaaggtaacggagaatgagaggaacttcacaattctcttcctcatcc

SEQ ID NO: 25375 - DNA, 840 bp, Glycine max
  Clone ID: PAT_MRT3847_122916C.1
cccacgcgtcggagtgtgaatgaagggttatggtggaacaagtttgaggcactgacaccgcttgagcaaaagcaggagataaacattaaacactgcaaaattcgtaggaaccgcacaattgagctagttgcaagtcaccaccatggcacttgttcaaccctttgcttctctttcaatctcttttcgcgatgctcgtgttttcactgcaccaaaatgctctcccaccactcactttcctcatcggaatttggttccaactcgagcatcattcatcgctggttccccactgttgattcgaagaaatcatggaaggaatggtgcatgcaaagcaatgcctgtttcaataagatgtgagcaaagtacccaggaagggaacagtttagatgtgtggctaggccggctagccatggttgggtttgcagtagccatcactgttgaaattgctaccgggaagggactcctagagaactttggactcacaagtccactgcctacagttgcccttgcagtaacagcacttgtgggtgtcttgacggctgtttttatcttccagtcagcctcaaagaactaatcacatattccgactccttgtgtttgttgtaaattctgaagctcagagatttcattttgggagattaattttatcatccttttctgtaatatttgtttcgatgaaaagaattggcaatgaagcctgaaaaatcaaagtaactacgtgttaaatatagtatgacctcagctttccctgttgcctaaaaaaaaaaaaaaaaaaaaaataaaaaaaaaaaaggaaaaaaaaaaaaaaaatacaagcaaaaaaaaaaaaaaaaaaaaaaaaaa

SEQ ID NO: 25376 - DNA, 702 bp, Glycine max
  unsure (1)..(702): unsure at all n locations
  Clone ID: PAT_MRT3847_122917C.1
atgggtttcccttcttttgctgattgttgtcagttgtcttcttttaagccccaaaaagcagcgaaaatagattgagatgtagtatttatattggcgaaggtgtgagcactgagcagatactttaagctctagggaaaagtaatattctatatctgcgataagaggaagaccaccaccacacaacatagctctgctcaaaaacacaaacacagtgagtgagtgagtgagtgttggctaatatggataaaagctgtgatccctctgcagactctacttacacatcccttcctgccaaccccaacaacaatagcagggatcaatatcttcgccacctcaacaagctttctcaaaagatctccaaacccctcattaagaaacccaccttcgaccctcctcaggcccaagcccaagccccaaacccaaacaatcaggtgcaggcgcagcagaacctgcaacatcagccgcaggtgtacaacatcaacaagaacgacttccgtgatgtggttcagaaactgacgggctcacctgcgcacgaccgtatctcaacaccgtcttccattcagccacccaagccaccgagttcgcgtctgcagcggattcgtcctccttcgttgccgcaaattactaaccggccaccctcgctactcaaccccaccacccttctccgncctcaacttccttaacgccgtaccttcaacaact

SEQ ID NO: 25377 - DNA, 1425 bp, Glycine max
  Clone ID: PAT_MRT3847_122918C.1
gtaggtacatgccaagctccagtaatacaacatttttctgaaacaatctctggatcaacaaccataagaagctttgagaaagaatcaagatttaatgacataaatatgcccacgcgtcccagatagcgccagcccaaattatacagtgctactgcaatcgaatggctgaatttcagattggatattttatctactctcacatttgcctgctgtttggttttcttgatatcttttccaagttcaatgactgctcctggaattgcgggattggctgtgacatatggacttaatctaaatgctgtacaaactaaagtaatctggttttcttgcaatttggagaacaaaattatatctgttgaaagaatgctccaatacacatccctcccaagtgaagctcctcttgtaataaaagataaccaaccagattattcttggccatcatttggagaagttcatatccgggatttacaggttcaatatgctcctcacttgcctattgttttacgaggtcttacttgcacttttactgctggagcaaaaactggtattgtgggaagaacaggaagtggaaaatcaactctagtgcaaacacttttccgacttattgaacctgttgctggacaaatattgatagatagcattaacatctctttcattggaattcatgatttgcggtcccgactgagcattattcctcaagatccaacaatgtttgaagggacaataagaaccaacctggatccactggaagagtacacagatgaacagatttgggaggctctatatatgtgccaacttggagatgaagtaaggaaaaaagaagggaagcttgactccgtagttacagagaatggagaaaattggagtatgggccaaaggcaattggtctgcctcggccgtgttctacttaagaaaagcaagatcttggtgcttgatgaagctactgcatcagttgatacagccacagataatattattcagcaaacagttaagcaacatttttccgaatgcacagtcattaccattgctcataggataacttcaatccttgatagtgacatggttttgtttttaaatcaagggttgattgaggaatatgattcaccaaagaaactgcttaagaacaagtcttcatctctagctcaactagttttgaatacacaaggaggtcaaattctggttttggaaattaaattgaaaatgaattagtattaacctcgaaccagacatgtctatatatatatatatatatatggtcaccgttacacttcatgtagtgttctaccttactggactatggtagagattttactcactctgcttcacatcttactgagacttgtacgagactcactacactttacatcttactcatgctcaaataaattatgcaaactttgaactgtgatgattttatcttaaaaa

SEQ ID NO: 25378 - DNA, 652 bp, Glycine max
  unsure (1)..(652): unsure at all n locations
  Clone ID: PAT_MRT3847_122919C.1
cccggggggacgcacncgtccnccgcacgcgtgcggcgagaagacgacggagggtgacttnaagaagagtcttttctatgagcagagtcgagtatattctacatgagcaggggccgtgagagccagtaaaataagtgatgtggtatagtgctgagttatatcatatgtgtttcagtaaacttaatagtgtgagaacgcattcatttcctatgcgttgagtccagttctgagactatcgnggtgagaaaagtggatctaaagagaaacgcggggtggggtatattagtaacaaggaaattctttgtgcgtaaaaagttccaagagtttgtgtgggagaataacaattgcgaagtttgagagcacccagaaagcattatcaattttaaaagcgctactcgggattgagcgtgtatcaaagtttacttaataagagcttaatttttttttttttttcaataaagaataggttgtgacttccgaaaaagagaatctaggttattttcttacatagaatcctcatatatgggtgagtaacacatacattttttctatagagacattcnaaatctttgattagggcgcgagcgcggggaggagaaattatcatatccggttctttcgggggagggggctataaaagttcacctatccc

SEQ ID NO: 25379 - DNA, 695 bp, Glycine max
  Clone ID: PAT_MRT3847_12291C.1
caaatagggaactctgacttataatacccactccaagttcatgcatatacagaggattgattactcaattacactggccatttaaggaaacagaaatcaccaaaaaaaagaagaaaaaacctaaatgttctttgggaaggaaatagaccgaagatttagcatacagcatacaccaaaaaaaaaaacctatgatttctgcaggataacgcatacaacatttttatgctaaagtagtctaggaaaacgaaaaaatggacattcaaactacccattgaatcggtctgctgaattctggcgtgaagacacatggtgagaaccagctgcaaaacctggcatcctactcccatatccaggtggggcggcactatgttcaaaagcgccatttctaccaactatagcagattcagaccccaaaggatccatccttgcatggtttaattcgtccaggcgaggtgcatatcgctgcatggctggtgtattcatcacataaggagactcagatgccaaaccacaggctggataacttggccccatgttatggctaccagatagatagttgcttgtcacagaattaggattctgaataccataatggcgagtctgttgcctagtgtttaattccttaagatagttctcatcctccttggcatagggtctatatttgaagctatgggcagtgtctctcggaaggctgc

SEQ ID NO: 25380 - DNA, 2555 bp, Glycine max
  Clone ID: PAT_MRT3847_122920C.1
actttagacacatcacggcgtactccaatatcagacaaagctcgagccgaatcggctcaaccccaaacaacacccctcctaatcctctttttctctaacagaaagaaaaactcaacacaacaccccctctccaccctctttttcttttaatttctcatcttatctattaatcttatatacatatatataaagacatagataatagtcatatagatataattatttcgttatattttccttgcatgggctgttaagatgtctcgcacgtgctcacagtgcggcaacaacggccacaactcacggacatgcaccgacggtggcgccgccgggtctccgagggagaacggcatcatgctgttcggcgtaagagtcatgacggaagctaactcctccttcaggaagagcgccagcatgaacaacctctcacagtacgacgcggagttcaacgccgccgacgccggctacgcctccgacgacgtcgttcacgcctccggccgcacgcgcgagcgcaagcgaggtgttccttggacggaggaagagcatagattgttcctgttagggttacacaaagtcggaaaaggagattggagagggatttctagaaacttcgtgaaaactcgcacgcctactcaggtcgctagtcacgctcagaagtactttctccgccgccacaaccagaatcgccgccggcggagatctagcctcttcgacatcaccaccgatacggtgatggaatcttctactataatggaagaagaacaagtgcggccagagacggtggcgacgccgctccccgtcgcatatccggggtcgcattacagggcttttagccggcgcgtgttttccgatagctccggtggtgttgccggtgagtggcgagagactaatcaatccgatcaggccgacaccgattttgccggtgcctccgtttacgatgatggctaatttgaacttgttagagaaagcttctccgacaaatctcattgagcctttgccgttgtcgttgaatctgccatcgccgacgccgcggtctcaggatcagtcgtcggcgagtagtgggcactcgtcaccgtcgtcgtcgtcatcggcggcagcttttcaggctatgtctgcagcgaagttcggcagcggcggggatagtatcatcagcgttgcttgaaaagaaggaaacaagaaaaaaattagtgtcattaagttattaattaagtatggtcttagtagttaatttgcgtgtgtaaattaatgttacttaatcgggcatgtatccaagagggggaaaaattgaagatatgtgttggggatttattgattattacgaaagataatcataatataggtaggagggaggggatatttgaattaatgagtataatggtaattaattatgatttggaaaaataaatatatactatgggtttaggttatgtaggtaattaggcaatttaattgctggtttcagtgtacaggtttagtagaatttagaattagaaagatgggttgtcatattctgtagctgttgagggattcttgtttctgtatgtatgggggagtgtgagcgtgaaatgatagggcaccgggtactcttgagatgcgactggtctgtgtaatgccactggggtcattaaaatattccttagattagattagacaaaggaatatattatgcttaccatttttttttagatttagtttctgtgttcttggacttgggttgaaccaagaagtattcgaatgcaacacaatctaggaccactattacgttggaatgaaaagaatacaacaaaaaaactcttggttgaattaaataaaagctaacacccaaccaatgccaaaccactaaaaactggtggtcataaaacgaagcggtgtagaaactaaagtactagcagcagctaagtaagatgctgcttgcccactgcgaccaacactgacacttgtggatacaagaagacctgttttgcagtaaatagcaaagtcttcacagttattcttgaaaatgttgtagacaccaaacccattttcaagaagaaatgaagaacgatgaaggacatcttcagttggatcagaaggagcaagagtgcaggtgcctcctcgagctttggctagaaaaaatgcaggtgaaaccccatattcaaagatgtatagattaccaccataaaggaaacaatccaaacaggaagagatgacaccatcagtcctagtttgatcaccgcatcttgggcacggagtgtcggaagaatgagagggagatgaactgaaaaggagattgtccaacacagttcctgttccaatttcttgacctgctcctctggtaaagtggatcaccattccatcaccgacatatattccgtggtgtgcatagatgtacgcttgcctccaagagtaaatgtgatcaccgggcttcagttgttcccgatcgatcatattggacagcactcccatttcctcttcctctctttctctctctatgaaaactgaagcccaacgaaaatggtatgaataaagaatttcagattacatcctcatccctgatttctgttatggtgcactctcat

SEQ ID NO: 25381 - DNA, 428 bp, Glycine max
  Clone ID: PAT_MRT3847_122921C.1
agagagagaagaaaaataaaagattgagataaagataagaaaagataagaaaaataaaagataaaaataaaataaaatcagaatttgataaggttgggagctgacctaccttgtttgtatagtatgtatgagtttatgatttttctttatcaatttagataattctattctacccacatcaggataacaagtctactttatttatctatcttttaaatttttttgcaagaatgcatgaacatataaaattatcattctagtcttatattatgaaatcgtttctttttgttctattagaaggtattctcccccgagcatctaactcttgccagaatatataaagataaaccatgaaagagagtaaatgaaacccctaggagagggggttatgtaatgctgttcttgcttggtttgactccttttttatg

SEQ ID NO: 25382 - DNA, 1786 bp, Glycine max
  unsure (1)..(1786): unsure at all n locations
  Clone ID: PAT_MRT3847_122922C.1
ttattcggctcaaagaaaaactcagcacaacacccctcccaaccctctttttctcttaatttctcatcatatcatatctattaatcttacacatatattaagacatagatataatttttttcgttttatttttccttgcatgggctgttaagataagatgtctcgcacgtgctcacagtgcggcaacaacggccacaactcgcggacatgcaccgacggtggcgccgccgcttcctgcggcgggtctcccagggagaacggcatcatgctgttcggcgtaagagttatgaccgaagctaactcctccttccggaagagcgccagcatgaacaacctctcacagtacgacgcggaatccaacgccgccgacgccggctacgcctccgacgacgttgttcatgcctccggccgcacgcgcgagcgcaagcgaggtgttccttggacggaggaagagcataggttgttcctgttagggttacacaaagtcggaaaaggagattggagaggaatttctcgaaacttcgtgaaaactcgcacgcctactcaggtcgctagtcacgctcagaagtacttcctccgccgccacaaccagaaccgccgtcgccggagatctagcctcttcgacatcaccacggatacggtgatgggaatcttctactataatggaagaggaacaagttccgcaagaaacgatggcggcgcctatccccgccgcatatccgccttttcccggcgcgggttttccgatgagtctatctccggtggtgttgccggtgagtggtgagagactgaccaagccgatcaggccgacgccgattgtaccggtgcctccgtcttcgaagatggctaatttgaacttgaaagggaaagcttctcggacaaatctcattgagcctttgccgttgtcgttgaatctgccatcgccaacgccgcggtctcaggatcagtcgccggcgaatagtggccactcgtcgccgtcatcgtcttcggcggcggcttttcaggctatgtctgcagcgaagttcggcggcgggggggatagtatcatcagcgttgcttgaaaagaaggaaacaaagaacaaatgagtgtcattaacttattaagtatggtcttagtagttaatttgggtatgtaaattaatgttacaaaatcgggcatgtatccaacagggaaaaaatctaagagatatgtgttggagatttgtttattacgaaagatgtatgatataggtaggagggagaggatattagaattaaatgagtatgatggtaattatgattagaaaaaaataaaataaagagatatgtatggtaattaggttatgtaggtaattaggcaatttaattgctggtttcagtgtacaggtttagttgaattaaaaaagatgggttgtcatattctctagctgttgagggattcttgtttctatatgtatgggggagtgtgaccgtgaaatgatagggcaccgggtactcttgataagcgattggtctgtgtaatgccactggggtcattaaaatattgcttagattagacaaaaggaatatttcatgctcaccaaaaaaaaaaaaaaaaaaaaaaaaaaaaaaaaaaaaaaaaaaaaaaaaaaaaaaaaanaaaaaaaaaaaaaaaaaaaaaaaannaaaaaaaaaaaataaaaaaaaaaaaaaaaaaaaaaaaaaaaaagcggngttnnaaaaccccngtttttttccctttttgggggggttatttgggccgtgtggggtatggggggtttgagggggtttggggggaaattttgtt

SEQ ID NO: 25383 - DNA, 241 bp, Glycine max
  unsure (1)..(241): unsure at all n locations
  Clone ID: PAT_MRT3847_122923C.1
aacctcttcgttccttcgattcattccatttcttccaaaatggccaaagacncagttcgngttcttcgtcactggagccgcagggcaaattggatangctcttgtcnctatnattgcnangggagtgatgcngggncctgaccagcncgtgatcctccacctgcttgacattncctccagcaggagagtgnctnaanangggtnaaaacnggantgnnnggtgcngcagncctnctnntna

SEQ ID NO: 25384 - DNA, 376 bp, Glycine max
  Clone ID: PAT_MRT3847_122924C.1
atttaccctcctacatgtgtagcactaccaccttcttgggggggggggggcggggagggggcgggtggggaggtgggagagggaagcagggggggagactggcgggcatggggggaagcctgcggagacgggaggggcgcgatgatgctagctggccctatcttttcaaaatgacaaaaaaaattaccaccccctgcaagaacaccaacccccacaaaaaaaatcccccaaaaataaccccatctccaaccacaacctaccatgcaccatcactctatcaaattcctttcagcgattacccccccttttcaagcaatcagaaaaacttcaccccgcactatatacatgccttcctccccatattcaagcaaccccc

SEQ ID NO: 25385 - DNA, 1917 bp, Glycine max
  Clone ID: PAT_MRT3847_122925C.1
aacagaacaaaagatgaggaagtgaagttgtttgatgtgatgtcatcatgtccaacaacaatagcaagaagcgccgccatgctccgcccgcggcacccgacgccgttttccgaatagtgtgtccggctgcaaagacggcggacgtagcggctatcggcggcgacggagctaagattctggtggaggacttggtcggcgcggaggagcgcgtggttgttatcgtgggcgacgagtctgctgcgcaggttgcgttgattagggttttggagagaacgatggatgaagaaactaagaattcgacagtgtcgtgtaaattggtggcccccagctatcaggttggatgtgttctcggccgtggaggcaagatcgtcgaaaagatccggcaagactctggggcccacattagggttttgcccaaagatcaacctcctcctcctcccggagacgaattcatccagataactggaaactttggcgcagtaaagaaagcggttctatctgtttcagcttgtcttcatgagaacaattatggtgcctttaagccttctggaggaggttcatatgctcctcttgatcatcattccagaggtgcttattctgaaagtgctggacattcttctcatatgatgtttgtggaagaggatgttgtcttcaagctcttgtgtcaccatgaaaaagttggtagccttattggccctaaaggtctgtagtgcgggctctccagaacgaaactggtgcttctatccaaattgtggaggccggtcttgattcccctgtgagtggctgttgagttactctacccctgacatgtgagcaaaaacattctcctgcacaagaagctgtcatccgtgttcattgtcgactcacagagattggatttgaaccaagtgctgcagttgttgctaagcttcttgtgcgttcaccacaggtgggctgcctcttgggcaagggaggtcttgttatatctgaaatgcgaagggccacaggtgctagtattcgcattttttcaaaggaacagattaaatacatttcccaaaatgaagaagttgtacaggttattgggagcttgcaatctgtacaagatgctttgtttcacataaccaacagaattcgggaaaccattttcccaataaggactcctccaaattttagtgcaccaccacattttccaccatttccagaaatgccacctcctttatttaggccaagaaatcacttgatgtcctctggccaccctcctcctcctcaagttgggcaccctcatgaccattcaactgttccccccatgcctgttgaccatcagcagcatgcatttgtacatggtatgggacgtggtccaccaaacatggatcgagttccctatcctcgtggttatgaaggaccaaattctccaagatcgtggaatcctctggctgttgacagaggaaatccaggaggaacagctgatacttctagtttgacctctagaaatgagacccctggagagaacggaaacccattgcagaatccaaatagcttgactattgagatcaccattcctcatatgtatttaactcacgtgtatggggagaacaatagcaacctaactcagattcgacagacgtctggtgcaaacgtggtggttcatgatccaaaacctggagctaccgagggtctggtgattgtgtctggagcaccagatcaaactcacgctgctcaaagcctaattcaagctttcattttatgtgggcagactatagcttgaaactacaggaacaagaggcaatctaaaagctacgcggcaaatcttttaatatattcgatcatatgatggattaaggatttatatcaatgttgtcgtacgattttgtgaagtgcacgtttaactagtgtaatttatttgttgagaaatgataggtgtactacgaatttacaacc

SEQ ID NO: 25386 - DNA, 755 bp, Glycine max
  Clone ID: PAT_MRT3847_122926C.1
ccacgcgtccgcgcatcgtgtgtccggccgcaaagacggaggacgtagcgactatcggcggcgacggagctaagattctggtggaggacttggtcagcgcggaggagcgcgtggttgttatcgtgggcgaggagtccgctgcgcaggttgcgttggttagggtttttgagagaacggtggatgaagaaactaagaattcgacagtgtcgtgtaaattggtggcccccagctatcaggttggctgtgtgctcggccgaggaggcaaaatcgtcgaaaagatccggcaagacactggggcccacattagggttttgcccaaagaccaacctcctcttcctcctcctcccggtgaagaattcattcagataacaggaaactttggcgcagtgaagaaagcggttctatccgtttcagcttgtttttatgataacaattctggtgcctttaagcctcttgatcatcattccagaggttgttattctgaaagtgctggacattcttctcataggatgtttttggaagaggacgttgtcttcaagctcttgtgtcaccatgaaaaagttggcagtcttattggcaaaggtggttctgtagtgcgggctctccagaacgaaactggtgcttctatccaaattgtggaggctggtcctgattcagacgagcgtgtcgttgtcatatctgcgcgagagacatcagagcaaaagcattctcctgcacaagaagctgtcatccgtgttcattgtcgacttacagag

SEQ ID NO: 25387 - DNA, 552 bp, Glycine max
  Clone ID: PAT_MRT3847_122927C.1
ctttgacactcttttgattttgatgatatcaaacggcgatttaggttttaattaggttaatgatagaatcagtcaaatgcatacttttaattataagtagctcaagtatcatatgtgtggtaatgactagttttatgcaaagaaaaacagaacaatcacgaccttgtcttagttgacaaatttataatttgaacaagttggattacttaatttctaacatttaggattcaaattaacgaaggatccaattgcataacgtcttaggttaaataatttcccactagacaaacattgacttttttgatgaataccttttcttgcactaacaaaatatatgtgatatcatgatttttcttattgaagacaattctatttggtagttggtgagatgtggccctaagattcaaaatataacatctgctaacttcatagtatttttggtcctcaccagttgttaattttataatatagcattcccttttatttcttttggtttgatttaacaattatttaatatcagacaacatccgagggaaagtacggtaggcttgc

SEQ ID NO: 25388 - DNA, 365 bp, Glycine max
  Clone ID: PAT_MRT3847_122928C.1
aattgtgaaaagcggaaactttgattattttatttggggagacaccaatggtactacaaccaaagcatgtctctcactcactggccgaaagcacatggttatttaaggcccgtggctatcgcaatttttggaactgggcgactaaaggagtgtgttttaacaataccaagggcctgattctctttccattggggcgaaagccaacattcttacataagtgaatcatcacctctttttctggccctagacagaacacaagcttatagccccccaaagaagaaaaagccttattagccacttttacaatacctgacccacccaacccttttttttgggtacccaccaagtttaacaggggggccttt

SEQ ID NO: 25389 - DNA, 1095 bp, Glycine max
  Clone ID: PAT_MRT3847_122929C.1
caacaagtaggatcttaacatattaaataaaattgttctatcgcaggttattgggagcttgcaatctgtacaagatgctttgtttcacataaccaacagaattcgggaaaccattttcccaataaggactcctccaaattttagtgcaccaccacattttccaccatttccagaaatgccacctcctttatttaggccaagaaatcacttgatgtcctctggccaccctcctcctcctcaagttgggcaccctcatgaccattcaactgttccccccatgcctgttgaccatcagcagcatgcatttgtacatggtatgggacgtggtccaccaaacatggatcgagttccctatcctcgtggttatgaaggaccaaattctccaagatcgtggaatcctctggtcagtttcacttttcagatacaggggttaatgcctgggaatcttcatatctatggtctaaacattttctatttttctatttttcggtggaggaagcgggtgagggggtaaacgcctcccagcctgtcctttatatttaaaaatgatgtttatacacattaggttcgtatttcaggctgttgacagaggaaatccaggaggaacagctgatacttctagtttgacctctagaaatgagacccctgtaaagtgagtgtaggaagttttttgaagtgccggtatatccaacgtttataaaaacaggtgttgtaccaaatgtcttatgctggtatttgtgttatttccaggaacggaaatccattgcagaatccaaatagcttaactattgagatcaccatcccatatatgtatttaactcacgtgtatggggagaacaatagcaacctaactcagattcgacaggtctttctaaatctgagtacagccagttcatttcttattgtttgctaaacattgtctttagcagttttttgacccttgggttttcctcaaacgtctggtgcaaacgtggctgttcatgattcaaaacctgcagccactgagggtctggtgattgtgtctggagcaccagatcaaactcacgctgctcaatgcctaattcaaggtttcattttgtgtgggcagactgtagc

SEQ ID NO: 25390 - DNA, 446 bp, Glycine max
  Clone ID: PAT_MRT3847_12292C.1
ctgatacaaactgaccttgaccctaaccctaaactgaaccccgcaacgacgccgtcttccgccgccatgggtagtagcagtaagaaaaggaactctgcttcagaggaacaaacccttgccgccgacgaatatcccaaaatgctcaataagaaacagaagaacaccaccaccgatgatgatagccaacaacaacaaccttccgtcaagcccatggagaggaagaagaagcgcaaagccttggacaaagggaggcgccgaaccgcatcccaacccgaccccaaacctgtgcctccgtccacggattcgcctagcactagtggcggcagcgctatgccggagttccacattggcgtgttcaaggacctcgcggcggcgtccaagtcggcgagggaagccgccgcgaagcaaatggtgacggagttgaaggctgttcaaaacgcttatga

SEQ ID NO: 25391 - DNA, 522 bp, Glycine max
  Clone ID: PAT_MRT3847_122930C.1
gttttttttttttttttttgaaaaggagctacagtggattatacctattgattttacaaaagagaatgaaattcaattgccacatagggctaaagataggtccaaattaattctttctttgagagtgtgagtggatgaactagagcagtccttgtagttgttgccaaacccagggcatgatgagattgcctcacttatctcactgcctgaactctgaggtgaaggatttggcaatgtgagcgataatgacaattcatcttcaacttctgcaatagctgtctcagtagtagtgttcacaagtacattactaggctgtgaagtgctctttccttcatttaatttagtaacctataacgaggagaacacacacgtaagcaaatagtgactaattattctcacttgtgcaagggaaacatccattatagcaaagagttatcccacatttggtgactattcctcctaatgcatgtactgaaataatactagaaagggaaaaatgaagaaagaaaagcaggtagtagt

SEQ ID NO: 25392 - DNA, 512 bp, Glycine max
  Clone ID: PAT_MRT3847_122931C.1
gcacgagaatatttttctaatatctaaaactttgactttagttattttatctttggattgacaatttgcaattatatattagactgtattgtcacgtattacatctaatttaatgtaataaaaactttaatagtacttttttctcggtgaataaaacttgaatagcataattaatggctagaaatttagatttgtgatataaacccgaactggagactggagttatgaatactcgcaaggagcttgccgctgcgttaggttgtcatcgtaaggagttaattaggcatacattcttttttttttttggtgtacaatagttaattaggcatacatatattaattaatagaaactaaaccaatttcaatccacatatattcgtatatatagtacagcagtcaaaataaaatttttattctgttttggttaaattaattggttagttcttataatttattacaattttaattaattcttttatgatcttatcttaagaaaataattctttattatt

SEQ ID NO: 25393 - DNA, 570 bp, Glycine max
  Clone ID: PAT_MRT3847_122932C.1
gggaaaaaaacccagggggggaaccccccaaatggggacccaaaaaggaaaaagggggtttttttagggcaaaaaccccgaccaaaaggggaacccaaaaaattttagggaaggcggtttaaaaaaaaaaaacaaaaccccaacctttttttaaggcaaccccgggttcccccccagaaacaaagggggggggggaaggggccaaaccacctttcggggaacccaaaagggaacatcaaaaactttttctttgggaaaaaaaaaagaaaaaaatccccctttccctttggggggggaagcaacaaaattcgggaaacctcccggggccaacgggggaacagtttggtttaaaagcttggcaaaggcccccatgggttaaaagggcccctgggaaaaaaaaaccttggggggggggggaaaggggccccccaggggccccccccattttaaaaaaaatttttaaagcttcaaaaaccccatggggggggggaaggccccaaaggatttttaaaagggagcctttggcccccaaaaaaaaaaaaaggggcccaaaattttgaagggggaaaa

SEQ ID NO: 25394 - DNA, 240 bp, Glycine max
  Clone ID: PAT_MRT3847_122933C.1
ccaccaatccgatgcatgacgttagaatctttggttacataattattccacgcggcgatttatttgtaagggtcccggttaacctgccaaaagccgtttatgtcgccacatgaaacggggaacggatatgacactcgaacggtctggtctccccagggaataaagcaagtacctttctttttccacatggacctcactgggaggtttgacacgctgggacattcgcctatgatccaacga

SEQ ID NO: 25395 - DNA, 359 bp, Glycine max
  Clone ID: PAT_MRT3847_122934C.1
aaaaagggaaaaacccttttttcaaaaaaaacctgggtcccccaaacctgggggtctttagccccccctccgaggcaaaaaaaaaagatcttgggccccgggtttttttaaaattataaacaagggggcttttaacccctttcaaaataatatattcccagaggggtttaaggggggaaaaaacacccccattttgggggccaaaaaaataaacctttcccccaaaaggggattctgggaaaaaagaattttttcccgcttcccccggggggaaaattaaaaaccaaggcccttcccccaaaaatccttttggggccctctccttgggggtgaaagggggggactttcacccccccccc

SEQ ID NO: 25396 - DNA, 426 bp, Glycine max
  Clone ID: PAT_MRT3847_122935C.1
tattattcattattaaaaactaatgtaaatgttcaagtttgttcattattatttattaaagaaatcttcacctaagtttaagggattgtcggggcatggcgaatcggccccaaccttaaaaagatttatttacaatttttttaatgttgttaaaataaattatttagcttctactaggactggaaataagtcgagtcaagtcaagctttattaggcttgaattcggcttgagttgaatacgcaaggcttgagcttgactcattacctgacatagactttttttaaaggctcgactcggattacataaaagtctggcttggcctacgagcctatttaaaagtctacctaaagacgtctttaaccaattaattgttttaaaacctagtgaaatactaactaaaaaacgaaacttataaaatttcatat

SEQ ID NO: 25397 - DNA, 364 bp, Glycine max
  Clone ID: PAT_MRT3847_122936C.1
gagcgcaacgggatacacgcattgaattcaaactctaagtacattccgtgtgttgcgctttcttactaaaaaccacacatgtagaacacatgcggaatctgacactgctctcacaagactatctgcaccaagggacacatctatggtgttattgtagacactgagaagagacacatcgacactgttgacatggatgttccaacctctgcacattatgaaaagcgcaagtgtggctctaactgctcttgcacagactgcacctgtggccattaaagaatatgtgagaaaatgaaattgccatgtgtttggctatacatatatccaaattgtgttctcttcgtgtgaataaatgtgtgctctgata

SEQ ID NO: 25398 - DNA, 561 bp, Glycine max
  unsure (1)..(561): unsure at all n locations
  Clone ID: PAT_MRT3847_122937C.1
ctgtgggtgaggcaacacaaggtcaaccagaaagtaatacattattatggacaaagaaaatgaattcaagtcacgtagttagaaacagttccttgtcttcggaaggcaatgataataaggtttatcctgagagtattttcagggaagattcatttgtccattctgcagttactggtaatggtagtccagtaaaactgtggatatctacactgattatcccagattttgacaagtctgagtcttgttccaaattgcctacaaaggacaacaacacattgatggcaaaactgcttgaagcaaggttggagaggcagaaatctcgctccagagctagcattagcaaaagagaagtttctgatgagaatcatgggaatgtgagtggtagctgtaacggtataaacactttgatcttctgtcaataatctactgcatatcacactcttaagtctagaattaacctatntttgtaaacctctgtcgtatcctaattntatagttacatggatgaagaacattaactatttacctgccaagggacaaagtatttgtaaacaagtaata

SEQ ID NO: 25399 - DNA, 339 bp, Glycine max
  Clone ID: PAT_MRT3847_122938C.1
ggagaggggcccttctgtttaaaaaatggggatgccttaattttgaccaacaaattttggaacttttccttaaagccttcttcaagcctcaccctttgggggacttttttaagagggagggggaagggtctttcaaaaatgggggggaatggccctgcccttctttgtttattctaaaaaggggtttttttaatggtctctttaaaaacaaaattgttggtgtcatgaacctgtgttgcttacaatgcccttaaattaaacaacttacaagggctcccatttttttgattcacccccattttttacttttggtgacctccgcttgggccaaaaaatgaa

SEQ ID NO: 25400 - DNA, 447 bp, Glycine max
  Clone ID: PAT_MRT3847_122939C.1
ggtccggaattcccgcctcgacccacgccgtccgctcacagttaattcactcccatcatgttagtcaattttgaagcaaagtggtatctccatttgtgacttcatgtacaagtcaggtagtagtggaactagagatattcaaaactattggtttttattgtcggtaataagtattaaatcatttttttattttataattaagatatatatattttacttttatatattaaaaaatggtgtattaataatgttaaatatcaagtgacatacaaattattattattatgttataagaagagttgataatatcattttatattaatgttaaataaaagtaaaaataataatttttaattaaaataatatattaaaaaatttaataaaaaataatatagcataataattatgaaagtttaattaataaattataaattatgatagtatatt

SEQ ID NO: 25401 - DNA, 406 bp, Glycine max
  Clone ID: PAT_MRT3847_12293C.1
gcatcccatcaccatctctcaatccttttcattttctatttatatactttttttttgtatttattttcttgctttcccttttggtgcttggactaaccctaagttttaggtggggacctcactattagtaatttaatattcacatcaaatcgatctcatacatatcacaggttttgaaaatcttgccggtctgctatggatacatattgacctgtgcgatacagaatcaatattgatgttctattttctttgtgcttctaaagggaagctcagaaagcacctgatgttctattttctttgtgctttgaagagatcctcgtgggaaagaaatgtgtacactgatgagatgacatggatgcataaatgttttcgtctatgtttgttgcagttgttcataataaattaa

SEQ ID NO: 25402 - DNA, 397 bp, Glycine max
  Clone ID: PAT_MRT3847_122940C.1
ggagaagggggcttgcatggtgtgacctctggaattaacaagtgaggggattcccaataaaagcaatgcccatcatccggttacaaatttggctggccattaactaatggttaaaacaatttataataagcatgcatctcccaggataggaggggtttaatctgcttctgattaaccaccttcacttaagggcttttagaggcaccactaaggcattggttatggagcaatggatttttttcatggaccaaaaaaaaattgaggttgacgaccttcgccaatttcctagtttacttatccaaaggtatgacaattgggaggcgttcaggggctggcatttttgccctcagtattcggatggtacttttgaccgacaaactattggtggcccaatatt

SEQ ID NO: 25403 - DNA, 434 bp, Glycine max
  Clone ID: PAT_MRT3847_122941C.1
aaggggccccgaattggggggggggaacaaaacggccaaattaacaaaaatctaaccaaaaaaaaaccccccctttttgggggaaacccaaaccccctattactataggaaaacccaaggaattagggaaacaattttgggactttaaacccatcagcccgccccccccccctttgaaatataaaccggtttttgggaggggggggggccaacaaaaatcaaaagggccccgggaggcccagggcccccccctgggggctctaaaaaaaaaaaacaaacaaagctttactcagttaaacacaaaaggggcccttgaggccccggagctctcaacaccccaaaaaaaaaaaccaaaagcccccgcccctaaaagcttttttaaaccaccaaagccaaattggagggtttcaaccctaaaaaccgcccccccaggg

SEQ ID NO: 25404 - DNA, 236 bp, Glycine max
  Clone ID: PAT_MRT3847_122942C.1
ggtatgcgtgtcgagtttagattgagatataggattgtcttttggtaaaagtccaggtttggagccttttcccatcaattggctgatcaggattaaccataaatccctttgatcagaatttttagtattctgttgcactatatactacaagggaaatatttcagatatctgaaggttgaagtccttttacatccactgaaaactttcttcatgatgcatagtttatagtctccaaa

SEQ ID NO: 25405 - DNA, 361 bp, Glycine max
  Clone ID: PAT_MRT3847_122943C.1
atgacaataaacctttcatgctaatgaggattcaaattacctaaataggcccttgaaaatacaagtctcactgcacaggtcaatccccctaaatcaatagtttaaagtctgtccagaatgaaactacagatgaaaaagctttaaggctttccattgagaacctgagggggctatgccagatatgtctgtgcatgccgcaaaacttggattggaattacatcaaaatgaaaaatttcatagccttagagtgagatcaggggacacaaatgtttgtgcttgaggtgcagttgatactacaaaactagcttttgcattatgagcctgctcaccatgccttaaaatcacataaccccttttatca

SEQ ID NO: 25406 - DNA, 260 bp, Glycine max
  unsure (1)..(260): unsure at all n locations
  Clone ID: PAT_MRT3847_122944C.1
ccggaccggaaaacccgggacgtcccacgcgcgcagtcacacacccggaaacacgganaaaccgcgggcacaggaagacgcaccagaacgccggaaacaaaagcaacacgcacaaagacaacaagaaccccccaacgcccacccacaacacagcagacgaccacccaagggaaagaaaaacacccacagcgccggccacagacaccgagaaccacacaccaaaccacccccagacaacaagccgaaacacacacccacac

SEQ ID NO: 25407 - DNA, 483 bp, Glycine max
  Clone ID: PAT_MRT3847_122945C.1
agaggatccatcaagcccagggagtttaggcatagccatatcagaagctgtggaggttgctgctaaaaatgctgataccaagtactgcttggggagtgtactcaatcatgttttactccaccagagtgttataggagaagagtgcatcaaacaaatggaagctattggggaaaccccagatgtcattataggatgtactggtggtggctccaactttgcaggacttagtttcccgttccttcgagagaagctcaataaaaaaatcaatcctgttataagagcggttgaacctgcagcatgtccttcattaacaaaagggatatatacttatgattatggtgatacagcagggatgactccattgatgaaaatgcacacacttggacacgactttgttccggatccaattcatgctgggggtttgcgttaccacggtatggcaccattgatctcacatgtttttgacttgggtttaatggaagc

SEQ ID NO: 25408 - DNA, 550 bp, Glycine max
  Clone ID: PAT_MRT3847_122946C.1
aacaaaaaaaccccggccaaaaagaaaaaaaaggccgcagggccccccttcccaacccggggagggggggggaaaaaaaaggggccccctggggactatacgggaaaaacaaaatgggccctaaaaaaaacccccgggttcgaaaaaacaattaataaaataccccccgggaaaagactttaaaaggggggaaaaaaaggaataattgggttcccccaagacaaaacaaaaatttattttcaaattagttagcccccccccggggtatgggctaattatgggcattccccccccccaaggttttggggggaagctaagggttaaaccttggaccccccaagttttttgggggaagcccagggttaaattttgggaccccccgacccctatttttaaatttttttgggaaaaaaaaaaccatttggggggatccccccacaaaattgggaagcccttccaggggcttgggcaacccttaaaaagggctttaaaggggggaatttggggacttcggcaagggaaggttcaccccaaattaaggggtttcccc

SEQ ID NO: 25409 - DNA, 242 bp, Glycine max
  Clone ID: PAT_MRT3847_122947C.1
gggaataataaaatccccctccacatccccaagaacgaaagcttttactcgcctccctttaaattttacccacccccttgaacaaaccaattttacccctctccaaaatattttcaccccaaaaaaacatatgaattacccgcaaatacgcaccaatgcctttttttttcccaactttccctatagcacaaattttttcctcaccccttacatacatgactaacacaacactatccttaacc

SEQ ID NO: 25410 - DNA, 155 bp, Glycine max
  Clone ID: PAT_MRT3847_122948C.1
tgtttttttcaagagaggaaactaggcctgaccctcttgtggcggatgctctggctgtttgaaatgatccacacctttcttaattgactaaccgatgtgtgacgcgagcggtttggtacagtaagagattgaaatatctggaaggtgaggggcct

SEQ ID NO: 25411 - DNA, 572 bp, Glycine max
  Clone ID: PAT_MRT3847_122949C.1
ggttagttgcatgattgaatgcagaaaatgagcagcatataaccacctaagaagaacttgcacgaagaggcagagagtgtagtgcagccaaggatgacttgccggcattagccaagtgaatgagcatcatatatatatatatatatatatatgactcatgttcttgtcggcaagttggccttggctatattggactctcttcttttcatgtaagtgccacaattaggctcagtcattgaagcaggtagcaatatttccccttagccagtatacatatgagataagtgcaattctattgataattattatctgctaaatagctaaagtagttataatgcttatattgagtttaaaaatgttaactgtccctttcttttattgtcattttctttgaccaatcgaaaattgattaaaaagctacaatatatatatggtaagagctgaaattcaaagtccgagttaactgctgatagaggaggaggtcatatgcataaagttatcaaggtgtatttatgttttttgctgatagaaaagcatatttaaatgtgaatatttccgtactaatgtgcaaa

SEQ ID NO: 25412 - DNA, 662 bp, Glycine max
  Clone ID: PAT_MRT3847_12294C.1
tatgatatcagtgtaggaaggcacataaggtggacaagtgacatggacagttgtctatctgcaatccttgtgcagcaaataaaacaaggggctcgaagcaaatttgactacacattgagacctgatgcatttgaagcatctgtgttggctattaatgagaagtttcagctttatttgacgaaagaacatgttaaaaatcgtcttagaacatggaagaaacagtatgccattctgaaggaacttatgacccagagtggctttgaatgggatgagaagcgaaaaatggtaattgcaaatgattctgtatggactgaatatattaagaaaaatcctgatgctcgaattcttaaaggacgagttatcagaaactacaatgaattgtgcataattctaggtcattgtgatccagcagatagttccattaatggtgcttgtgctaatatgggtatgactacagacgatggtgttatggaggttcaagagacaaaagaaaaagaaaaagttaagaatgttgtgacatggacagatgagatggatcattgcttgacagagttgctagtcaatcaagtaatgttgggaaacaggcttgagaaatttttcaagacctccgcatatatagctgctcaaactgctctaaatgagagatttgaaatgaatttaac

SEQ ID NO: 25413 - DNA, 1519 bp, Glycine max
  Clone ID: PAT_MRT3847_122950C.1
gaccagctgctagaattcggctcgaggccagcccttcctccatttcctcctcatataaactcttctcaataaccagatatttcattgcatgaatattcaaaaaacaatggccatgctcaatatcatctccattctctctctcttactcactcaatcccacgccaaaatacggcggctctctctctctctctgctcaactgaataaagcagagaagaataagaaaatgggtgtgttcagtacagtgctgctgtgccttatgtccctaatgtggatggtggatgctcgaattccaggcgtatactctggcggcgcttggcaaaatgctcacgcctacgttctacggaggatccgatgcttccggcaccatgggtggagcatgtgggtacgggaacctgtacagccaagggtacggagtgaacactgcagcgttgagcacggcactcttcaacagcgggctgagctgcggagcgtgcttcgagatcaaatgcgcaaacgacaagcagtggtgtcactccggcagcccttccatcttcatcaccgccaccaacttctgtccccctaactacgctcttccaaacgacaatggcggctggtgcaaccctcctcgccctcacttcgacctcgccatgcccatgttccttaaaatcgccgaataccgcgccggcatcgtgcctgtcgccttccgcagggtggcatgtaggaagcatggtgggatcaggttcacaataaacggtttccgttactttaacctggttttgatcagcaacgtcgcgggtgcaggggatatcgtgcacgcctgcgttaagggatcacaaacagagtggatgctaatgagccgaaactggggacagaactggcagtcaaacgcggttgtcggtcggtcaccccgtctgcttcacggtcaccccaagtgacagtcccgcctccacttcacggaacagtgtttccgggaatggacaaattgctcaaaacaatcaccgcccaagtaattaacattcatgacatacttatatatattttttatcatgatcctttttgttttggttcccgccatttatttacttattactagacatggtcgtttgactggatagtgagtgacaactttttaattgtgacttagatgttgttgggttttactttttctgattgggtgggtttgataattatacttggggtgcgtgaagttgtagtattttgaatttctagggaacgctgaagtggcttaagtaaaatggtagcccgcagctaatttgtactttttattgtagaatcatcatggtgttatatatatatatatatatatattaatattacaagtggctaaaaaaaaactttactataccgtgtttggatcatttgcgtttttgaaagcgctttgtttgatttgccaccttttatttttggttgtttgctacctacatgggagaaaatggtagccaactttttgacttttgatcatgttttggggagtggagtgaaggaaatgaggctaaagaagtgtgatttttgtcgggg

SEQ ID NO: 25414 - DNA, 544 bp, Glycine max
  Clone ID: PAT_MRT3847_122951C.1
accttctcatcaaatctattcatatataaacctttaaattatgacaatgatagaggtgtggttatcacttataaaaaattaaacaaaatacatttcttttcaaactcttgcgattggacacttccctttaaaaattgaagataaagaaaaactcagttggagttgtctcaagagaagttgcttgtatatttgttgaggatttcaccaacaagaatctggtatgtcttctgtgtgggatggtagctgtcccaaaacacatatttagaatcatctgagcaggttgttggatctaacatattacacagaaaagccgcctctacagtccctgtgccgcagcatcctttgtcagcaacttcaaatccatatttggttgggttttggatgatattgagcaaagagtcgtaaatatggatatacaccaccttggcttgaggcaaactttggtttagcttgtgcagctctgaagatagtttagagttaaacaattttgatgccatgtttatttctttcggagcacagtcttcgtagacctccaaacaatgtt

SEQ ID NO: 25415 - DNA, 1473 bp, Glycine max
  Clone ID: PAT_MRT3847_122952C.1
gtacgtaaacgcaccaaataaatttataatcttaattacgtccattcttatttgatagtaattgatatctacttagccttgttttagaactgtagggtaattaagcgagtataaagtactactatataaactagtataaagtatctttattaactgtgttagttggatattgtggtggggtagtttactttttgaaggagtggggaaaggttaaaaaaaataattgacctaggtttggttggtatttacgcagggtgccatgcagaaagcacggagggataaggttcacgataaacggattccgttacttcaacctggtgctgattagcaacgtagcggctgcgagaagacgacagaaggggatcccctccgtcccccgaatctccccgagaaacaaagaaaagaagaaaatggctgtggccaacaatgtgctttgcattgctttcattatctccttaacgtgggcagttgaagctcgaattccggggatttactctggtggtgcatggcaaagtgctcacgccaccttctacggaggatccgacgcttccggcaccatggggggagcgtgtgggtatgggaacctgtacagccaggggtacggtgtgaacacggcggcattgagcacggcactcttcaacagcgggcttagctgcggtgcgtgttttgagataaagtgcgcaaacgacaggcagtggtgccactccggcagtccttccatcttcatcaccgccaccaacttttgccctcccaacttcgctcttcctaacgacaatggcggctggtgcaaccctcctcgccctcacttcgacctcgccatgcccatgttccttaaaatcgccgaatatcgcgccggaatcgtccctgtcgcctatcgccgggtgccatgcagaaagcacggagggataaggttcacgataaacggattccgttacttcaacctggtgctgatcagcaacgtggcgggtgcaggggatatcgtgcacgcctacgttaagggatcacgaacggggtggatgccaatgagcagaaactggggacagaactggcagtcaaacgccgttttggtgggtcaggctttgtccttcagagtcaccgccagcgaccgtcgctcttccacctcttggaacattgttccatcaaattggcaatttggtcaaactttcactggaaagaacttccgtgtctgaacaccccctttactttcttaagatatataaaatacaagtttattttcttttagttgtggtagtgattagtcaaactttcgctttttcctttgtcttgaacgaagaaattggggttgttttagtacacgtgtttgaagttttatagtaggattctagaaaatggagggaaactttatgtaaggggctgaagtggcttcaaatgcataagcccgcagctatgttttttatattatagtatatttatccccccctgcacgaaaagatcaagtgtgtttaagaaaaa

SEQ ID NO: 25416 - DNA, 275 bp, Glycine max
  Clone ID: PAT_MRT3847_122953C.1
cttacataaatgtcattcgattatgcgtatccatattctgcctgtactgtgagatgactagcaccggccaagaactttaaccttaagactctacatagtcataccctcccagataccgtttgactctccatcatgatgggatgcctatgtaccaatacacagtatttgctactatctatgttcttatcaatgccatgctgaatctgatctatgataccctgtccttccacccctacatcctgggtccttacttctctccctagagactagcgttc

SEQ ID NO: 25417 - DNA, 1039 bp, Glycine max
  Clone ID: PAT_MRT3847_122954C.1
ctttgcttattcttcactgtcaaccgaaaaaattataaaaaaaaaaaaagcagagaagaataaggaaatgggtgtgttcagtgcagtgctgtgccttatgtccctaatgtggatggtggaagctcgaattccaggcgtttacacgggcggcgcctggcaaagtgctcacgctacattctacggaggatccgatgcatccggcaccatgggaggagcatgcgggtacgggaacctgtacagccaagggtacggagtgaacactgcagcgttgagcacggcactcttcaacagcggcctcagctgcggtgcgtgctttgagatcaaatgcgcaaacgacaagcagtggtgtcactccggcagcccttccatcttcatcaccgccaccaacttctgtcccccaaattacgctcttccaaacgacaatggcggctggtgcaacccccctcgccctcacttcgacctcgccatgcccatgttccttaaaatcgccgaataccgcgccggcatcgtgcctgtcgccttccgcagggtggcatgtaggaagcatggtgggatcaggttcacaataaacggtttccgttactttaacctggttttgatcagcaacgtagcgggtgcaggggatatcgtgcacgcctacgttaagggatcacgaacggggtggatgccaatgagcagaaactggggacagaactggcagtcaaacgccgttttggtgggtcaggctttgtccttcagagtcaccgccagcgaccgtcgctcttccacctcttggaacattgttccatcaaattggcaatttggtcaaactttcactggaaagaacttccgtgtctgaacaccccctttactttcttaagatatataaaatacaagtttattttctttttgtttgggttcccaccatttatctatttcctgatcttttttactgcagaggaagaaacaaaaaaatagtcagtgacaagtttttttacttttgcttctcattggtgggtttcatttttttaattaatgtataattgatgattcccgggtg

SEQ ID NO: 25418 - DNA, 205 bp, Glycine max
  Clone ID: PAT_MRT3847_122955C.1
cccttctattttgtttttcttttgtgtggctttgagaattagaactagttttaacatgagtaatgatatatcatgaacagtgatccgtgctctgagtggaagacagcatacaaacactagcatggcccggcacttccctatagggtgagaatccccccccccaaatataggggcgtgacttcccaaaaagaagcacggcgggggc

SEQ ID NO: 25419 - DNA, 218 bp, Glycine max
  Clone ID: PAT_MRT3847_122956C.1
aaggcggctcgaggtgaatgtctataatgatggaaatgtcctaagcacggtaacagttagctccccccaaggaacccaaggggcttgtataacttcagcagggcacccaaaagaacctttgttgaatggaggtgctcccggagcacaaataatatctcggaaaaatggggactctcgcttagggtcaatggaaacccgaaccggcttgactcgggcac

SEQ ID NO: 25420 - DNA, 281 bp, Glycine max
  unsure (1)..(281): unsure at all n locations
  Clone ID: PAT_MRT3847_122957C.1
gacacttgacaggaaaaacagtaaagatgggtttgaagaacaacatggtggtgctaaaggtgtgttttttggatcttttgcttgagagggatactaatgctcgctggaactgaacctgtataaaagtgattactcatgaagtgatgatgagtcttcaaaaccatgctgtgatctctgcatgtgcacaggctcaatgccacctgaatgacattgggcagatattaaganggagttcaatgtactcagcttgtgatcgctgtgcgtgcacacgctcgatgcca

SEQ ID NO: 25421 - DNA, 356 bp, Glycine max
  Clone ID: PAT_MRT3847_122958C.1
ggtgtcaactcgaactacaatggatccaacttgagctaaaaatacaaacaaattttgcagttgactcaaaaaataaatttggcccatgctgatccgagttaacccacctaaacaattacataacaaagccctaagtaacctaattttatttttttaagagtggctctctcgtcactccctctctgtcacggcgtcagcgtcattcactcactcactctcgagctcgacgccgcgactcactcaggcacagcgccacaaagatccactctccgcctcgatcccgcaccccactcataaacacagctcgccgaccgcgacgccgtgccactgcatttccgcgaacccgcgccgccgcg

SEQ ID NO: 25422 - DNA, 409 bp, Glycine max
  Clone ID: PAT_MRT3847_122959C.1
aaaactgaaggggccaaaattggtgaatgaatcctggccatacatccatgtctggaacccaagggcccaaataatcatcactaaccccaaatttattttcaggaaaagttttttagcccaagctgcccaacaaggctattctattttgggtccataggggggttccagaggcaaactaaagggtaggtaaagctaaattggacccagtttcgaccctgggaacaatcagctcctaaaaaaacttaatgccccttgacaaaagttcttgagcaaaatccatgggacaaattagcttccccaataagaaactcccccaagccatttgacccatgctggtaaaattttactttaaagcattatttctgaaaaccgggagcaatatcagctattaaataaaatttaaagattt

SEQ ID NO: 25423 - DNA, 367 bp, Glycine max
  Clone ID: PAT_MRT3847_12295C.1
cctgcaggtaccggtgccgaatgtcccggggcgaccacgcgtccgaagttatgagggtgtttattttatttgtgttgaatgatggctgtgaccacaaaagcctaccgtggagtacactattttctaactactcttagggggtgacctctgggccatgaatacactgttccagacaagggatcttaccaaagaataccataacaacccgagcgactcctttgcgtggggggtcacccaatgtattcattaacacactggggaaagagggtatagatatgagcacaatactagctaacgggataggtttcattgcaatatacaatggataataaatccatgggcaatgtacaaaccataggtcagaggg

SEQ ID NO: 25424 - DNA, 257 bp, Glycine max
  Clone ID: PAT_MRT3847_122960C.1
gaaggacctccatcctcgcgtggaggaaacttccgtggtagatgcaaggcacaaggaagaggatgaggaagaagcacaagaagaaaataagcaagaagagcaacacaaactcgacgatgttagcggtgtgcaagatgaggtactaaagcatgagcaaaatgacaatgaagagaattctgagcataaacaggattcggtagaccaagaaactgaagaaaattctgaaaatgcattgacacaagtggaaggagaacagc

SEQ ID NO: 25425 - DNA, 1624 bp, Glycine max
  Clone ID: PAT_MRT3847_122961C.1
gcctccctatgcgtccggtcttgtgagagtctgagatcgcttttctctctttcgatcttccttttccgcatttctcaacaatcgtttccaatcccacgctaatggcaaatagtgagacttgttgttcaactcagcttattgatggagatggtacattcaatgtttttggggttgaaaatttcatgaaggaggtgaagttggctgaatgtgggctttcatatgccgtagtttctataatgggtcctcaaagtagtggcaagagcacactgttaaatcatttgtttggtaccaacttcagagagatggatgcttttaagggaaggtctcaaacaaccaaaggaatctggatggctagatgtgctggcatagagccttgtacacttgtgatggatttggagggtacagatgctccttgatacttggtgttcaccacgcgtccgtgcttttgaaaagcagagtgctctatttgctcttgctgtctcagatatagtgctaataaacatgtcatgatgagattgtttagtccacgaaaaacaacattgttgtttgtcatacgcgataaaacaaggacaccacttgaaaatttagaacctgttttgcgagaagatattcagtgaagatatgggactctgttcctaaaccacaggcccacaaggaaaccccattaagtgaatttttcaatgttgaagttgttgctctttctagttatgaagaaaaggaagagcaatttaaagatcaggttgctagcttgcggcaacggttccatcattctatcgctcctggtgggcttgcaggggatcggcgtggagtagttcctgcttctggcttttcttttagttctgagcatatatggaaagtcattaaggagaacaaagatctcgatcttcctgcacataaggttatggttgctactgtacgatgtgaagaaatagccaacgagaaatatgtttcttttgttgcaaatgaggattggtgtcaattggaagaggctgtgcaatctggccctattcctggatttgggaaaaagctcagttcacttcttgatatttgtttttcagagtatgatgctgaagccacctattttgacgaaggtgtgagatcttccaaacaaaagcaactacaagaaaaattgttccaacttgtccaaccagcattccaatctgcgctgggacatataagatctggaactttggataaattcaaggaggcatttgacaagactttgaaaggaggggaaggattttctgtggctgctaataattgcattgggtcttgtatggttcaatttgatgaagcatgcacagatgttgttattgaacaaacaaactgggatacatctaaagtacgagagaaactgctgcgtgatattgatgcacatgttgcaactgtacgtgcaaccaagatttctgaacttacttcatcatatgaggaaaaacttaaacaagctttgtctggacctgttgaagctcttttggacggagctaatagtgatacttggccatcaataaggaatcttttaggcgtgagactgaatagctgtttcagggttctctgctgcacttactgggtttgatatggatgaagaaacaaggcagaaaataattttgagtttagagggatatgc

SEQ ID NO: 25426 - DNA, 745 bp, Glycine max
  Clone ID: PAT_MRT3847_122962C.1
ccacgcgtccacgcgtccggtcctgtgagaggctgagatcgcttttctctctttcgatcttccttttccgcatttctcaacaatcgaatcgtttcctatcccacgctaatggcaaatagtgagacttgttgttcaactcagcttattgatggagatggtacattcaatgtttctgggcttgaaagtttcatgaaggaggtgaagttggctgaatgtgggctttcgtatgccgtagtttctataatgggtccacaaagtagtggcaagagcacgctattaaataatttgtttggtaccaacttcagagagatggatgcttttaagggaaggtctcaaacaaccaaaggaatctggatggctagatgtgctgacatagagccttgtacacttgtgatggatttggagggtacagatggaagagaacgtggagaggatgacactgcttttgaaaagcagagtgctctatttgctcttgctgtctcagatatagtgctaataaacatgtggtgccatgacattgggccgtgagcaagctgcaaataagccacttttgaaaactgtttttcaggtcatgatgagattgtttagtccacgaaaaacaacattgctgtttgtcatacgtgataaaacaaggacaccacttgaaaatttagaacctgttttgcgagaagatattcagaagatatggggattctgttcctaaaccacaggcccacaaggaaaccccattaagtgaatttttcat

SEQ ID NO: 25427 - DNA, 294 bp, Glycine max
  unsure (1)..(294): unsure at all n locations
  Clone ID: PAT_MRT3847_122963C.1
aagcgaccaaacccaaganagcaccagggccccacacgcncaaggggccacaaaaacaggaccccacgcacggcccaaacccaaggacacancccaccccggaagaaccaccggcgggggagaccgacaagccaaagcccgaaccaaacaccccccgccgcgacgcacagaaaacgaacaacggaaggggcgacccgaacaacaacaacccagggcccgaacaaggccgcaagagaacccaaccgccccagcgccccagccngcncaggcgggcgcaccaacacgcccggaaac

SEQ ID NO: 25428 - DNA, 259 bp, Glycine max
  unsure (1)..(259): unsure at all n locations
  Clone ID: PAT_MRT3847_122964C.1
ananaatattanacccatattntnagtgaagtatacctcatttaatnnnccntcattanatcnggctnnctccnanttgntncncgcgaaccacnncatctnntctaaattnggtttcnatctttgattggntttccattncccatggctncaaaggatcccaagcaagttgctgctgcttcctggtgntggnggtcggttttttgctctattgcttccagtttgtcccaatttggcagtgcnatgtccaaatcngttc

SEQ ID NO: 25429 - DNA, 340 bp, Glycine max
  Clone ID: PAT_MRT3847_122965C.1
gtcggctgcgagaaacacagaggggatagcacccagaagcattgtcagcagcattatttctctcttaggcgaaatgggaaaattgccagctatgttcagactggctgaggcttagattgtgttttggagagctgactgccaccaaaacaaatgccctaaaccgttcccccctttaaaagaaccaaggttaattcccccccagccaaccaaaagtctttttaagggcaccgaaattgaatttaatggccggggtttaaacggtgggctgggaaaccctgggagtcccacttaaaagccttggaaaaaatccccttttcgcaatgggcgaaaaacaaaaagg

SEQ ID NO: 25430 - DNA, 765 bp, Glycine max
  Clone ID: PAT_MRT3847_122966C.1
gacaaactctattctgtattgtgaactacaatctacatttcttgggtgtggcttcttggaattttgtttgaaaaagatgtgactcgtgagtacttggcgagttggcatggctcctatttgcttttaggtgccacccccagaagtagcctaggccatcctatgtaaattgcgaacttgtttttactttttagcccttatttcaaaattccacacacttctctttcagaatcttacccaatgctataaattctatcctatgatcaattttggatgggattgtctattcaaatttcaaactctatggctagaacatttgtatattaaaaccccaagcatttggcatattggtttataaagagatcatgtctatactttatttgcctatatttatgtttcacgtacatgttcaaggccctttattttctccttttccagccttgcattcacataaattactgtataacaaacccataaacattcttttggtaattattcttgatttggaaatgttttaccagcaacttatgaactatatttctcccaagatattgtcccaatttgtaccagcatccaaagatattagtcatatattgatcatgtcttggatataaacatttcagtttttcctctgattttttatttgttcattattttgatttttacaagtatttctctacccttctacaatgcttccagtgcttttgtatgatattcccaatttttgtgtagatttctttggatggtgagaattggtggaggagaata

SEQ ID NO: 25431 - DNA, 275 bp, Glycine max
  Clone ID: PAT_MRT3847_122967C.1
gcccaagagcagacaacactattcatgggatacggattgacaaaacaaaacaatgtgatcaaaaaaaccaatccatttgtacaaactttcactcctcttctaaacaaatataaaataagtttcatagagaaaccctaacccttatcttttaacacaacacaaaaaaaccattgatttataaaagattgatttaataatagcccttaacgaaattaaaccctatgctggaggcacttcccataattgacttagacatcgactaataacgcgctttt

SEQ ID NO: 25432 - DNA, 178 bp, Glycine max
  Clone ID: PAT_MRT3847_122968C.1
ggaagcttggggagctgaaggactctgcggctgatgcggcgaagagggcagtgggttaccccagcggaagacagatgaaaccaaagagcaagtctcggagacggcaatggacggctataagggcggagatgaagagccacaggagaagctgcggatgggagcgcaaaacagccgaagg

SEQ ID NO: 25433 - DNA, 190 bp, Glycine max
  Clone ID: PAT_MRT3847_122969C.1
atgttacgcagcatgtgttggatagaggacatcctcaggaaaggagtcacattattcacatggctatctggacatacttggcaattaagccagcatatctttgcatcagctgttgttgataaatgtttggagtatcgtgatgctattgatcgggagttgtaatctgcggcgattgttgagactcacaatc

SEQ ID NO: 25434 - DNA, 387 bp, Glycine max
  Clone ID: PAT_MRT3847_12296C.1
ggtcgagggcttcttctctcacaattactaggtcttttttttatagggtccctttttttcaatttgccccttttttccacactttgtcttttcccaattttcccaattagaagtggtattgggacaccaaaaaaaaaaaaaaaatgggggggggtgtgaaaccggccccacaggaaaaaatctagcgggtggggtgtctttttttttttccccattccaaaaaataagacctcttttttatatataaacgtcaccttttggggggggggggtgtggaaaaaacaattggttattttttttaccaacaacacattttttacccaatatgtgccgaccggcttagacaatttcaacgcaaatgtgggtgtcaatgggagcattgggaat

SEQ ID NO: 25435 - DNA, 780 bp, Glycine max
  unsure (1)..(780): unsure at all n locations
  Clone ID: PAT_MRT3847_122970C.1
tnaagagaccaggggtactacatgaaacacaggagaaaaaggctcctgaaaagatacaaaatagatgatcccctcatggggaaacccacatacccctccctacaaaacaaacttaaacaaaagctaagggcattgctgaggaccagtgatgaaaaggaacacaaaaattcttttcccaccccttaagccaggtccaagtgaggaaaatagagttatctaccaacttatgaatgtcaaatgcctgattatgaaacaccaagtcatttctgaattgccaaattgactttgtagtagccgaccaccaaatcttccttcttctagtaatatcctttcctccagttgtagttgagagctgaagaaagttagccatagggctattatggagaactgtgtcttccttaacccaagtgaagaattcccaccacagggttctaaattccaaatatgnnnggatggtcagccttgcagaatggcagagttcattgttgggattctcattggtggagggatcttaggaagatatatcagcacaatgacttcaagattatacatcnnnatatggcttggaaggcaggttgtggggataaaattagattttggaaagataattggcngnnngnaggattgcaactnnnnacagaaatattctcagctctttatcattagtaagcagcagaatgatcttatttcaaccatgggaagcttctannagaataattggaatnnngatctgaagtagaggagacacctattcgagtatgaggagggagtagctnnngg

SEQ ID NO: 25436 - DNA, 444 bp, Glycine max
  Clone ID: PAT_MRT3847_122971C.1
acatacaaacagagagaacatgtttataggcgatcacgtttatatttacataagaacataccattaacaaattaggaggaaggaggaagaaaccctcacagtgtgaaacgtggaacgccatggtttttttacatattataagggcaaggctgaaaaaactttcaaataaaggattgaaacgaattacttaggccttctaccacttgaggggtttggccacttcccgtgtagagagtacggtcttgcctttcaaagggtccataggctggaaaaagcaaaaacctgatattaacacccctgttgagataatggacgatggaaataattccgcgcctgaaatttatttggtccttaccaaagttgggaatctgattagctgggacctttacagagccttatgagttaatttgctcacacataggcttagtgcactgaaaggtttta

SEQ ID NO: 25437 - DNA, 424 bp, Glycine max
  Clone ID: PAT_MRT3847_122972C.1
gaatcatttttttttgtataaaataacgcacactgcacacatccttacaacaatacaaagaggagtggaactattcagataggcagagactaactcccacgaggggcctgcctacttccctttgttgaattaaactagcacacaagcgatagaaaacacaaattgcatatcatgctgagaacacaaatttgtaaaatgaactgccaataacctgagaaacaaaataagctggcctaagaggattaccaaaaccgactattgtcgagacattactcagataatatcaaaacctgtaaactgcttgggattggcaatgaggaagctcagatgccatgaagtcggactcactcattcaaaacatcacgttacaagctcatcatgagcaccacatccctcagttggcaaaatcaattcccagcaacgt

SEQ ID NO: 25438 - DNA, 912 bp, Glycine max
  Clone ID: PAT_MRT3847_122973C.1
ctggtacttctgcacgtacgttcggctgcggggtcccggttttccaattctctctctcccgggcttcttttgccaccgtttgggcgaacactgaacactctatcttagtgctccacagaagcagtagaaaacagaacttcgttgcaaaatatgggtgcttctgacaacaacaacaactttctccaagttgtcttcaataactttgatgttcttgctctgcccttggttacgcttgtttaccctttatatgcttcaattaaggccatcgagaccaagtctactactgatgatcaacaatggctcacgtattggattctgtattccattctcacaatctttgagctcacattcgccaaagttcttgaactgcttcccatttggccttttgccaagttgatattcagttgctggttggttctgcctcacttcaatggggctgcagttgtttataggaattacatcagaccattctatatgaacccgcaaatcccaattcctcaaggctctcaaatctggtattttccacaaaagaagtccttattcaatcagccagatgatgttctaagtgctgctgagagatacatggaagagcatggtacagaagcctttgaaagacttataagcaagaatgacagacaagctagagcaaggaggaatggaaattacatgatctttgatgatgactatagatattgaacttcgttaaggtgtcactttggctgttgctaatatttcaatatatttcaatacattgatgatgaccaaatatgttgaactttgttaatgcgtcactttggaagttactaatatttcagtagattattttgtggaatgaaatataaactacgtactaattattcgaaaaaaaaaaaaaaaaaaaaaaaaaaaaaagcggccgctctacaggatcca

SEQ ID NO: 25439 - DNA, 340 bp, Glycine max
  Clone ID: PAT_MRT3847_122974C.1
aaaaaaactaaatcccaaaaaactaaaaaaacaacaaaaaaaaaaacctaaaaacggcagtactattaaaatatataactaacaacacctacctaaaaaaacaaaaaacaaaaaaaaaataactcctcctccctgacagacccccattcccctccccgagaaccttctgcataatcatgctccattctcccacttgtatcatcatcgtcccatctacccacaccacactttccaaggaatccctgaaatccccactgtaatcctgctttccgctgaacccgctattcccatcaatgtacttctcagtcagccccctcctgttctaccgttcacatctata

SEQ ID NO: 25440 - DNA, 439 bp, Glycine max
  Clone ID: PAT_MRT3847_122975C.1
cattattgttaacattgttattactgtcctcagttttctcaattgcctcatcaagaagaagacattccaacaacagcaacatagattggtggtgcaaccaaaccccataccccgagccatgcagatactacataaaacacagccactaccaacacaaacaactcaaacacaaatccgaattccgcacaattctagttcccttggccttggagagagcagtgatcatgcgaaggaaagcacgtgagttggggggaaacggtgtcaccaagaagcaaaaatcatggttccgggattgtttgaagctctatgacaacaccgttttccatctaaaccgcacccttgaaggccttcacgtgaaaacaagctgttcacccttagatgcacacacgtggttcagcacggttcgcacaaacattgaaacatgccaaaactgggcctt

SEQ ID NO: 25441 - DNA, 273 bp, Glycine max
  Clone ID: PAT_MRT3847_122976C.1
attttttttttgggggttttatattttgggcaggtaaggcattggaaaaaaaaacatttgcctcacagccaaattgatgaattctactgtctccatatgttgataacgccttctgtttgtcaaccgcccctttgccgacacgcacaatttttattgggggagacgaaactacagggggcaggcccggtgttgcgcaaaaaaaacgggtttttttttattgggacctatttcaaggaattttgttataaaaagaattggcttgatttaaggggg

SEQ ID NO: 25442 - DNA, 493 bp, Glycine max
  Clone ID: PAT_MRT3847_122977C.1
tcctcctgcttggggggggggggggggggggcggggggggggtaggggggagggtggggccccaacgcccaccagtataaggagttggatagggacgtgcaagagggagggggggtagaagcccaatgcagtgtgggtgggtggttaaaggccagggtatggttacattttgagtagggtgttagtcgtaatagagggaatgtaaacccagagagggtagcaggctatggatttgaagcccagatgaagctatttttggaagccgaaaggtaagggggacttgaatgattggggaattgggcctgggcagtccattttagccgcttattgattttgaatagttacgagagcggctaataaggtaaaccttgaaggcccgtatagctagggtgccccctatgttcgaaacaaagtgtatcccagggttaggtgggcccatttaagttggagctcggtttaattagcgggcctatgctacgaggtagcgtggccc

SEQ ID NO: 25443 - DNA, 231 bp, Glycine max
  Clone ID: PAT_MRT3847_122978C.1
agagggagtcagagaaaccctaggtaagaagaaaagatgcaggctggtcatggtttgagatcccgcaccagagattccttctctcgtcctttcaggaagaaggcgagcatcgccctcaccacataccttagaagctaccacgtcggcgactatgatgacgctcaaggttaacgttgccgttcacaagggaattccccacaagattctaccatggccgaaccggacgcgtct

SEQ ID NO: 25444 - DNA, 354 bp, Glycine max
  Clone ID: PAT_MRT3847_122979C.1
aatgacgggtcgtgcagcccactggacggtgggcgtcctgttttaggtttctatgcaaactcactgttgtttccattcagtcataagcttacgataagaacaatagtgagaccacgcccgccagggtgatattgactgaccttgcagatatctatacaaagcgatcggtccataactaacaattgcgaacatcttcctacattgacaagtctatggtgacaactgctctgatggcggcagataaaaaaagtaccacctaccgggctacttgccatcctcttgcgaagttttgctgtagctatctctgcggagttaacacagcggagctgacatcaaacacgctatgaacctaaa

SEQ ID NO: 25445 - DNA, 266 bp, Glycine max
  Clone ID: PAT_MRT3847_12297C.1
gaagcttcatcttcaaactaaacatattttattcagtacctacacgtcattctaccaacggtttttcttaaatttacatattagacttgagtgttgtattacttgtttgtgtatttcttttattaatactaatcattcaaactttataaattacaatgctaactaaatttacatcatttagaccagtggaaacacaatatttctgttgtacactttttttgttctgtaaaataagatttacatgttgttagtataaaaaaaaaaaa

SEQ ID NO: 25446 - DNA, 399 bp, Glycine max
  Clone ID: PAT_MRT3847_122980C.1
ttgactttttttttgaattttagtatttcgtaagggtgccgcacctgcgcggtattcgtgcacgacaagatgtgctagtattggccctatccgctgttcattacattagtcactggtccttagtataggtcactccccgggcaagttctctggcccttacatcgcttctggtcggtgctattgtttgcagagcacacttactacactatttgtactcctaccatattatttataccctactactgaccaatgctaagattgtgaatagcggctcacttatcctggcctatctcatttccctatggacataggaaagtgtcagctgccacgaatgtgcccggttcttcacattcttctactcgtacttcttaagtgctatagtcttgtgcgcggtcaacg

SEQ ID NO: 25447 - DNA, 488 bp, Glycine max
  Clone ID: PAT_MRT3847_122981C.1
tgcttggacctttgggctgatttagtgcttgcatggtgagaagatgatagcaggcgactatatcaactatctatctcctatctagaatctccgctccctacccctacaacctttatataccacggtcgagtcctatcattaattataatattaacatttttcttgtcatttcaatgacttatattaataaatttgccttcttatttattaggctgctaaggttgttattgttgctatagtgggtggtctttctccgacttctgttctgccgacttctgttgttattgctaccgtttctattactgctattttgtcgcctgctacccctagcttggcctctgcttttgttgcaactattgccgtgtcttcgagttcggggccttctgttctgagcgggcctggcgcggtggtgactatggcgtcggtgcggactcataggcatgctattggtaagtaattattcggtgtggactagccagatagtgtgt

SEQ ID NO: 25448 - DNA, 280 bp, Glycine max
  Clone ID: PAT_MRT3847_122982C.1
cttgggcattaggttctccagcagagctctggccagctgcctctactttaactgggaacacaggctctcacaagatcagaacccccactcacccccaagatcttatctagcaagcctgtagtattcagtttctgttgtaggaagagagcgaggcatccctgaattccacgcatctgctggaaacgagccgtgtcagatcgcacatccctgcgcccccatgcccccatgcccctctgagtcacacaggacagaggaggcagagcttctgcccactgttatt

SEQ ID NO: 25449 - DNA, 1284 bp, Glycine max
  Clone ID: PAT_MRT3847_122983C.1
gcctttttataagctattttgaagagcttattaaaataagttgaaaattgcttatagatatatcgcgagttattttcacaagctctaccaaacacttatataattgttgatgtcataaaataaattcaactaaattgtgaataagttcttccatgttcatccttatttgataagtgcttaatcaaactgtttgtccacaagtatcataagtgtttaattaacctgtttatccaaatacaccccaagtagtgatgagcaaaatgccataactatcatgattttctgatcctgacttactctgcaggagagagaagcctccatttataaaacatcgtgtgcgcactctctcttctcctaggtttcactcccatcaacagcaacgatggtgcagaggctcacttatcgcaagcgccatagctatgctaccaaatccaaccagcaccgggttgttaagacccctggtgggaagttggtgtaccagaccactaagaagagagcaagtggacctaagtgccctgtcactggcaagaggatccaagggattccacacttaagacctgctgaatacaagaggtctagattgcctaggaaccgcaggaccgtaaaccgagcctacggaggtgttttatccgggggagctgttagagaaaggattattcgtgctttccttgttgaagagcaaaaaattgtgaaaaaggtattgaagatccagaaggcaaaagaaaagcaggcatcaaagagttaagctgttgagttattcgggagtgaaaaaaagatcttgttaaaatttgtgctaaagaattttgattttgaatggtgttaactatgaatgtgaaacttaatttgaaatttattttatgaaaaaaaaaaaaaaaaaaaaaaaaaaaaggaaaaaaaaaaaaaaaaaaaaaaaaaaaaaaaaaaaaaaaaaaaaaaaaaaaaaaaaaaaaaaaaaaaaaaaaaaaaaaaaaaaaaaaaaggggggggccgttttaaaggaccaaagtttacgaccgggggctgggaaggcaatattttttttttggggcccccaaatttaattcactgggccggggtttaaaaccggggggatgggaaaaccccgggggtacccaatttaattggcttggaaaaaaatccccctttcccaagttgggttataacgaaaggggcccggacggtgcgcctttccaaaaagtggccaaccttaatggggaatgggaaccccccttgtagggggcctttacgcgcggggggggggggggttttcgggcgggggggccc

SEQ ID NO: 25450 - DNA, 178 bp, Glycine max
  Clone ID: PAT_MRT3847_122984C.1
aaggcataaaactaaggctttgcataaactattaggaaagcgcataaacaagacaaaccataatgttcaacttcgtgtgcgctgattcacaattactcattacgagcgcatattttgtttatttccagctgtttgaatgcaatgaaaagcttacttgttaaggggtctgctagaaaac

SEQ ID NO: 25451 - DNA, 158 bp, Glycine max
  Clone ID: PAT_MRT3847_122985C.1
ccacacaaccactatggggggggcatttaacccggaaatttgaacatttttttaatacgggacttagctttacacttactatttacataacaaactttaggaatgacagtttttttaaaattaaacgggcaggaacttggcctttattgcaagggaaa

SEQ ID NO: 25452 - DNA, 162 bp, Glycine max
  Clone ID: PAT_MRT3847_122986C.1
tgggggagtgagagtcagaaaatggaggaatcacgatcagggggtgtgtggtcgtgttgtgccccattgaagatcaccgtggagtcgcgaaggagcaccagctgcaagaaagtcgtgttcgcatccatcatgcgccgcagcagccttcctcgatcgaccctg

SEQ ID NO: 25453 - DNA, 492 bp, Glycine max
  unsure (1)..(492): unsure at all n locations
  Clone ID: PAT_MRT3847_122987C.1
ccacgcgtgcggagctctcaacttttttgactgtgggaggggagaggggtggggagaattttttgggaaagcgagggggacaaattgagtatgagtgcttanctcgtggggacttgctagaagtacggggcgtgtttgcgaggggtgtgtttgataccgtgtatccactacacccaggcaaagatcagtgaaaaaagagggggtggattttcaagaggcgangttgaagttttattanaaggtgtgagaaaattgaggctggagtaggcgttctatcaaggggaatacgcggtgaaaattgggataatgtggggggaagggctgggggcagcatttgacatttgaggggggacttgggggattatcattaactttgggatcaggccgggagcaggtaaatagggagcgggtaaaaaagggataactggttccaccccgaaaaaatatttttggcattttcttttaaaaaaaaaaaaaaaaaaagagaagaag

SEQ ID NO: 25454 - DNA, 363 bp, Glycine max
  Clone ID: PAT_MRT3847_122988C.1
ctgacactgcacatgttgccacaactcagttgcatttagcctggcatatattataactgtaatgccaatccggaattcaattagatgtgtagtcttgtgacaacttgtgaaattttcggctctgcaatcaggcacgctatgctagttcagttactaagctgaactgtttctactacggaaagggaaatttcaatcggtactcattaacttgctacttggatattgcaaatgtaccgtacgcatcaagacatacgtgaaggacattcctcataaattacatcatcatcatcaggatatatctcatatcaaacaggtacctggttacgtggatgactatgcggcactacttgaggtgaaatcttt

SEQ ID NO: 25455 - DNA, 180 bp, Glycine max
  Clone ID: PAT_MRT3847_122989C.1
tgcgtatatttgagatgaaagtctatccgcaatttcgaggtcttgcactctatcacagtgtccggaacaattctacgaatgatgaccaataatgctcggtgtatagtcgagccctcatgagcagaagatacacggatctacatactaagggtgatgttcaacagctttgccacaaagcag

SEQ ID NO: 25456 - DNA, 723 bp, Glycine max
  Clone ID: PAT_MRT3847_12298C.1
aatgaatcttatacaaaacccctctttaagtttgctactacacttgtatttctttctgctttgtcttcattgcacaagttcttatcccacagccatgaactgcaccgacacaagtcgtgtttgcacttctttcttggcctttaagcctcatcaaaaccaaaccttggctgtgatacaaagcatgtttgatgtgttgcccggtgagatcaccgttgaaggcaatggctgggattatatattcatcaggaaaaactgttcttgtgctgctggtatgaagaagtatgtgtctaacaccacactcactgtgaaatccaatggaggatttgagcatgatttggtgatggaagcctatgacaggcttgctctcttgcccaacaccacgacgcgttgggcaagagaaggcggtatcatatctctgagcttgttctgtagttgctctagtggactgtggaactatctgatgagctatgtcatcagagatggggacagtgttgaatcactagcaagcaggtttggggttagtatggatagcattgagacagtgaatggcattgacaatcctactgttggttctctcgtttatatacctttgaattcggttcctggtgagtcttaccacttgatgaatgatactcctggagctccaaccccttcgccgtctggtaataatttttcagctgaccaagtcaaccagaaagctcatgtaccccatgaatggatcat

SEQ ID NO: 25457 - DNA, 2750 bp, Glycine max
  Clone ID: PAT_MRT3847_122990C.1
atcaccatcatcacccttcactaccctcttcattctttctttctaattctagcttcaaagcaactaaacattattagattcaaagtttcgtcacaatcgagagatagaatgaagctctcgtcgttgcagcagagctacctcaaccgccggagcaacagcttcagaggatcgctgccgttggactcctccggcgaagtctccggcaagtctccggcggcgagaaccttctggctcctcctccacgccgcgtgctgcctcgtcagcgtcgtcatcggcttccgcttctcccgcctcgtcttcctgttcctcttctccgctgcctcccgcggcggcggcggcgaaatctccgctccattcgtcgtgcattccaccctcgccaccgccagcccgatcgcgaagagcatcacggcgactccggcgaaccctaccgccgccggcagccgttgtgtggtcggacggcacgggatccgagtccggccgtggccgcatccgaaggctcgaggtgcatttaatctgcgtaaattattcatatcatacttcagaccacactcaataggcttcccaccctatctttgatttgaactatttcattcgatctctgcaccagatttcttctaaaaattattcataacatatttctaacaacactcaaaagtcatctaatatagttttatcctctcaaacttgcattttagcaatggccaaatggatctcatttgctgctctttttgcaatacttttactactcatctctcctgagcttgcaagtgctgcccaacctagtcttattcttcaactcggccgaaaacttttccaatgcggcagcgccgccgtccctgttcgtggaaataccccatccaatggccgctcctagaggatataccccaccaccaaaacacccactctatggctgaatatttgagatgttagcatccttctttaattttctgataaaaaaaatacttttaaagatgtataattgtgtgtcattactataatatatgtcatgtatgcttaatttcactgaaccatgtgtactactgcttatcggtcacgtccatttagtggccacacctgtatccagcgaataaaattctcataatcagtttgtcctctaaaaaaaaaaaaggagaaaacaaagacaataccttttgctcggcagagcccggtgacgcatttttggtgcccattccttattatccaggttttgaccgggatttgaggtcgggaacaggaattaaacttgttccagttatgtgcgatagctcaaacaatttcaagttgacaaagcaagcattggaagatgcgtatgagaaggccaaagaggataatataagagtaaagggcatgctcatcaccaatccttcaaacccattaggcacagtcatggacagaaacacactaagaaccgtgatgagcttcatcaacgagaagcgtatccaccttgtatctgatgaaatatactctgcaacagtttttagccaccccagtttcataagcattgctgagatattagaggaagacacagacatcgaatgtgaccgcaacctcgttcacattgtttatagtctttcaaaggatatggggttccctggcttcagagttggcatcatatactcttacaatgatgctgtggtccattgtgcacgcaaaatgtcaagctttggattggtgtcaacacagactcagtatcttttagcatcaatgctaaatgatgatgagtttgtggaaagttttctggtagagagtgcaaaaaggctggcacaaaggcatagagttttcactggggggttggccaaagttggcataaagtgcttgcaaagcaatgctggtctctttgtgtggatggatttatggcaacttctcaagaagccaacgcttgacgctgagatagggcattggagagtgatcggtgatgagaatagcattaatatttcacctggcccttctttccatagccatgggccacggtggttcaaggtgtgctatgtcaacatgaatgttatggcaggtcaaacctcaaaacaaaaaagtcttatgatatcacgatgtcaccctgacttccccgatacccacaggacccattgggttaaaggcaacttattggtgtgcctctataccagtacgccagatgatatcatgatgttgacttactcccccatacctcagtcacctctggttaaagccacaatttgagttggcatatttctctgaaccctctagaagaagtaactgatatatgatgattatttggctctttgacttgttgttttggcaaggtacataaagtgcttgagtttgttatttttaacagcagtaacaggcaatgcctgatattgtttttgttaccaacatcgaagtctctttgccttgcgtcatagaacttgtgctactggaaacatgccccttcaatttttaggggcattttttttttcttttttcacttaccaaataatgggttcaaggtgaaaaaagtttataatgtttgtaaggttattggtttattagaagagtccagaagaagtctgtattcttatactgcaattgtaaggtcgatgatcaataaattgttaatagagggtcttcaatacccaccctcttttctttttgagacaaaaggaaatttgatattgcagtgacaaaaaaaaacaagcaagttttccattggccaaattttcagttattatttaaggacccgttcgatttgaatggaaaagaatagctcgagggagagggggggggggggaagg

SEQ ID NO: 25458 - DNA, 317 bp, Glycine max
  Clone ID: PAT_MRT3847_122991C.1
tgcacataactggcgtagaaaagtgtatcatggcggacagcaaatgaagggccataacatgcccgaagttggctctttcttttagcaggacatataccactttttatgtcatgactcacaagcgtggcctgacaagtaaacatatcttccttgacaactccaacaccaccttcatgtctgccatactcattgatgctacactctttaagatctgtaagggcactcacgaccagccaaattagtacagccaactctgctaagacaaggggccgtttgttttataagaaatgggggggggtctgtttctaaaccttggg

SEQ ID NO: 25459 - DNA, 208 bp, Glycine max
  Clone ID: PAT_MRT3847_122992C.1
tgcaggagagcgaggtgcacaggtattgagtgatccaagcctaccataatcaggcgtttattggagctgactcgcggcctgtgtttcgtgtcattaccaatcgtcgccaaaggccaccgacgcacagaacgctcgcaaggtgtgggagactaaatttttttttactggagtgtcttaagtggcactatggcggctgacatattcatct

SEQ ID NO: 25460 - DNA, 669 bp, Glycine max
  unsure (1)..(669): unsure at all n locations
  Clone ID: PAT_MRT3847_122993C.1
ctggttgccttattattgtcaggatttcttctatgatcttttattatttgatgaagtctcagttgggaaatttaactaaatactagtggatggtaatttaaagtgtattgaatctattgatgcctatctataagtattgggagatttatttaagctccttgattgatcagtcagattctaaaaattaacaccacctccttccaccttaaaagaaattctatttccatatgagagtgagtttgcatctcatgactctggagaaggtgtatagctctcaggattcgtactaatcaaatatttttaattacatggattcatgcgagaatctcttcagtagcctttttttttcctttgatagacatttgaagtttgaatttacttttgtttagctcatcttaattatttttagatcttcatctgtcaacccgtttgaacgtatttctttgctttgtttaatcaacgttaactgttcttaataattctatcttattttaatatgcaggttgtgtgtctttaaaacatctatgaactgttgttggcacttggcagataattattgcatctagcaacccataaagacggtgactatgagtaatctgcaaaatntaatgctatactctgtgtctctgaatgaccatcaagtgatccggtgcggttggaaagaacctt

SEQ ID NO: 25461 - DNA, 353 bp, Glycine max
  Clone ID: PAT_MRT3847_122994C.1
aaatttccacacctcttctaatcgtcgcaatgatgtgtgaagtgtgtgttatttcaacaacaacaaagacttcataaaaaacaaacaaaccaccacaacaaaaaaagctggtcagccctcttctcgtgcgcccacccacccataaatacatccctcacctgctcctgcatgcccaccacctttcctctcaagacaacccttataccctggacatacaatatgcctatacacttcctgtgcaacattaacataccctcacattctcacacatcattcgatccgctatcatacaatgcccacccaccggtgcccaatgattctgctacctaacattaatgacgtagctctcactg

SEQ ID NO: 25462 - DNA, 265 bp, Glycine max
  Clone ID: PAT_MRT3847_122995C.1
gggatatcgagatggagatggaaatgctcggtctagaaagcactgctcgacaacaacagcagcagcagcaacaattgatcgaagagattgacaggatctcttcaacatgtttccggagccaggaattcagtaggattgttgatttgaatcactactacccttgatgacatgttaggcatctgctgaaccatctgtatttactcaattacatggacttactgtgcaaccttaaacacccacaaaaagtgggcttaaggtgcgcaaa

SEQ ID NO: 25463 - DNA, 521 bp, Glycine max
  Clone ID: PAT_MRT3847_122996C.1
gtttgttttctttatttttttactttacggtttaactccatgagtagttgttcataaacacaccaaatttgtgatttttatctcaaaactccatgagtataggtttttttcgtttgttcctttactttacggtttaactccatgagttgcgatttatagacacaccaaagctgcgatttttatctcaaaactccatgagtacaaatttgttttctttgtttctttactttacagtttaactctatgagtagttgttgaaaaacacaccaaagttgcgatttttatctcaaatgtgactccaatgtgactgaagtgcattatgcattctcggggtacgtcttctcttctctatgtcttaacttctatatgcgttttttattttgtgacttttttttgttatcctgacctttgtgggtatgtcttcccttccatgagtaacggttcataaatacaccaaagttgtgatttttatctcaaaactccatgagtataggttcattttctttgtttctttactttaa

SEQ ID NO: 25464 - DNA, 429 bp, Glycine max
  Clone ID: PAT_MRT3847_122997C.1
gtggggcgcacccgggtaccccagaacgagccctggtagagctccgagttttcctaaacggaggtgtaaacagtgtttaattttagtagggaaaaaatttttcacaggggaaaatcgtgaggcataaacttttccccccgggaagccgtccgaaagaaaaaactcaaaaaaatggggggccaaaaaatgaacctttttaaatttgggggcttttcgtccaatttccctttaaaaaaggggaaactggctgggcaaggcttttaaagaatagaccacccggggggcatttgcttttatagaaaaagaccccccagggttgtttttcttttaccaattggaccccaaagattttttttttttttaacccgctggtttgaaaaaatttggaaaaatcctccctcggggggtggaacaggggggaaaaatttt

SEQ ID NO: 25465 - DNA, 459 bp, Glycine max
  Clone ID: PAT_MRT3847_122998C.1
ccagcgcgtcctcccacacaagcgcccatccttctaatatctcatctttacttgccatatcaaacataatagcattaagctcaaatcaaaaatacaacatgcaggcacttcaatcatcaatttcaaagcacaatctcgccaacattggcgcactctcagcctctagaattcaatcaacacttttaccttattcatgcaaaaaatctccaatcaaacccagtctcacacttatccatgctatgatgcatgctcaagctctaactttaccaatgctatccggttcaactacttatcattattatgacaaactttatattcatccaaaaccacacgcaaattatattattcctactcccaatgtcacccaaatagttcaatatgaaccttcatgtcctttctaaaaattaaaaataaaactgtaagggtcatgttattaagattatgacatattcctatcat

SEQ ID NO: 25466 - DNA, 474 bp, Glycine max
  Clone ID: PAT_MRT3847_122999C.1
ctcgcatgaacctcgacgttcctcgcttcgacgataccaatgcccctacattgatattcaaaattagtcaattttttgactatcatcgtactcccgaggacgagcgccttcaggtgacatctttttaccttgacggtgaagccctgagttggtttcagtggctttaccgcaacgatcagttgacgtcctggtcctctttcctccaagctttggaaatgcgtttcgcccagtccatgtacgatgatcctcgcggcaccttgttcaagttaacacaaaccgggtcagtcaattcattccttgcgatgtttgaggctttggcgaactggatagtaggtctccctaccccgtttctcctcagctgcttcatatcggggcttttgccggacattcgccgtgaagtgcttgccatgcaacccctatccctagtccaagcagtggctctgtcacgccttcaagaatataagatcaatgacg

SEQ ID NO: 25467 - DNA, 286 bp, Glycine max
  Clone ID: PAT_MRT3847_12299C.1
ctgactttcttcggcttcaaattttaaaaacgatggcgataatctagaaatgtgatacctcacaactggacaggtttaattgctttttacacaggtctgtcttctgagttctcactaccattattaaaatttacgttcaagactccaccatggaaaagacgaacatgtgaatagtgggacattatcctctgagtcatcactgggtacacagtctgaaaccttctgacgctaaaattcatccaatcgactctcaccgtctggccggcgctactcaccttgatctcga

SEQ ID NO: 25468 - DNA, 466 bp, Glycine max
  Clone ID: PAT_MRT3847_1229C.1
tacggctgcgagaagacgacagaagggccaggttaataattgaattgtacgcgcgaaggctttagttaaagctatgtagtttaatttaactgtacttgtgccaaattagttttgtcaatgatattcactttgtttatgaaaaaaaaaaacgttcagggggatgatggtaaaattgtgatgatgcaatagacttttgtgttccaatttgcattagcttgtaccaaattggatttatgaatgatttttttgtttacacaggatttatgaatgattttcactttgtttatgaaataaaagatttatgttttaaatacttgttattaatttaagaataaaataaaacttacaccaatccaaaaaaattgcagggacgtacattggtattagaaaggaaattaaaaactaaaaatattttttaaatatactaattaaaacttgaattaaaactgtattttgaatgtctcac

SEQ ID NO: 25469 - DNA, 450 bp, Glycine max
  Clone ID: PAT_MRT3847_122C.1
tccaagaaggtttcccgtcatcactgtatgacgtcctccttctttgggggggggggggggggggatataaccaaggacagggtagatgacaatgagttagggtagatcgatgcgtatgtaggaggcgcgagcagtaaggtaactttcacttgataaatgtaaaattataaagaaaaagcaagataaataaaataaccttcaaacaactaaaggacacataatatactgtgagtagagaatggaaaagaatggcaaagagcagagagttagaagggtggctagggaaccgtaaggcccatgtaaacgtaacacctttaataggcgacgagtataaaaccaagttgtggacataacaaacgtggtgcccgttgcacaacagtattacgcatattattagccacagggcaccttggaagtttagaccacgtatgaattaaaattatcggatat

SEQ ID NO: 25470 - DNA, 497 bp, Glycine max
  Clone ID: PAT_MRT3847_123000C.1
gtaatgatgatccgcggtcatcggaggtcgccgcttcttaccggcggcaacagcagcagttgcttgttgacaagaagaatttattaatttcctactactttgtggacgacgacttatgggggggaagataactattttttgtggtggccgactacttgaagaatcattttctccatcactagtagattagctgctgaccactctattatatgtaagagtacttgtcggaagaaaacaacttctgctgcttctttatcagtctgctgaataacaagaagaagatgctgaagaaatgtaggagtgctactactactctactatgtgtaggaggacgtggggggacgactctattattcttctcctttctactactctcttcttactgctgcgccgtgtcgccgaacgaagtgttattatgagaacactcttgcgcggtggcacatgtgtgcgctgcgaaaattctctgtggagaccacgtgctctgtgacaacacaatt

SEQ ID NO: 25471 - DNA, 362 bp, Glycine max
  Clone ID: PAT_MRT3847_123001C.1
attatatagtatttactacgataggtatttaaatattttttttagggaaaaaatggtttttaaaactaacaagctattttatattttaaatcaattattctatttttttgggctcaattaatctaatatattgatttcaatttaattaatctaagactttggatatcaaaaagatttttatatgtaatctttaacacaatttaatccataaccggattcctttgaaaacattttggtagaaaataaataacgctatttattatccattttcttattttaaaacattggttcaaagctttactaattcttttttacaaatttacagcatttccaaaaagccttaaacaatttctatatcctgg

SEQ ID NO: 25472 - DNA, 354 bp, Glycine max
  Clone ID: PAT_MRT3847_123002C.1
cgcctctaagctcgcagttccatgatctcgcgactcaagatgcatatattcgtgagaactttgactggcaggaccatcacccttgaggtgaaaacttccgacacgattgaccacgtaaaagctaacattcacgacaatgaagggatcccacctgaccagcagagacttagctttgcgggtaggccacttgacgatggtcgcacccttgccgattacaacatccagaaggaatcaaccctccatctcgtgctgtcgcctcaggggtagcatgcacatctttgtctagacttgaaccgggaagaccatcacccttgaggtgcaatcctctgacattactgataacgtcaaggccaa

SEQ ID NO: 25473 - DNA, 499 bp, Glycine max
  Clone ID: PAT_MRT3847_123003C.1
tatgacgatgcacgcacgcgtacgctcgcaattcggctcgaggaatgactagcatggttaacaacaaggtcgaggactattataagatcaggaatgcagatcctccactagggcaagatggactgacttggactattctttcgactggaaattggggtagcctatgctctgctcgtagaactagcctacttcataggaacataaggggacattacacatgtgcgatactattacgacaggagagctatgcgcttagtgaatgcagctaatggcccggcacgtctgaaaagcaatcggacatatatacatgtgatgcagagggacatctgctggagcacattttcactacatcgaaactgcattactgcaccatcaaggactgcaaacggccttgtggaaggttctaagatatttgacaacattgctgctgaagcacatatgcacactcatgatatacatacgtttacactaggctgagcaaaattgggcggacggcgac

SEQ ID NO: 25474 - DNA, 352 bp, Glycine max
  Clone ID: PAT_MRT3847_123004C.1
gcggccggcctttttttttttttttgaagaggaaagttgcacgatgtaggggaacctatgtggacaattgcgaaccaaaatccgagccccataaactgtcttccggtacctgagacacacatattttcaagtatttattcacaccttcttgactagaaaaacacaagtggtgtataaactaactcactaatccctcaaaataacaaaaaaataaatcacattgacccagaaatgcactgcggccaaggtgtattcctttatagagatgcaaacagctgtttgcgacccatagggcattttccctattcaaattttactccagcatctctatatgttcaataggcaacaggga

SEQ ID NO: 25475 - DNA, 643 bp, Glycine max
  Clone ID: PAT_MRT3847_123005C.1
acgactcactgtagggatagctgcagcacctgcaccgcaattcccggagaataagtttccgccaaggccttttgttggaaatgattgtctctgcggttctcctttgccaccctgcaacaaagcataagtgtagtaagctttgttgttgatgatttcaagtgtttaatttccttttgctgctaagttttccaataattatgtaatttaataagtaaattgtaattttaactttcaataaaaaaaaaaaaaaaaaacaaatgaaaaaaaaacaaaaaaaaaaaaaaaagaacgaacttaaaaacaaattgcaaaaaactgaaaggcaaaaaggaacacacccatgaaaaaaaaacattaaacgggggcggccgttttaaagaaccaaatttttctcccctttgcttgcaaggaaaaattttttttttggggccccctaatttaatttccttggccggcttttaacaccgggtggccgggaaaacccttgggtttcccaatttaattggctttgaagaaataccccttttcgccagttgggaaaaaacaaaaagggcccccccgattcccctttccaaaaatttgcccaccttaaaggggaaagggaaccccccttgtccgggcccattaagccgggggggggggg

SEQ ID NO: 25476 - DNA, 751 bp, Glycine max
  unsure (1)..(751): unsure at all n locations
  Clone ID: PAT_MRT3847_123006C.1
ggacgggcgggcgagcgagcgagcgagtgagcaggcggtgtgggcgtgcgaggcgaggccgagtcgcgagcgacatgggggatcgagagcagctgctgcagcgggcgcgactggcggagcaggcggagcgctacgacgatatggcctccgccatgaaggcggtgacagagctgaatgaaccactatctaacgaagatcgaaatctcctctctgtggcctacaagaatgtagttggtgccaggcgatcttcttggagggttattagtagcattgagcagaaaaccatggcagatgggaatgagaagaagttggagaaagttaaagcctaccgggagaagattgaaaaggagctggagacagtttgcaatgatgtcttggctctgcttgacaagttccttatcaagaactgcaatgattttcagtatgagagcaaggtgttctacctgaaaatgaagggcgattactaccgctacctggcagaggtggcttctggggagaagaaaaacagtgtggttgaagcttctgaggccgcgtataaggaagccttcgaaatcagcaaagagcacatgcagccaacacaccccatccggcttggcctggccctcaatttttctgtgttctactatgagatccagaatgcaccagagcaagcctgcctcttagccaaacaagccttcgatgatgctatagctgagctggacacattaaacgaggattcctataaggactncactctcatcatgcagttgct

SEQ ID NO: 25477 - DNA, 257 bp, Glycine max
  Clone ID: PAT_MRT3847_123007C.1
aatctattaataaaacgaaacctaacaacatttgggctaatccgccaccataaaacccccccgggatggcccacccttgggaccgaaaaaccccagggaaagggtaaaccggtggagaaccacccaaatttaccttttaaggcatagaagggaaaataaaaacccttgtaaatcaagggatccaattacccaaggtgttttactggttttaaggcccaatcccagaacccaaaattggcaaaaaaggacagggaaat

SEQ ID NO: 25478 - DNA, 1036 bp, Glycine max
  Clone ID: PAT_MRT3847_123008C.1
tttttttttaaaaagcaaagtgatttattgatataaggaattaaaatgtttatggtaccataaacaaatcatgccaatgaacaatctcgtagatctcttatttatataataatgaaaatacattacagactccatatgtattaacaatgaatgaagtacataagatccttatacacagcataatatactcttttttttttagagaacagaataatatacttaaaacatgaaacagattatcctaaatattttagttcatatatgtgcacctatggtatcacatgaccaaataatactgatcaatgaaattaattcacctcagaacaattattaggcccaactggttctctcaagcaactagaaattgccataactgctgcttcaatagatgcatcttcccccttttctttccaatagaaaatgatcccatacttcccagtcaagcgattccaaaagctacttgggacatccaaatcaaccgtagcaccaacattgaaattcaatatattgccaaatgtgggatcagcaacaaaaacaactgttctgtcatctacttgccagaaatctttaatagccaaacctggcgtaacaggatagttctgggccaaaactcttaacttgaatccagtatccgcttcaagagcagcaatctcttctgctagtcttttctcctgtccatcggataggaacccagcaacatcaatgacagtactaaactccttggggagcaactctggcttgttcacaccaacttttgcagcctcagccacgccaattcctccgaataataacccaagtgagagtgccccagagagagcaaaatgaagaggcttgaagtgccacggggtgcgtgttggaaatgaagggacacgacacgacagcgtcttaggttgtaatgtccgaacaggaagaagcgagcgaggcggggaagtgagagatgcagataaagatgataacgatggaatgtgaagaagataacgagaatgagccatcatcatcttcccttctctccccttctgtcgtcttctcgcagtag

SEQ ID NO: 25479 - DNA, 332 bp, Glycine max
  Clone ID: PAT_MRT3847_123009C.1
agggggggaaaaaaagcattttttccctaaacaaaaattcaacattttttgggaaacaaaggaattcaaccccctttttttcttcttcctccattttcaccccttaaatatcaagggcattctttattcaactttgggcccccccagggttgggaacatcatcagcatggggaacaatctttgaccaaaacccaggggacccccaaactgggtgcctttcttcaagggggaaggtctttggcccaggcaacaacatggcaatgaaaagggcccttatgaggcccaatgccccaaaaaaaaaaaaagggcccaacttcaaggggcaaagcatg

SEQ ID NO: 25480 - DNA, 913 bp, Glycine max
  Clone ID: PAT_MRT3847_12300C.1
gttgggcctggctatggtgcatctacaggtctcacttaagccagtcaaaggggtgctactgctaccactcagaggactgccggttccaaagcatttagagctcctgcaggaactggttatgatgctcccagagggcctgggtatggtgcatctgcagggcccgcttatgatgcacaaagggttgctacttacgatgctcagaggttgactggttatgatgcatttagagggtctgcttatgattccaagagagggccaatttttgatgctcaaagaactggctatgatccacagagaggtccgggttatgatatgcagagaggacctgcttatgatgcaccgagagctgatggctatgatgcacagtcaagaggggctgctggtcctcatggacatgctccgccaatgaacaatatgccttatggatccacaactccgcctgctcgtagtggaggtggatacgaagctgctcgcggtgtaaaccctgctaggagatgatgaccttgagtcttgagagacaccattgatgacactcaattcaaatcattcaaatctgaatggttgaaacttctggttttgtcctaccgtaatttaatgtgcatagtggacgagggaaaaaaatgtttactaaatgcatcgtcgatgttgagaacatgagtttggtaacagaacagggtacaatctacccctaccgattaattggagtacttttatttgggagttaattttctcttcttttattcttaaccttttcaaatctaacttctctaggtattcctgatttttttttttttttttttgggaattttaaaggcatcctgttttcaactttgattttggctattttttttttaaaaaaagaaaattaattgttcaatggatgggatacccgttgtattctatatgcatttaa

SEQ ID NO: 25481 - DNA, 1990 bp, Glycine max
  unsure (1)..(1990): unsure at all n locations
  Clone ID: PAT_MRT3847_123010C.1
cttcggatagggagccaaccttaagttatgagtttgttatgggaaaacttcttgtagtaaactagtcatagcttacttggaatataaattcttgtagtcaactagtctgtaggtttcaattactgcggctgcgagaagacgacagaaggggacactattcctgattccgaatccgagaacgtggttgtgacaggatcattgagctcggcaagaatggaagaacacaggttgagcttgagaatgagcacgcttgtcttcactctttccattatcatcatcgtactctcttacccagcacaaccacttgcgttgaaccattctccgaaattcctaggaaaattcgcagcaacagcacgaacccattcaaattccgagccaccgccgcaattccactacgaaaaaagatacttccaacagcgcctcgaccacttcagcttctcggagctacccacgtttcctcaacgctaccttatcagcaccgaacactgggtgggcccacatcgcctgggcccaattttcttctactgcggcaacgaaggcgacatcgaatggttcgcccaaaacacaggcttcgtctgggaaatcgcccctcgctttggagccatggtggttttccccgaacatcgatattacggcgagtctgtgccttacgggagtgcagaggaagcgtataagaatgccactaccttatcgtatctaacagcagaacaagcacttgctgatttttccgttctcatcacttatctcaagcataattactccgccaaggattgccccgttgtcttgtttggaggatcatatggtggaatgttggctgcatggatgagactcaagtatcctcatattgctgttcactagcttcttccgctccgtaattttcctgaaactttctatgaccttgtttccaatgcttttaagcgtgaaagcacttgctttaactatataaaacagtcatggaatgagatagcatctacaggccaaacaaataacgggctggagcttctgaccaaaactttcaacttatgtcagaaattgaagaggactaaagatctgtatgactgggcagaggctgcgtatagttatttggcgatggtgagaaattgaagttaacttctggttgtttccaggaacatgtttgagcttgtagcttcggtttgtagaaggattgatgggggtcctgctgggactagtattctagagcgcatatatgaaggagtgaatgtctactacaattatactggagaagctaaatgttttgaactggatgatgatcctcatggcatgagcggttgggaatggcaggcttgcactgaaatggttatgccaatgtctagcagccaggagtccagcatgtttcccccatatgagtataattacacttctatccaagcggagtgcttaaagaaatttggagtgaagccaaggccaagatggattactacagaattcggcgggcatgatatccatgccaccttgaagaaatttggaagcaatataattttctcaaatggcctcttggatccatggagtggtggcggcgttttgcagaatatatctgaaagtgtggtttcacttgtcactgaagaaggtgcacaccacatagatttacgttcttcaacaaaaaatgatcctgattggttggtagagcagagggagactgagataaagctgatagaaggttggatcagtgactaccaccagaaaaatgaagctatgtttgatatgtaacagaatctttctactgtttgcttcagcactgttctgtatatatagctcagtaaaacacgtttgttaggtttgacaaaccttatgttcttgtttggttttgtaattgctcgggacaatatttgcaagcaatttttctttgaatttgagtctaattcaatttcacaaaactaatttataaggtaaaaattgtctttcacttaaaaaaaaanaaaaaaaaaaaaaaaaaaaaaaaaaaaaaaaaaaaaaaaaaaaaaaaaaaaaa

SEQ ID NO: 25482 - DNA, 416 bp, Glycine max
  Clone ID: PAT_MRT3847_123011C.1
ttattttttttcttttttttttttttttttggggtttttttttttttttttgtttaaatttccccttttgtttatgaaattttgacaaggtgccccattgcctgaacccaattttgctcctaagggggggacccaaaccagggagaaaacaaaaacaccccacacagaaacggagaagcacccctaagcacccccacaaaaaaggagacacaccgccaaattaaccggagacgatggaagcaagaacattggggggccagagaaacccaagaagggggccgcaaccgcagagagtaggctgaccaacttcggcacacccagggcatgacccataggaaccgacaaggaggagacatacgacccgccacacctgggccgaaacgccccgggatagcctatgaacagcaagcccccgt

SEQ ID NO: 25483 - DNA, 343 bp, Glycine max
  Clone ID: PAT_MRT3847_123012C.1
agactgggaagaagcaaatatgaatagtaaatatgaagaaagaatacacatgatctagacgagtaaaaacttaaaaaactaggctctcaatacaacaagtgaatgaacaaacctagccacacactgactgaaggaccacacttgggagggagtggggggcccgcaagactcggtagaaggtggccggctgaccttgcaccaaagagagcatggctgggaccagctgacccacttcataacactgagtgacaggcatatgctggagtagggaacacatattgtcatgcatagattgcactgatgagtgttgtaccatacaatggcattagaacgatacgggggc

SEQ ID NO: 25484 - DNA, 777 bp, Glycine max
  Clone ID: PAT_MRT3847_123013C.1
gggacaacaccccccacgcgtccgatcatcgctttctcagtttctctccgtcatcaaatctagggttcctgcagttgtagttgccgtcaccaccgcgagcgccacctccagaatagttgccgccaatttctgattcgtgatggggaaaaatgagtttctcacacctaaagcaattgccaatcgaatcaaagcaaaaggattgcagaagcttcggtggtattgccagatgtgtcagaagcagtgccgagatgagaatgggtttaaatgccattgcatgagtgaagggcaccagcgtcaaatgcagatttttggacaaaacccacaccggatagttgagggctattccgaagagtttgagagtacttttctggagcacatgaagcgcagtcaccgattcagccgtgtggcagccactgtagtttataacgaatacataaatgacagacaccacattcatatgaactctactcagtgggctacgcttactgagtttgttaagtacttgggtcgaactggcaaatgtaaggttgaggaaacacccaagggatggttcattacatatatagatagagattcagaaacccttttcaaggagaggatgaagaataagagaatcaaggcagatatggtagatgaagaaaagcgagaaaggaatcaggagacagattgaaaaggctgagcaatgatgcagccgtctacttctgaggctgatcagccttcacaggttgagccttcgagggaactaaatatggaagatggaatccagataggattttt

SEQ ID NO: 25485 - DNA, 497 bp, Glycine max
  Clone ID: PAT_MRT3847_123014C.1
tccaggaaggtttcccgtcatcactgtatgacgtcctccttctttgggggggggggggggggggggggggggggggggggaaaaattaagtacccaaagctaatgcgaagaggggggttaatcacatatggtggggctaagggcctttggatcaacggagtgattggttgaaataaccccgccataaaacctcttaatgccggccgtcctgaggcttataaaccacaaaatatcacgtaataggattacgtgttacaataggacagaggtctagatactggacgggtggtacgcgacagggcccataaaccgttatatgagttatcccatgataaaagaccccacgaagtgagatcgggcaatggctactcggtaaataaaaggccgtaaaatagcggggtacgttacctcaagaaaaaagccggtattattaatgcccgatacggtggattatgggaaataatgtagaatggagtagcagcctatttttataggat

SEQ ID NO: 25486 - DNA, 825 bp, Glycine max
  Clone ID: PAT_MRT3847_123015C.1
cctctagaggctcgcgcggccgctcgagagggcgaattcaatcaaaattccaaattcgtgagagctaattcaatcaaaatgtctcccaaatacaagctagtgctgttgatagcattggttttggttgcaacctcccttgctggtcgcacaaaggaacatcctaagcatcctccatcccttcaagaacaacaacacaccccacaccttgatagctacccgccaaagcatagaccgaaaccacctcatcctgtacatggtgccggggaggaaccaacctccattccacgaaagaagggaccaagaaggcctccgaactgatgagtgagtcaaaggtttcagattgcctcaaatggtttaactttgactcgatctctaccaccacaacatcacgatatgttgttacaatcataatcgcaatttgaaaccttgggctagctaaaactattttaatataaagtattaatggtcactgctacatgagcgtctatgattaaataaaaagtagggagtttgaacccatgtaataccatgttgtgaggttctccctctttgtgtgtgctttaaattttcacatatagtttgatttgtgtccggtgtggtctctgtttcttgtatttatttgtacaagctagatgctaaaatggatgagttaaagctcgcacttgttaaaaaaaagctagtatatgtgctattcgggaaccagataaaataaaattattattcatatgaaaaacagttaaaaaatactcgagactcgttctctaaaattatgggacgttttttttaaaaaaaaaaaagtaatttttttgcgccaaccccccccac

SEQ ID NO: 25487 - DNA, 350 bp, Glycine max
  Clone ID: PAT_MRT3847_123016C.1
cttatgcgctaactaggaggatgggaaaactggctttcccccaaggcacttcctgaaggggccaaagactgcctctttctctagggggcggagctggagcaaagaatgctcttgtcatgagttggcctaatgctgagctttcaatcagtagatattctggtggatatcacggctgagaagcttgttagatgacttctccctaccttaaatgtgcagcctctttcttcttagcacccgaaagtttgactgatgacaccactaacttagaggcctttgccgacaggctggtgcagctaggagagatccaggaacaagctgattgggaatccacaagaaggcatgcttacagc

SEQ ID NO: 25488 - DNA, 751 bp, Glycine max
  Clone ID: PAT_MRT3847_123017C.1
gaaaatccaacgttccaaatgacataaaaatctaatccacatagcaatgacaaatgaaagtgataccaaacccagcacaattgattgtacacttgtcaaaagttaacacttttctttaagtccaaaaatgaaaagataaaccaaagacttcacagtgagtaagccaaaaatctccaccacaactgctaccacatcctaccaacttccatcgtcgttcttcccaaaattacaaacgaaaggcagaatctgagaaatcagaatccagggagtagagaccaccaaatcaagcatgaggctgtaaacgcaaaaccattcaaaacaattatctatacttgttagcagttctaatcttctgtatgaagaatgaatgcaaaattgatactccagcatacttcgcatagcgaagagcctctgagcaatggggtacgaagtttttttaatcaaagagtcaaccacccaatcacactgtcccaaattcttcctgtgacattgtaacaatccccaaatgcataatactttgattgttcctgttacaaacccacacaagaactcccacactaacagaggggttattatacttacaccgacaaacaactagatcaaattccaaaataaactggataggcatagccagtccaaaacaaacaaacaataaaatgatgaatgcaagggtaataaaacctaaggcttcacacagaaatcttccgccacacagcttttccacagcctcccatgccagtccggacgcggg

SEQ ID NO: 25489 - DNA, 391 bp, Glycine max
  Clone ID: PAT_MRT3847_123018C.1
accacacgatcgattttattattgccgagcgttctcccgagtggcctcctttttcgctcatttctatggtcatggcgatcctgatggcaattgctctcggaatagacagcgccggatacagcatcccattacggatccgaaagcagcggcttgagtcggctctctagctggctatctcgctctctacggcgcgctcgacgacgatcacggcgaggatcaccgcggccacggccacggtcaccacggtcacgaccacggacccagagactgcccctgcgactaccattgcgatgaagctggtcatggaactctacggaagacccgatggcggcgctatagacgagcctgataagctacacaagtggctgaacaagttgatgatagagaccgt

SEQ ID NO: 25490 - DNA, 1270 bp, Glycine max
  Clone ID: PAT_MRT3847_123019C.1
gctgaggcggcagagggatgtgctcaacagaaggatcgagttctgcaagcagaaggacgccatcggaatggcagcgaggctcgccgagacaacgttctttgcgttcagggagtacaccgaggaggagctccggttggcgacggataacttctccgagcgcctcaggttgaagtccggcggggattggaccaatgtgtataggggacgctttaaccattccactgttgctatcaagatgctgccttctttgtcaccccaacattaggaatccaatgagataagtctaaacgatattaggcaacctcatcgggaagggccaaagacaatttttggtgagcctatatgcagggttttggcctacatgatgcctagtggtttacgagacatgatacttcaggaggcaatgacaaacccacacgtggcagcagatggattttcttatgagctagaagcaatagaacactggctgcagtcggggcgtgacacatcaccaatgacaaatttgaggctgaagcacacattcctcaccctcctagaccgccatttgattgcaaagatcacgggctttgggctccatgaatgccatgatgaacattgtaatattgagtcagatttgcgggccataggggctttgttaatgcaccttctaactggaagaaattgggctgggctcgttgaggaggtgatgacggtagatatagatagagaggctttgggtggcgttcttgatgagatggctggacaatggccattggatctagcaagggaacttgcgggcctggctatgaggtgcatgtccatcaaaagcgagccgaacttggaattgagcattgcaagggttttagaggaactcaatgagataagaagaaagggggatgaaattgttggaagggaaaggcgaaagacaaacactaatggtggatgtataaatagagagggatccagtgatgtgcctagtgttttcctttgtcccatacttcaggaggtaatgaaaaacccacacgtggcagcagatggattttcttatgagctagaagcaatagaacactggctgcaatcgggacgtgacacatcaccagtgacaaatttgaggctgaagcacactttcctcacccctaatcatacccttcgttccctaattgaggactggcagaccaacaaatcaacctgagttagcttcggattgaaatactaacaacacgctctttaatacacttgttacttaaacaataaccagttgagttaatgattcatgggcagattcaagtct

SEQ ID NO: 25491 - DNA, 570 bp, Glycine max
  Clone ID: PAT_MRT3847_12301C.1
taggggcctggctatggtgcatctacaggttccacttatgatgcacaaaggggtgctacttatgacactcagaggttgactggttccaatgcatttagaggatctgcttatgattccaagagaggttcggggtatgatatgcagagagcacctgcttatgatgcacctagagctgctggctatgatgcacagtcaagaggggttgctggtcctcatggacatgctcggccaatgaacaatatgccttatggatccacaacaccgcctgctcgtagtggaggtggatatgaacctgctcgcggtgtaaaccctgctaggagatgatgaccttgagtcttgagagaagccattgatggcaatcacaaatcaaatcattcaaatctgaatggttgaaacttctggttgtcctaccataatttaatgtgcatagtggacgagggaaagaaatgtttattaaatgcatagtcgataatgaaaaatacattctcactgcgtatgattgttgtacatgagtttggtaaaacagggtacaatctacccctaccgattaattgagtacttttatttggg

SEQ ID NO: 25492 - DNA, 490 bp, Glycine max
  unsure (1)..(490): unsure at all n locations
  Clone ID: PAT_MRT3847_123020C.1
cggctcgngncacttagtgatgcctccggttgtaacgcagcaatgatccttctttgtagggtagcaggctggggtgttatgtagaagactcagatcagcgaatcatgacgggcttataggggatgagagatcaaagtggtggcatgctcataacttgacccaaagtggaattaggactgtttgcatctacttggacgaattaatgcttctaaagactttggattttagtcggaacactatctcttgctgtgacatcccttctcgatctctctttttcctattccacacttgactctagcatcggtagcaactctcccatcgactattgctgtgactctgctccacgtgatgatccgccagacgttaaggtcactgctcatactgagaactcatgctgtggcacttgcgtctgcctgacatccagagcatgaatgcaatcctcttctaactgatgcttgctattttgccgcttgaagatctatgttctaga

SEQ ID NO: 25493 - DNA, 369 bp, Glycine max
  Clone ID: PAT_MRT3847_123021C.1
cgatgataatgatgcctccagcgacgaaggtttaccgcatttgcccgtaggcaacgacaaaaagacgcgtgttgttgaggatcctcctactaccacaaagaaattaaacgaagagtaacaacaaccacctgttgaaagaggtgttactgatgttgagggttttccaggtggacaccatgacacatcagtcttgagagattttgaaaattacattgctttgagagtcaagaatgcagaggtttgtaaatcatacaaaacataaagcacatagcttagaacttattatttttttttgttgcatgattgatattattgtttccaagaacgtcctgagcttaagttatctttccatggaaggaagatgactaa

SEQ ID NO: 25494 - DNA, 471 bp, Glycine max
  Clone ID: PAT_MRT3847_123022C.1
gagcaaaatcctaagaaatttttatttgatggagaaatgttacaatgattgaagaccattagggtgacctaatctaacatgccaaagactagcagtactagaagaagaaacaacagaattggaaaccgcactagagttattattaacagtagcagctgtactaggcaagccagtatctgaaattgaggttgaggtagacaacaacagaggagagttgtcttgaagcttgagattacaaaaggagtaaagactatcagcaccaacaactccttgaagaagtactttattggtttcctaatttctttccaagaaaaaaaataaagcaggaaccaacttcatgttgtgtgcttgtctagatgccctcgcttaggtttacgtcgtgcatggtgagtgtttccatttcgagcaggtttactcacttttttgctacagaaaacagctgaaaaccggacgcgtgggcggacgcgtggg

SEQ ID NO: 25495 - DNA, 496 bp, Glycine max
  Clone ID: PAT_MRT3847_123023C.1
cctttctcgtgcttatgcaagcaacatgggtggctactaaaatgagggattagctgaggttcttgctgctcaatagagtcctaagaattctaatgggttccacggtactgcatatgctgagaggcagactttgcggctttctgaagagtacaatgttatatacttctcgattctggctggcgaccattcgaatagaaatggattaccaagactattatcccagcgcataccgaaactgatgcggctatcactgtgaggtgcattgccaatgtatgaaacgcctgccattgcatttggaatgatgaagattgataaggacgggcgtatacttgaattagctgacaagcctacaggacaacagtcgaaagctatgaaggcctatactacaatattggttcttgatgacgatagaacgaaacaatcgccttatattggtatgatgggtgtataagttgttaccagataggtgatgctagacctgctcctggagagatat

SEQ ID NO: 25496 - DNA, 657 bp, Glycine max
  Clone ID: PAT_MRT3847_123024C.1
tgggttcctctagagcggccgcttttttttttttttttttttttttttttttgctctttcatcttgaatcgttttcgaagaatctcgagagtaataagtcgccagcctaaaaattcagcctgtatctatataactcgtttcaacatgacgaaatcgagataacattgttaaattagggtagggcatgcacttcgaaacgcaaaaaaatccgccgcactacgttccgtcagaaagcaagccccatcttctattcttatcatttgttcacttatttcacttactttcaaaaagcggtactggcactagtcaatcatcgtgcctttagccaatgatggatttacaatcaccgcggtttttcggagaataccactttagcggcgactaaaactaaagcgtatggccttgtggaggtttctaaggatcgttaatcccaatggacaaaccttggatcccattagcgcgggcgccggtaatactctatcttagagctcataaaggtgctgggagcattttagtaaagcgcgttcaaatagcatgagcttttgatacttatgagatcgatgatgtattgaaattcgactttcattggtgcttctttttgacggggtaataatgcgatggacctccttattttattattatatgggactttcgatc

SEQ ID NO: 25497 - DNA, 193 bp, Glycine max
  Clone ID: PAT_MRT3847_123025C.1
atattggaaattgttcaattaacttcaacctgaatttgtggtggcatggttcatagcacaacacttccattataatctattttttgcttcatcgcttccaagtcctttctcgtttatatttgaaactcaatctattggcaaaacagattatcaaaatcaaaaaatggaaagttgtttttttttcacctttgaa

SEQ ID NO: 25498 - DNA, 335 bp, Glycine max
  Clone ID: PAT_MRT3847_123026C.1
acgcgtacataagctcggaattcggctcaagctcaagtcaccagcttagtttgatatcgctgcttcataataatagcaataatgagtcgacttatcgtgcttcaacgaaattgctaagtagagggcaatgggatgtggcataagcagcgaattacacccacatattttcaagtttcaccgaaaggacgatgtacagatagggcatggcattagttgccaacctaccacgcctatatgcacagcatcgaacatcgcataggtagctctcgataaattcgatctctgcgatttgccgcattaaggaggcattgcagttcatgtatggtatgtcatta

SEQ ID NO: 25499 - DNA, 455 bp, Glycine max
  Clone ID: PAT_MRT3847_123027C.1
attctttcatgtacaagcaagaagagatcatagaagcagataataataatttgagcttcatgcatgcagaacaacaattggtgcagcttcctcatctagaaagtccttctttgccactagcaaagaagcaaagctcagtagtgtccccagatatcagacaatattaataacaacgaagatgatgataatcctcaaaagggtttatccaacactacaaagaaagtgaccactgattggagagctcttgacaagttcgtggcttctcagttgagccaagaagagaggcatgaaatagaaggggtgtcaagctttgcaactcatcacactactactagctcggacatggcattgctgctactgcagaataatagtagggaaaatgaaaggaacaacaagttcaacccgtttttcaatacaagctcaacaatatcagactgtgacattgggatatgcgt

SEQ ID NO: 25500 - DNA, 543 bp, Glycine max
  Clone ID: PAT_MRT3847_123028C.1
aatttcgttcaaacagtgagctccttcacttggactcttgtttggctttcctagcaaccttcgtgtcaatgaataaagttgtgctacatgtggaactacacgatggcaaaattaagaaaaaagccatgaaggtagtatccaatctttcaggggttgaatcagtctcaatggatatgaaagaccagaaattgaccttaattggagatatcgaccctgtggttgcagtggagaagctgaggaagctgtgtgacactcgcatagtctctgttggaccagccaaggaagagaatgagggaaagaataatgaagtggaggcagcagagaatcaaaatcagaataacttggctgatagtgtgaatatctacgaagcctaccacatacataatcagtatcagatgaggcaacatcattattgttgcactagtgtggaagagaatcctaatgatgcctgtgtcatttgctaactgctaagttcattttacaacatcatggaactcaaaaacaaaataagaactctagaaaagtgcttgcatggttgttccc

SEQ ID NO: 25501 - DNA, 430 bp, Glycine max
  Clone ID: PAT_MRT3847_123029C.1
ctccttgggggggggggggggggggggggggggggggggggcggggggggggggggagccggggcggggccgctgcccggtaggcttgtcggggaagacgataatatcggtttgtgttacagcaaaagtgaggtgggctgctaccataaccagcaactaaccttggtatacaagatctgtcctagcaaagtcaggtagttaaatacgcatgcaagcaatgtgtccacgcgaaaccacctagaaagaatgagacgacaacacattcgcaagcagtccatgatcaactagttaagccagatacgaggcaacatctgacattaagtcctccaagtatcaacagcacagtgctgccggatggcaatgctcggtctgaattgagtgcaaagatagtcacaatcagccagtagcccagctattaagaaagatacta

SEQ ID NO: 25502 - DNA, 310 bp, Glycine max
  Clone ID: PAT_MRT3847_12302C.1
cgacagcaagcgtgtgactaacaatgggcaggcggaacaggaaatgcaggatgctgtgctgaacctaatcttatcttcagaaggaatataccaagctcacaagcatactggatcagatcgccttacatgagacaagccagaagactatgatacagaataaggccaagcaacagttactatagcacgtacgggaaggaccacctgctgatgagaacattaagataaatgggcaagtcgatgactgatacatgttaattagatccgaagtgctcaagagagctcctagctgagaaggatcgtcatcaccaca

SEQ ID NO: 25503 - DNA, 343 bp, Glycine max
  Clone ID: PAT_MRT3847_123030C.1
aaggggtgtttcagaatccttcctagttgagaacaacaatggttcctccattgctggaaggagacttgagatcacagcacgaactgctggggcttcaaagacaattgaggtggaggttgacaagccacttggcctctccttaggccaaaagtctggtggtggtgttgtcatcactgtgagtatctagcacccgtctattcaattgaatgatttcctatttgtgaatgaggattgtttatgcaatgcgtgttgtcttctataggctgttgatggtggtgggaatgcagcaggagcagggttaaagggacgggaccaagtccgttacacgagcagtttctttggg

SEQ ID NO: 25504 - DNA, 412 bp, Glycine max
  Clone ID: PAT_MRT3847_123031C.1
gagtccggccatcgcagagacaaagccggtgtgagaagaatccttcggcgtgaaaagaaccttatcgagaagacatcgaaggctcgacaagaagatctcgaaggaatgagggatcgagatgattaagaagcgcacgaataagagcgtggagacctacttgatctacatcttcaaggtcctcgaggaggatcaccccgacattggtatttccatggacgccatgggcatcatgaacagcttcctcaacgacatcttccataagctcgtccataaagcgtctcgtttggctcgctactacaagatatccaccatcgcctcgatggatatcctgaccgccgtgcctctcctgctccctggtgatgtgtctcaacacgctctttctgaagggaccaaggcggataccgatattacc

SEQ ID NO: 25505 - DNA, 289 bp, Glycine max
  Clone ID: PAT_MRT3847_123032C.1
cccacgcgtccgctctagaatgctgccgatcgaaccctaattgtagttcacataacacaacattggcgtgtgtgacacgacttatactagctatataacagcatcggacagttgtggccctaacagtgatagtaataggaacgttgatcatcatgatgatatccactatgctaatattgccacctagcccataacatacttgttctagtatgtatctattaaagctcagttcatgcatttagatcaacatgtcaccgacttatatacccaagttgatcaagaaaatccc

SEQ ID NO: 25506 - DNA, 730 bp, Glycine max
  unsure (1)..(730): unsure at all n locations
  Clone ID: PAT_MRT3847_123033C.1
cacgcgtccgctcattcacgatgtccgccgccaggtgtttgcttcgctccgccgcctcccgagcagccggtgcggccaatctggctgccggagctagaccgagaccggcacgatctccgtttcggctcccaaagcaaacctcaatctccaatcgcgtttttaggttaccggtcgaagcgagtttctgcgtggaatcgatgcttccttatcacagtgctactgcttccgcattgctgaattcgatgctctctgggtctcgccactcctatggttggacccctgaaggtatttcctcccttttctcttcccttccattttatgaaatgagacatgattgatacaagagctaagtttatgaaatgcatacattggattctgaaatgaattgttattctaacttattcgacctacctgattgtctgcaaacatgctaaatattttactagtaattgtgaattcttttctttatcgatggatggggtttggtcttgaatctaatgggggaaggatttttttttatgtcatttttgattcctggaatgggttatacattctgagaaattgaattttgcttacctatgaaggtctggcataagacttttatttggtaatcaagggcgatagtggcaataatggcttcacttccttgggcgggttttttttttctgggggacacaaaaggggggtaaactttttttttactaaaaaaaaaggntttcttggctttttt

SEQ ID NO: 25507 - DNA, 439 bp, Glycine max
  Clone ID: PAT_MRT3847_123034C.1
ggaaaagttacggtctaagaaagggctgcgttaataactatttaagagtctcttaactagagaaaggcaaactcatatatgagtaaattcatttcatttgacagaacaatcaaactcaccctgatcctatcataccttattacaatcctcactgaagacacatggacacatatatcgcctttcacggtttccagacaatcaatcatagccattagcaaccatcccatcataaaagataaaacattattttctgaagatgaaaaagacatatgtacgtattaataattatatgtaataattaattattgtgtatcacaagtttataaactgatatttcattatcttaaaagaaatatcaatcatcatatacgtgactttgtgcggataagtatgagaaactgatcgaaacgtgtcacatgatgatagatggattaacaca

SEQ ID NO: 25508 - DNA, 790 bp, Glycine max
  Clone ID: PAT_MRT3847_123035C.1
ttttgtgttttttttatttattaatttttttttttacctttttttttatttaattatatttttgttgggctttctttacctgtttgatcaaccaaattctgttgaccctgcccagacggagggggaaaatctattcttccaaaaaagggccccaaaaaagtccggggggggggggggccccacccaccttttgggggggggcccctccgctgagtaaaagaacagctttaccaccccaggggaagacagaaatatgttgaacaccggggaaactgttatttgaggggcgcccaacataaatatgcgactacaaaaaaaaaaaaaatctgccaaccctcaagactgtataacgcgtttatagagggcggggtgaaaactcccccacaaaggggggtggtttctcttgctggggcagaaattttcttgtccaccccgaggggaaaaaaaaaaaaaccccccccggcgggggggggcaaaaagagattttgaaaaaaaaaaggtgttgggccccccacaaaaaatcttttttggtgaaagggggcccccccccccctttctttataaaaaaaaaaaaaaaaaaccccggcgaacaaaaatggaaacttttccccccggggagaacaaaaaaaaatattttttttggggggccccaaaaaaaaaaaaaggggggccccttttaaaaaacgcggagaagaggaaaaaaaccccgggacccccacaaaaaataaggggggagaaaaacaaccctctttctaccacggggggaaaaaaaaaaaaaagaacccccccc

SEQ ID NO: 25509 - DNA, 296 bp, Glycine max
  Clone ID: PAT_MRT3847_123036C.1
gcttcaatttgataagagcagtttgccatgtgaggacctcaacccgatgcgaagttctgcattagcctcacggagggtgaacaatgtttgagaagtgggagcgaggctgagagctcgaacgagatcgctccttttggagagagagtctgactcaatgttctatcatggttcacttcacccattgagcccataatgatgaccagggacatacagacctcttgtaggagtatgactaactgaaagacgagtgaatcaggccgtacctgtaaggacgacagttgtaaacaatgtcacta

SEQ ID NO: 25510 - DNA, 174 bp, Glycine max
  Clone ID: PAT_MRT3847_123037C.1
gaggaaaaaatattatatttaacattggtctctaacattgggatacaaagtaaagctgggatttgcattaaattgactaacccttaatttcttttttaacatacataaacaacgcttactaattttttcgaatcctgaaaaaagtaattctgatggggaggccttctaccttgg

SEQ ID NO: 25511 - DNA, 163 bp, Glycine max
  unsure (1)..(163): unsure at all n locations
  Clone ID: PAT_MRT3847_123038C.1
cgctgcacgcgtactaactcgattcgctcggatccttccatccaaatcaaatttttttttttttggtgggtagcagtgaggataaaaaaagggctaatgcgcccacaagcttggttccgtggttggttccttcagaaaccatcaccgggagannccccccccc

SEQ ID NO: 25512 - DNA, 355 bp, Glycine max
  Clone ID: PAT_MRT3847_123039C.1
ggcggatatgaagcctgtcgcggacaatactatttcgatggatggaagaagctacatgataagtatgagaacagagaagagcgttccgacctacaagatctacattttcaatgtgtagaaccaggtgctcccttacatgagcatcttcggccaggctatggtgatcatgatcagcttcgtaagcaacatcttcaagaagctcgcccaggagtcatcgcgtcttgctaggtaccacatgaagctctccattacttccatggagatccatgctgcggcgcgtttggtgctccctgggtagttggccatgcatgccgcttctggcggtgccttagtcgttgctatattctccatctct

SEQ ID NO: 25513 - DNA, 511 bp, Glycine max
  Clone ID: PAT_MRT3847_12303C.1
gcggccgccctcattgtttgtttctgtttttttttctgttggccacaaaaactgcggcaatagacttccacctaatggcagagcttatgctacaatcaataacctctctgggaaggagaaataaacatgtgctcttgttcggggtgccataactctggagcaatggcaagactcttaggatggcgctggcaatctatctacacctgcctaagtcctatactggtgtgagaacacatcttttggttgcttacagaaatcgaagaacatcaaggcccctattatctacagatttgggttccactgctatggaatcaacctatgatacaactggcaaaggaatgcgtcagcctgacagtcctgaatctaaatatggcgcagtccaggacagcgctgtggatccccaatggggggagcatacatgcctctgtagctaagaagtgttagaaggcccctattaaggctctaccttcaaactttaacgctcattggctataccccccggtgtgggcgg

SEQ ID NO: 25514 - DNA, 424 bp, Glycine max
  Clone ID: PAT_MRT3847_123040C.1
tacggctgcgagaagacgacagaagggggaagacaaatttacgacagttaatggctatgaacacaatgccgaggtaatatatggagacacagattcagtcatggtacaatttggtgtttctgctgtagaagaagctatgaacttggggagagaagctgctgaatatattagtggaactttcacaaaagtaatagttcattttgcgttttatttttttctttagtcattgtaagtttgagacccttgtataatagcccgtgaaagtgatgaaaccctgaacttgaaaccatttttcgttttttttcttgaaaaggccaattgatttttatggatcacttgtactcataatatggcaaaatgttgctttttttattttctccaaacaatgaagtaatggttgattcttaaaaccaaaaaaaaaata

SEQ ID NO: 25515 - DNA, 248 bp, Glycine max
  Clone ID: PAT_MRT3847_123041C.1
tattcaccatgtcatgtataaatgaggtagtctggtttctaattgatatttctagactttgctgatctgaataataggactggactttgtgtattgtcaacataaatgatctatgttacttgtggggtttcttacaattgtttaatgatgcattacttctagagttaaacattttgacaacacctttttgattccatgattgatttctctatagtaaattagtaatattggtgctctctatgtagcat

SEQ ID NO: 25516 - DNA, 702 bp, Glycine max
  Clone ID: PAT_MRT3847_123042C.1
ggtactctctagtctccttcatcttcctccgccttagttacaagcacaaacaaatagctccttccaacttttcttctttctcttcaatagttcacaacagactaagttgcagctgggtaagaatcatggaagtagagaaggaaaataccacatctactattactgcagaaccctcagtatctgcctctgatggtcaagatcctgtttcttctgttaatgcatctctacccgatcctatgcaacctgttattccacaggttattgcaccttttgttgtaccttctttagctccaattcctgcaattcctccgcctcgcccactggcaccgcttccagttcggtcacctgtcattaggccacctgtgccacaaaatggcgaggttggatcaagtgactctgattcagacaatgatgattcaaatgcaagaattaaccaagggggtggggagtatgagatatcggaagagagtaaactggtgagagagcggcaggaaaaggcaatgcaagagctcatgatgaagaggcgtgctgctgctcttgctggtcctaccaatgatatgggcgtgcgagctcgccttcgacatcttggtgaagctataactctgtttggtgagagggagatggaaagaccggacagattgcggatgattatggcgaagctggatgcataaggtcagctggagaagctgatgaaagctcatg

SEQ ID NO: 25517 - DNA, 791 bp, Glycine max
  unsure (1)..(791): unsure at all n locations
  Clone ID: PAT_MRT3847_123043C.1
ggctcgctctactttttcctccgccttagttacaagcacaaacaaatagctccttccaacttttcttctttctcttcaatagttcacaacagactaagttgcagtgtaaaattttcaagtattgtttttttatccttttcagctgggtaagaatcatggaagtagagaaggaaaataccacatctactattactgcagaaccctcagtatctgcctctgatggtcaagatcctgtttcttctgttaatgcatctctacccgatcctatgcaacctgttattccacaggttattgcaccttttgttgtaccttctttagctccaattcctgcaattcctccgcctcgcccactggcaccgcttccagttcggtcacctgtcattaggccacctgtgccacaaaatggcgaggttggatcaagtgactctgattcagacaatgatgattcaaatgcaagaattaaccaagggggtggggagtatgagatatcggaagagagtagactggtgagagagcggcaggaaaaggcaatgcaggagctcatgatgaagaggcgtgctgctgctcttgctgttcctacgaatgatatggccgtgcgagctcgccttcgacatcttggtgaagctataactctgtttggtgagagggagatggagagacgggacagattgcggatgattatggcgaagctggatgcagaaggtcagctggagaagctgatgaaagctcatgaggaagaagaggctgtggcttctgcttcgaagatgangctgaggaagaactgcagtatc

SEQ ID NO: 25518 - DNA, 1872 bp, Glycine max
  unsure (1)..(1872): unsure at all n locations
  Clone ID: PAT_MRT3847_123044C.1
tacggctgcgagaagacgaccgaattcaggtcgcggcactcgcggcattaggagacaatcatgtgaaggacgaggcaagaaggaagtgttgtgggaggaaagaggcagagctgcaatcaccagagtggaagcgcgaaacggtcctccccggctttccattttttctcttctgatgaaattttagttcatcccagttgctgattgagattgaatttaaattcgaaaaagcgtacttgtgccactgtacttttacagatctgcggctacgggctagcctatcgtatttttgcgtagatctagtgtccgtgaagcggttaccatttcaccactcaccactattcatctctttcttctatattgatctgaaattgaagatggaaagcgaaaagaaatcgtcagcaatatctgatgtgggagcatgggccatgaacgttgtcagctccgtcggaattattatggccaacaaacagcttatgtccaacaatggctatgctttcagctttgccagttcgttaactgggttccactttgccgtaactgctctcgttggtctggtgtcaaatgctaccggttactcagcgtcaaagcatgttcctatgtgggagcttatttggttctcactggttgccaatatgtctatcacggggatgaactttagcctcatgctcaactccgttggattctaccaaatatcaaaactgagcatgattcctgtggtttgtgtgatggaatggatacttcacaacaaacactactcaagggaagtgaaaatgtcagtggtggttgtggttattggtgtcggtgtttgcactgtaactgatgtaaaagttaacctcaaaggtttcatgtgtgcctgtatagcagttttgtcaacatctttacagcaaatttcaataggttctcttcaaaagaaatattcaattggatcttttgaattgctgagtaaaactgctcccatccaagcgctttttcttcttattcttggtccatttgttgattactacctcagtggcaaattgataaccaactataagatgtcttctggtgccattttattcattcttctttcatgctcgctagctgtattttgcaatgtgagccaatacctttgcattgggcgcttttcagctgtttccttccaggttttaggccacatgaaaacagtatgtgttctgactctgggatggctgctatttgattcggagctaactttcaaaaatatcatgggaatggtcatcgcagttgttggcatggtaatttacagttgggctgtagagcttgaaaagcagtcaaatgcaaagaccttacctcacgcgaaaaacagcatgacggaagaagaaattagattattgagggatggagtagaaaagagtcccctgaaggatgttgaacttggtgaggcccaaggatagattgactcagatttggtggtgaaattgatgagaaatgatgcaggcaattatattgtgtattgctttataatttggtttgttcttttgtctagtttacctagtagtaaaacttggtttctatttgctcacactggcacggatccagttttagaaattgtgttcccgttcatcagcaatgtttctttgttagttttatttcatttgttgttatgttgaggttatttatttggcctgccaggaaattgctagatgaacaatatgatggcgccattaagatgtataatgtgcacgctaatgatacgcgatatcaattccctcttcaaacttcttttcgtgtcttcttcttttaatgtgaaaaaatattttattgtgctcttcttatgatatacatttatcattatttatcatttgacacttgtttgacacgattttaaattttagtttctatacannnnncctg

SEQ ID NO: 25519 - DNA, 645 bp, Glycine max
  Clone ID: PAT_MRT3847_123045C.1
agaagaactcacctgattcattggagacacactttctctcttttgaattatatatgagaaaacagaggattttgcttgcattccaggctgtgaagcaattactgaggttggatgctgaacaccctgattctcatcgttgcttgattaaattcttcaataaagtaggatctatgattgctcctgtgactgacagtgagaaactcatttggagtgtcttagaagctgagcgccaaactattagtcagctgcatggtaaatctctgtttgagacaaataactctttccttgaaaaacatgaagattctttgacgcatagagctgcttttggagaaacgttatatattttggatcccaacagaaggtctgaagccgtcaagttgatcgaagggtcaccaaataatattgtgccaacgtaatgttcttacaccacctcaagtttcatgctattaagcattaacacaacattgtgtcatgtcttcaaactgaaatggagtgcttggaccaatcagggaatggaaacttatagattgtgttgcagttcataaacttcttggaacagttcttgttgatcaggatgctgcattaagatggaaagtgcgttgtgctgagcttttccatactccacgtactttgagggcagtcgca

SEQ ID NO: 25520 - DNA, 835 bp, Glycine max
  Clone ID: PAT_MRT3847_123046C.1
cccattttcaattccttcatcatcaatgtcggtgatatgatccaggtttggagcaatgatgcttatgagagtgtagaacacagggttatggtgaactctgagaaggataggttttcaattccattctttctgaaaccagcactctacactgatgtgaagcccttggaagagttgctagatgatagaaaccctcccatatatagaccagtcaactggggtaagttccgctctgcaagaatgcgaagtaattttgccaaatccaaagttgaaaacctccaaatttatgatttcaagtttcctagtaactgagtcagagtccataaattggagaccgtgcaaaatgaaaacttgaaaagtttttaaatagtaaatacaagcccaaatatgcgagaacggcagctagaatacgacagtatgggtacatatatacatatatttctaagaaacatgccagagggattggaaacaggtttgtgattttaatgacaagaaaagccataacttcacagaacttcctgaaaattttgccagataaagtaactatgtcaaagcaaatttggtgttactcggttcctgtgaaataatcagtgtacagtccatagaaaccttcagacttcgggtatcttaatttaactaacttttagccttgtactaattcttctttctgaagacatcgattaatttacaaaggtcactgactaattcactgtacggaagtactactataaataataagatttagtgtgtgtttagatcaccgtggggtaattcgaaatgggaggttgaagttggaacacccatacttttatggtgacgctgtcttggatttcatgct

SEQ ID NO: 25521 - DNA, 405 bp, Glycine max
  Clone ID: PAT_MRT3847_123047C.1
ttgactcacgcctatcactttctggctcatactcgggctttgctccaatgatcatccattctccaacacaaatgtgaaaacgcactgcgcaggctttggcacccgctaccgcctcattccttttactgattctacaagccctgttgattactcagactcagggatgcctcgactgtgctgacaagcgcgagttctatggcgttcccaatgcaatcaacgtgatctcaaatttcctattcatgcttattgcgctcattggcctggtgctatgacaccgcatgaaccatgttagaatgaggttgcaaggcgaactgtggacttggacatgctcctatgatgctgtgacatacagctgagtgtgaaacgcgttactatcatgaatgcccatgcgatgcatgacttgtg

SEQ ID NO: 25522 - DNA, 340 bp, Glycine max
  Clone ID: PAT_MRT3847_123048C.1
ggacgggatctaaaaagggatcattttggaaaaaaagaataagctttaccggagttgggtcctttaatcacacaataaggggctacttttttatttcatatggggactttacgtaaaaggatttgggccccatactgggggtgaatagaaataaacccagttggggcatgagcatttgctggaaaaagttcaaatgaaaaatgctgcaaaatctttggcaaagcctttttttttttcaataaagaaaagttttgtccaaagcttttttttgggcccccttccaaaggggaaaaaagaaacccccccctttgttggttttaaaacccctttggaaaatttt

SEQ ID NO: 25523 - DNA, 199 bp, Glycine max
  Clone ID: PAT_MRT3847_123049C.1
ggaagagacgagtaaagaaataaaacaactaattggaaaaaaaaaaaaaaaaaccaaagcataagttaaatacggagtgagatcctcaatacagaagccaaattcgcaaactgactcgtgtagattccaaaaaattgcatatacacgtgtttaaatgcaactaagaaatttaggctttgggatgattgtcataatgaat

SEQ ID NO: 25524 - DNA, 215 bp, Glycine max
  Clone ID: PAT_MRT3847_12304C.1
tgctagtggatcaccatctagccaatgacaacaggaccaagccttatgtggagctaatcggcgaaagcctcgactaggtcttcactgagtactctagagccattaccttgctctcagcacgatcaactcctcttcactgggcacaaatggttaggtcagaaagcagtgcaatggtgccgactatcaccattatcaggacccttgacttttcctcc

SEQ ID NO: 25525 - DNA, 569 bp, Glycine max
  Clone ID: PAT_MRT3847_123050C.1
ccaagaattcggcgcgaggagaatttgtaagaaaaaaaataaaaaaaaagcagaagtctttattatatcatccatttggctggagtccaatatcttttttcttaaaaaagaaaaggaaaaagaaaattaatgaagtgaaaactacgagagtgtgaaaagggagggagagagaagagaagaatctaaaaaggaagcaacatttctatttcctcttcttcatcacttgaatccaccaagtccttctcctcacacacataaaaacaaatatcctccacttcttctacccccatcagtagaacaagatgtgccggagcaagtttcgtcacgccggaacgatgaccggcggcggatccacggggaggttgccgacgtggaaggagagaaaaaacaacaataggagatagataatacgaatatctattgcatctaatatctacactagccttcgagcccattggaacctcaagcttccaaagcactgctacaacaacgatgtgctgaaatctctctacacccaatctggctggatcgttgaacaatatagcacatcttatctaaagggatgtaac

SEQ ID NO: 25526 - DNA, 252 bp, Glycine max
  Clone ID: PAT_MRT3847_123051C.1
attttgaagttgttatgattatacaacttatgtcacggatcttatctgcaaattaagatgcatgactatttctgataggatccgtgacataagttgtataattttgaagttgttatgattatccttccactttgtgctactcggtacactttttgtaattgatggatgtgttgtagaggtaggtgtcaagttaacattgtagttattttgagatttagtataacatttaatctttcagttttggagcaagca

SEQ ID NO: 25527 - DNA, 465 bp, Glycine max
  Clone ID: PAT_MRT3847_123052C.1
ccaggggtaaaaaaggaccactcaatagcatatatttataagcaaacggccatattatctttagtatatacactactcaagcggtttatgaattaaacctgctaagttatagattgtataataaatgtttacgaagtatatataaactatctgtatttataattatgattaatattgataaggaatacacatgtagtagctatatagggactgggaaagttactttattcaaaatagacacggcctactgccttttaggcaagatcagagaagctcataagtagtaaaatagtaaactcgacattttttttaattataccattaattcaatcacttctattctcttctcttcccttacctaaagcctttataagcaactcgattttattcgtcaaaaaaggcggcctcattgggcttaatgttcatcatattaaccatcttctcaaagaaggcaggagtttttaa

SEQ ID NO: 25528 - DNA, 365 bp, Glycine max
  Clone ID: PAT_MRT3847_123053C.1
gggatgcgttggctccgacacctacgtggtgttgaagatggagccgtagctgagattgggatgactaatagggagtcggcagtgacgaagtggctgcagtactatacggggatagagccaaaaatgtagatggtctacactgcacagacttttatgagaatgtatccggcaggggtggaatctcttatgaggacaaagggcatggtgttcgcaaggtcgcagagatagtagtatggacaccgcctgtaaacctgtcttgcgcataatccattaggaaaacaaattttgcttcagcaaggtttacccccaggagctggacctagtaatatattgcatggacctgcattcatatttccgctgaatca

SEQ ID NO: 25529 - DNA, 435 bp, Glycine max
  Clone ID: PAT_MRT3847_123054C.1
agaaaatgaacctattaattaatcatatggttgaactaggcttgagaaacgattatacatgacctaacatttcatacactatagtaacgttgatcagacatggctgtctaatagtgatacgatctagtcacgtactgaactgattataagttcgacacacaatgttgtatcgatcagatatacactgttatgcacttttacacacataggctgcatccctaatgacatgcatatgtatctgtctgctcaattgggctaagcaccccgttgttgacgagactgatatatataaataacgcagacgcgaagagaagaaaagtttaccctttcaagccagtaactctatgtcttgagtcaagggaggctaatcatttagagcagtccgaatgtcacagaagctgcgtaaacgagtgcaatgacactgatggaagatga

SEQ ID NO: 25530 - DNA, 1141 bp, Glycine max
  unsure (1)..(1141): unsure at all n locations
  Clone ID: PAT_MRT3847_123055C.1
acctcanatatgcgttatatgaaactttcaatgtatccaaccacaaaggtggttttatccgacacagggtacattcgtaatttatgccaccccctccaatccattgtgtcttatccaaaatgcttacgcaagcaaccagacaaaaaccaaccattaacctttataaaagcacagtcacagcaacccaaaacacagtccgctgcgagaagacgacagaagggggagagcaattgagaacgttcaaactccacaactaacaaagattatccaaagtgcgattcgcatggccaccaacattcgtagagcaacctatcgctttctccctgccatggacacagattctttctccgattccaccttcgaattccacgaatccgatctctacaactccgcgcgcgctaactctcccgaacttgccaaatccgtacgctcctccagatttcacaactactcctcttcctctgccgcccgcgtcggtgctccggcgtcgcttccggtgaacgtgccggactggtcgaagattctcggcgatgagtacggacggaaccagaggaggaactacgacgacgacgacgaagcgcggagcgatgaggaagatggagttgggagagtgcctccgcacgagtttctggcgaggacgagaatcgcttcgttctcggtgcacgaaggagttgggaggactctcaaaggacgcgatctcagtagggttcgaaacgcgatttgggctaaaacgggattccaggactagacccttaccataggatgataggatcataacataagttaattaccgtattaatttactactgtattaccaattgaaacgacttttgttgagaggtcatttttagatttttcattttttcgatcagcatctatgtgtatcagatcggaatttgagattttaatttgcaccgagagctttttgttttacatattgtcattgttgtcgtttattattatctttcagatttcgctttattttgttagctttttttagatttttcattttttcgatcagcatctatgtgtatcagatcggaatttgagattttaatttgcaccgagagctttttgtttttttatttttaaagaaaatgttttttttaaaaattatgaaggcggtccctctataggtcca

SEQ ID NO: 25531 - DNA, 407 bp, Glycine max
  Clone ID: PAT_MRT3847_123056C.1
aggggtatgaatccatctccagatgcgtgtatatttttttagtcaaagtagtaaaaataccactacaccgaaaacaaaaagtcaacttacacatcaaaataacaaaaaaaaaacaaaaaacaaaaaattctcatcctatttacaaatccaatgaaggaagtaaaaaatagtagtaaccaaaaagaatcacaagggaacgcgtatttgccagactttaatgtcacaatccaaacctgcactgtaaaccagataagacctactatcatcatcctcatgaggaccaccaccaccaccactgttggagttaacagccatagccaaacactttacgggtcgtcgatgactttccagcaccgccaaacacgaatagtaactcttcttctcattctcaacgcttctcctccata

SEQ ID NO: 25532 - DNA, 434 bp, Glycine max
  unsure (1)..(434): unsure at all n locations
  Clone ID: PAT_MRT3847_123057C.1
cactgcttgcacgtacgggaataaaatagcttactaatgaatattaatataattttgttaataacttacatgaatacatgattgggaatatatttcttgatactattttgtaacacttgaaataattgcatgttaagatgaatataattcttttagcatagaataacattagtaggctataatataagttaaattttagtaaaataaagcaaaaaactaaaaattcttcaaacatgtcggtaaattaggctacatattgtttgttatgatgagcattttaaaccaatggtcattactcaataacaatgtatcanggaattaactaataaatttttcaactttctcccaagaaaaaatattcatctctcacatgtaatattttatgtatagggtctattttaataaatttactttgatattttatatcaatattt

SEQ ID NO: 25533 - DNA, 320 bp, Glycine max
  Clone ID: PAT_MRT3847_123058C.1
accggaccagaatcaagggcggcgtggacaacgctcactcggccgcccccgcccttttttttttttttttgtacaaatgaatataaaattggggcggggggatattaaaaggagaattctaaacacatacacagaccattcagggtatggcaagaaataattcgtagaaagggtagaccatactccttgtacatcattttatttactgcccaactaaattgcccaaattagggtttacaacatgtttataacctaaaaatagctcgtactactggtcactttacagataacaaatgctaaaatgtcgttccccttaatac

SEQ ID NO: 25534 - DNA, 225 bp, Glycine max
  Clone ID: PAT_MRT3847_123059C.1
catgacatggttgaggaatggtttgattgtgttgatgaggagaattactctgtggctgcattttcgcaaaatgcctttcatatagatgaagggttaatttgtgatgtacttcttacatagttcttactttgtttataacctttataatacccattagaaagtatttttgcacggaaacattataatttgatattaaatttcgaaatacattgttaaaatgattcc

SEQ ID NO: 25535 - DNA, 514 bp, Glycine max
  Clone ID: PAT_MRT3847_12305C.1
cccgatatgccatggaatctagcaagattttgtgctgcagggctgatcaatcttagtgatatgggatacaaaacattgtctaaatactatcaagatctaatacctgatggatcctgttctcctgtatcttcaaactcaagctggaaagttagtcgatttgcatcaaattctacagaaacagatccagctgggatggttgttgtcaaggattttgtttctagagctgttgtagcacaatttagggctcatactagtccaatatctgcattatgttttgacccaagtgggacactcttagttacagcctcaattcatggcaacaattattaatatatttcgaattatgccatcctgctaaggaatggatcgggttcacaaagcagtgattggagctattcacatgtgcacctttacaagctccacccggggatgacatctgctgaatacatgatttttgtttagccattcagtcagggggttgcatcatttccttaagggaactgtcattttttgt

SEQ ID NO: 25536 - DNA, 480 bp, Glycine max
  Clone ID: PAT_MRT3847_123060C.1
cttttttttttttttttttttttttttttttttttttttttttttttttttttttttttttttttttttttttttttttttttttttaaaccaaaaaaggccaaaaccggggggggtaaaaaaacaaaaacaggaactggaaaggattcaaacggggggaccacccaaaccggaaggaggaaaacaccccacacatttattcaaacaaaaaaacattattgggaaattgggagggccaaacacagggaaaaaacattttaaaacaaatccctaaagggccaaaggggcagcccgggcaagggcaataagggccacactggcacttcccaaaaggccaaggggggggaaaaaccaagaaaaaaggctggaggaaacttttctaaggctcaaaaaaaacaccaaaggggttcccctgggggcagctagtcttggaagcgcaacccaaggggccgaaggggtccaaaagggggggttttgggg

SEQ ID NO: 25537 - DNA, 2398 bp, Glycine max
  Clone ID: PAT_MRT3847_123061C.1
gaacctcaatctctccgagcagcggtccatttctctcccggaacacccataagatttccggcacggcgatggccgctgttcgcctccttctcctcctcctcttccctttctcctctctctccctttctgaaaacgaagcccttctcaacctcaagaaatcattctctaaccccgtagctctctcttcctgggttcccaaccagaacccttgctcctccaggtggctcggcgtcatctgcttcaacaacatcatcaacagcctccacctcgtcgacctctccctctccggcgccatcgatgtcaacgccctcacccaaatccccactctccgctccatcagcttcgtcaacaactccttctccggcccaatccctcccttcaaccaactcggggccctcaagtccctgtacttagcccacaaccagttctccggccaaatcccctccgatttcttctcgcaattagcttccttgaaaaaaatatggatctcaaacaacaagttctccggccccatcccgtcttccttgaccaaccttcgcttcctcaccgagctccacctcgagaacaacgagttctccggcccggtgccggagctcaagcaagacataaaatccttggacatgtcgaacaacaagctccagggagaaatccccgccgccatgtcgaggttcgaagcgaagtccttcgccaacaacgaaggactatgcgggaagccgctgaataatgagtgcgaggccggtggtagttcagaagtagggtcgggttgggggatgaaggtggttattgtcctcattgtcgctgttgctttggctttcatttttgcgttgacgcggtcgaagcgtcgacacgacgatgatttcagcgtgatgagcagggatcacgtggacgaggtggtgcaagtgcacgtgccgagctcgaaccatagcaggggggcctccgagggggggagcaagaaggagtcttcttcgtcgaagaaagggtcttcgcggggcggcatgggtgaccttgtgatggtgaacgacgagaagggcgtgtttggcttgcccgatttgatgaaggctgcggcggaggttctcgggaacggtgggttgggttcggcctacaaagctgccatgaacaatggcctctctgtggtggtcaagcggatgcgcgagatgaataaagtcagcagagacatctttgacgccgagatgagacgctttgggagactcagaaaccttaacatcattacgcctctcgcttatcattaccgcaaggaggaaaagctgtttgtcaccgaatacatgcccaaaggaagcttgctatacgtcttgcatggtgacagaggatcgagtcatgctgacctgaactggccaatccgtttgaatatcgtgaagggaattgcgcgagggttggactttatttattcagaattttccaacgaagacctgccacatggaaacctgaaatccagcaatgttctactaactgaaaattacgagcctctcctaagcgatttcgcctttcatccactcatcaaccccaactacgccatacagacaatgtttgcctacaaaacacccgattacgtatcataccagcatgtttcacagaagaccgacgtgtattgcctcggaatcatcgttcttgaaatcatcactgggaaattcccctctcagtatcacagtaatggcaagggtggcactgacgtagtgcactgggtgttcactgcgatttctgagagaagagaagcggaattgattgatccagagttaatgagcaatcactcgaactccctcaatcaaatgttgcaacttctccaagtaggggctgcttgcacggagagcaaccccgatcaacgacttaacatgaaggaagccattagaaggatagaggaggttcaggtttaaatatgttgtgtcaatatgctagcttagtacaaagttgcttttgtaggtgagaattgcagtgcaggcctaggaaagattgcttttagcatcttgatccaacaatcactttgtgcatgagaaccacacagtccacggggctaaagagaatgattcggagggagaaagaaaggcagagggtggcatgctgtttcaagaacttgatgtcatatatctaagtccaaaaactatgaaatagagcataaattgagagatgctgaagcttggagttttggacaatttttggtccttctgaagaagagagaaaaatgtcaaagtccaagctaattttgttggtgggcgtgcctctttctgctgatagcaacccttgtgaattgtgtgcaattcgtataagatgaaaccatttttgagacagcatcgcccaattttactgctgacaagtttgtaccctgggattttcccacttttccttttattcctatcaaatccaagggatttcttttgatttctcc

SEQ ID NO: 25538 - DNA, 457 bp, Glycine max
  Clone ID: PAT_MRT3847_123062C.1
gtctgtcctttttttttttttttttttttttttgtctttatctgatggtttgcttatttgattttttggtttttacacatttttaagtgttctgtggccagttcattggacaattgtagatatatccctgctagatccgagaaaaacaaggggcggtcaacaaggtgcccagctgcattggcccacaaaaacgatagctccccccaaggaccggacccggtactatggtgggccggggcccaaaatttgcaccccgaggatttttgggggccccggggacccaggaaaattaaaacagggggccgaaataccagagggggggggccttccgcaaaaacaacctcaacgaacggcatgggcgcgggaacaaaaatgtccgtggccttattgaccgctttcaaaatgggcatccacagagaactgtttttattgggggcaggactccccccaggggcaa

SEQ ID NO: 25539 - DNA, 491 bp, Glycine max
  Clone ID: PAT_MRT3847_123063C.1
ccacgcgtccggtgagatgaggggcttataaggagactatggagaagagagaggagatctgtgcagatccttatgcttctgatcatggtgacgatacgttacaggtatcgcgagtggcgggacgagaggccaactgtagtgataccagattgaaatcaccgtcctaatgatacagtgtgccttcatcctagaaggaccgcagctaaggtaccggcgatcgcttccgatgcaaatgattgtaccaagactaactctttcgttgagtaatgccggagaagacggctgctccgagtgccacagcaccatacggtaatactggcttgcctgaggaggagatagcgatatctgacatggcaaagaacgcgggacagtgaatactgtactccgccagctgcatgaacagagcatactactccccttgttacacatagctgctgaatggacttactgagatgcatggataccacgcacagattgttgacgctgaagct

SEQ ID NO: 25540 - DNA, 620 bp, Glycine max
  Clone ID: PAT_MRT3847_123064C.1
agcctccacatctttcgcaccatttcacccctccactctctgctcctcaaattcatatatgaacatacaatccataaacacaatttgcataggggagtaaattgcaaaatcatgcattttgtttcctattgttcgcaccatatgaaattcatttacaatgggaagctaacatactggattaggaattgaagtactgatttcccccttgatggggccaatggaatagaggagctagaaactcatgcaaatgtcttgcatttaaaatgagcagccagctggatcatataagaaacttggcggcaaaacctttgggaatgttgaaggatagcaagaaaagagaatagaatttgcatgaccatgcccgctactaacaggtcaaaaagagccaggaacatcatgaatcctatacataccatctgccggtgttgcaaagtaagattggggttcttacaagttgcaccatacaccttcataaaccttcatgactttttccagatatttaatatgccagtggcaaatgacttcatattttcccacaaagttgatttctgtgcacccactgcaacactggtctcccttttattagagctgtccattttggactcatccaaccctcgtgc

SEQ ID NO: 25541 - DNA, 385 bp, Glycine max
  unsure (1)..(385): unsure at all n locations
  Clone ID: PAT_MRT3847_123065C.1
ggccgcccttcttttttttggccatgtattgcgntgaaaagaacacacacttcgcacatggttacgacgattacaaagagggcgggaatttttaaataggcggagcctacccaacaagagggtcgcgcctaatttcctttattgagttccttcttcgggcgaatggaagaaaacacaagtgcatatctgcaaagattcctttttttataagatctggcaggagcctgtggaacagaaaaggctggcctatgagtattaccaccaatttaaaaatcttgagaaattcccaagagaatggcaaaaaccgtagactgtttgggattgtctataaggaaacctccctgccctgaaggttgacctgcccactgagaactcctccttttaa

SEQ ID NO: 25542 - DNA, 180 bp, Glycine max
  Clone ID: PAT_MRT3847_123066C.1
ggggtttgaggggatgaaatgatagaaaaaggtgtttttcttactctggttacttccacctctggtgtaatgggccattggggggcgtgccaatgttttaaaggcaatttacttcttcgaaaagaggatctttggaaggagttcctccctgtttgcatcactgtataatacctcttataa

SEQ ID NO: 25543 - DNA, 397 bp, Glycine max
  Clone ID: PAT_MRT3847_123067C.1
ggaagagaaaaatgggagacacaaaggagagagctacgaagaaacccgcggctaaatggcctctcatcaaacccaaaaagaatgttcagattagccgcctccgagatttcgatctcttcacggggagtctaggtccaacttatggcgaagcattcagagataatgatcgaatgttggtggatgatcctgtccttgcagatactatttgggagtctggacttagcaaactattttctgatattaaaattcgaggaaaggttgctgtaggcctcaatccaaatattagattctataggtacaaggttggtcagcgctttggacggcatattgatgaaagtgttgatcttggagatggaaaacgcacttattatactctgctagtgtattggagtggtgg

SEQ ID NO: 25544 - DNA, 496 bp, Glycine max
  Clone ID: PAT_MRT3847_123068C.1
tacggctgcgagaagacgacagaaggggaatgacagagaggccaacgaggaagagaaaaatgggagacacaaaggagagagctacgaagaaacccgcggcaaaatggcctctcatcaaacccaaaaagaatcttcagattagccgcctccgagatttcgatctcttcacggtccagaattttttctcctccgctgaatcaaaggcattcgttaaaattgctgaagaaattggttttactcatcaggggagtctaggtccaacttatggcgaagcattcagagataatgatcgaatgttggtggatgatcctgtccttgcagatactatttgggagtctggacttagcaaactattttctgatattaaaattcgaggaaagggtgctgtagacctcaatccaaatattagtttctataggtacaaggatggtcagcgctttggacggcatattgatgaaagtgttgatcttggagatggaaaacgcacttattatac

SEQ ID NO: 25545 - DNA, 504 bp, Glycine max
  Clone ID: PAT_MRT3847_123069C.1
gattctatttcctaaaggaggtggagaatctgaaatagagttacttggctattcaaattcagattggtgtggcgataaaagtaataggaaaagaactgttgtttatgtgttcttgagtggaggagcaccagtctcatggtgttcaaagaaagaagtcgtggtagctttgtccccttgtgaagttgagtatgtagcagcttccatgagtgcttgtcaagttgtgtggcttgacactttgatgcaggagctgcaattgaagcaagttggagttgtgaaactgttagtgaataataagtttgtaatagacttagccaaacacccagcagcaaatgggagaagtaagcacattaagactcggtttcatttccttagagatcaagtcaacaatgacaaattagtattggaatattgtaaaactgagttgcaggtggcagatatatccaccaaggcattaaaaggagaaagatatagagacttgagagagatgctaaatctagtgaacat

SEQ ID NO: 25546 - DNA, 366 bp, Glycine max
  Clone ID: PAT_MRT3847_12306C.1
ggacttaaaacatgctttattttttatgaaatgttatgacacattttgacaaacaaaatttaatggacataaaaaaaaacccacgaaagcagggttctcccttaaaaaactcaaggaaaaatttcccacgatattctattgctataggacttcaattcaatagacacaggaacaacaaggtgccactaacccaataacagaaagtgcccttcttttatgctgaacagcaaaaagggactatagcaccgattatgaatcttggaggggttcatacttgaaaagaatttcttttaataggaaaccagcccatgaattccatcttaaacttagaactgctccactccggaccttaagaaataacaccct

SEQ ID NO: 25547 - DNA, 146 bp, Glycine max
  Clone ID: PAT_MRT3847_123070C.1
aacaaacataacaaaaacgcctgccttgtataggatcacagactaacgaacgcgatccatgggagaatgataaataaccatatagtatacacactaagcatcatataaacgtgtgccattcgctaaacaaacaaacagaaacttgg

SEQ ID NO: 25548 - DNA, 412 bp, Glycine max
  unsure (1)..(412): unsure at all n locations
  Clone ID: PAT_MRT3847_123071C.1
atctcggagtggttacctgcaaagatgcctaatgaaaaaccttgagtgccttaaagtttgttatgatcatactgtccgtgatgcggatggttcaattattcagtttcactatggagaagatggtgttgatgtccatcaaactagctttatcaccgaattcggtgcattgtcaactaataaagaattggtttttagcaactattgccgtcaactagacagatccagtccatatattaacaaattgcctgaggctcttgaaggaaaagcagaaaaattctcgaaacagagaaatcttggttctatggagcatgcagatttcgnaagattgatagagcataagtatgtctcatgtctcactcaaccaggtgaaccngttggtgtattagcttcncnatctgttggaggaccggcc

SEQ ID NO: 25549 - DNA, 575 bp, Glycine max
  Clone ID: PAT_MRT3847_123072C.1
gggtatttttattcatttgaaatttgtctcattaattttctttgggtcatctggactatcacaatcagctaagatttgacaacataattgtttcctttagtgagattagtattttcatctttgttgtcgctcacctagcaagttcttcttcgacatccaagctaaagtatttagttgaagaattctctatccttgaatcctttcctgttcccattcaccccccaacttgaaactgattaagcaagttgattggttccctcttgtgctcaataccatcaagtgtaatgttaatggatcagccaagggtaatcccgaatatgttggtagtggcgacatttttagagatcacgatggggtctgatcggttgcttctcttcttacattgacatccaaagtttttggttctttttgctaaaatttttacaattatattgtgccttggaggctgctcttgctcacaactggagtagcatctggatgaatgcgacttccacttagtgattcaagctttcaataaccttcttaagtccttggtagctctgccatcactgaaaaaatgctatttttttggaaaa

SEQ ID NO: 25550 - DNA, 440 bp, Glycine max
  Clone ID: PAT_MRT3847_123073C.1
ccacgcgtccgagctagggtgggaaatatatctattttagatattttcgagtataattattaatgtaattcagcctaaggacattgatatcatgatatggagagcagttcagtaacttcttttctttttccccggatacatatattttccttttgaagacagttttatgcaagatattatcggacggtaaatatgaacttttttggtgaaaggtgatgatggatcgaagtgaacccctttatttcatgtgttttatttcttctcttgcccctcaattaccatatttcaaattataatttataacataaatgaaaggaattttttcatgagtctctccatagacggctctataaaaaaaacaacaagcagcattgtagaaaatttttagttgtctttcaagttaaattttcgtaaggcccgttagatggaaagactcgatt

SEQ ID NO: 25551 - DNA, 367 bp, Glycine max
  unsure (1)..(367): unsure at all n locations
  Clone ID: PAT_MRT3847_123074C.1
tggacgcgtgggtgattcagggaaaccaagcctataaagataagcagtggcagaaagccattggattttatacagaagctatcaaactctgtggtgataatgcaacatattacagtaacagggctcaagcgtatctagaacttgaaaggtagtgtcttgctcttgctacttgtcaaaattgtcttgcaaacatcttgatttgttctctctgttgatccagttatcttcaagctgtggaagattgtacaaaagcaattagtcttgacaaaaaggtgactntcttcatagaatgtttttgcttagaagtttatggattttgccatcatagactgacaaaagcttgtcttcattttaataatgtatgggt

SEQ ID NO: 25552 - DNA, 265 bp, Glycine max
  Clone ID: PAT_MRT3847_123075C.1
tcttggttcaaatcctattttgtgttgttatactctatttttatgttcacaatcaacaaaaactagcgtaaacaacaaaaaagtaatgtactgggctgtgtgagaaagcaataaacactactaaaataatagtattctacaatgcgcattcaacaatggcggttccaaaaatgatgttgtattagaggcggaggcattttactaactaagacatatatttcaactacgtttgtgttgaagcgacgtcatctgcgcgttacaaaac

SEQ ID NO: 25553 - DNA, 265 bp, Glycine max
  Clone ID: PAT_MRT3847_123076C.1
taaggatgctgagccaactgaatttgaggaatcagacagacaggcattgcctgatctggaaaataccaacaatgacctgaaaagtgatctgaaagatttgtacatgaactcagctgcacaaattgatgtttctgggaaccacgaagctgtaggtatccatatgccctacagattaaggaaaagattggcgaagaatcatgtcatgctttgtgagacaacttgacaagaaggttatggaaaggatgtagtccttattgccacccgg

SEQ ID NO: 25554 - DNA, 217 bp, Glycine max
  unsure (1)..(217): unsure at all n locations
  Clone ID: PAT_MRT3847_123077C.1
gggtagagggatagctcagccacttctttgtcagtgtcaattttattgatgaacttgnttgttagaaaagttgtttctataccggaccgccatgtccctnntggactttcacagcaatacaaattttttttaaagagttttaggtagtttgcaccccttgttcttaccaaattggtattattatctttgcgttaggaacattctttagcacacattt

SEQ ID NO: 25555 - DNA, 496 bp, Glycine max
  Clone ID: PAT_MRT3847_123078C.1
ccacgcgttcgtttttttttttttatatagaaacaatcaacaccatgtataagcgcttgaaaattatttgtaaaattgttaaaataatggcattttctctctaaacaagttttagaggttggtttattttattgcaaatgatacaaatttcacatggaagacgaatatgtagatttataccactcggtcttttgcgctcatagatccaacccttgaatcaattgttgatctaataatggactagcgaatctacaacaaataatgttgacagaagtggctccttttatgaagaacacaaagaatatgtggatggtgcatcttgttttgaaggcaaaatcttatatgccgctcaatcctacaagagatgcggaaatattaggttgaaaccaccaaacacaaccctttctacatattttttttgttgtcgcttagaaggaagttttgagatgatttttctcatagcaaaagataacctatatacaccgccaaagtggtc

SEQ ID NO: 25556 - DNA, 618 bp, Glycine max
  unsure (1)..(618): unsure at all n locations
  Clone ID: PAT_MRT3847_123079C.1
gaagtaaaggaattaagttatttaacaaataccacatatcccctacaagctcgaccatgccccacaaatgggatggatggtcttacaaaatgtaaggtaccgatttacacgttttcatcatcactttcactagcacttgaatcctccacattaatagctgctactttggagacactaatcttaaaagaagcagattgaatcttatagggcaactttgcattgcttgcagccaccccacactcttccacccctttctcttcctctctcttcaaatcactaggtggtaggaagcaatccatggacaaccctttgatgttaaaatccacttcttcaatttgccaaacctcttttattcttgtcgtcgaatggctctcagggcattcacccaaccttgacaatgtgacccaagtcttccccgcgtgtgctatgttaatgccatccacaattctatagtcttgtattagggactccatgttggtttcccaaaatatggcttcacttgcattggatttgagtttgatcaagtgggaatcttctaattggnaccaaaaggcctgttctctggctaaagtagccccacacccgtgtgggcgaataantctctacgtttgctactac

SEQ ID NO: 25557 - DNA, 281 bp, Glycine max
  Clone ID: PAT_MRT3847_12307C.1
aaaaggcctttaatttttttcttttttttgtttggttttttaattttttttatgggcacccgtgggttacccacatacaaacaaggcggggaaaataaggaagcacccgttttcctagaaaaagaaggaacaagaaaatgaatactgaaaggccaaacagcacccccgatacaaatccggaagcgcaaaaccgggaacatacgacacaaaccccgcgacgtaaacgcaaagacatggacgccaaacgggggaagaaccctaccgtaaaaaaacaaagcccc

SEQ ID NO: 25558 - DNA, 375 bp, Glycine max
  Clone ID: PAT_MRT3847_123080C.1
cagtgaaaaggttctaggttttgaactcaaccttcatacctttcgataataatctcttcccaaatgaccccttaacccctttcttctatactgcttcaaactacaacccattctttcaaaaacaaagacccaaacttaaagctcataatttctaaccccacattcttctatgcgcctctctgcccactcctcaagcaatcagtgctttcacggctcaagctgatgagcaagaagttgaaattgcaacgggttacactatgacacaattttttgacacaatgataaatctctttttgaatgaaaaaactacttcaaaagaattgtagaagtacctgatatttatagaggagtggaaaaaatacagcgatagatttt

SEQ ID NO: 25559 - DNA, 386 bp, Glycine max
  unsure (1)..(386): unsure at all n locations
  Clone ID: PAT_MRT3847_123081C.1
ggggcnggggggaggacgagggnnggacaccangccaagcgggggggggggngacggctgtttttgttggtntgggggggttttgcttgggtgtgttttcgggtgtgcttgatcgtgagaacttggngntctgtgttatggggtgggngtgggatggctggttggtggctgattttttattattaacaggctcggggtgggggatttgtgagggggcattggaatttttngggcgcctgattttgagcgcgggggggtgggnggggggggcgggggtggggcttcggcgtgtcggatcctttgggggcgcggggacttggacagccgtgggcggagacatgggccctgggcgcggtttgctggcggcgcaagttggggtgtggcgg

SEQ ID NO: 25560 - DNA, 536 bp, Glycine max
  unsure (1)..(536): unsure at all n locations
  Clone ID: PAT_MRT3847_123082C.1
ctggtgaaaacggtagtgccaccttgaaaagggtgtccctacaagaagaacccttttcaaacaccaaagaagcaacaagttgaggccaagaaagcctcatagggccttgtggtggacaagttcttgatttgcttcgtgaatcctttaaccaagttacatgattcaaggtggtggagaatttgccaacattggagaaccccaaagagaaagaacaccttcttggtgtgtttttttaatgacatggattggtgttgccaagtttctgtcaacattggcagggacaaccccagaattttcagctatgcctgagttgttcattagggtccaatggtttcagtgaagaccaagttctagggagtggnagggttttggaaagagtatacaaaggcttgttttgccaagtgatggaacttgagttgctggtgaaagtgcttgtttagcagagaaaggaaaagcagtttgagaaggagttttgctgcctgagttaacccagctgtggccagatcttcgccacaagaatcttgtgaggctgaggg

SEQ ID NO: 25561 - DNA, 216 bp, Glycine max
  Clone ID: PAT_MRT3847_123083C.1
aaaaaccagactcttctccatatattttccaacatgtcaccttaaatttttaaaaaattcagggaaaacgggccaaacaaaactatgaatcaatggaagccatgttcgttggagactttttttttggcgcatcaaaatgaaaaaaaaccaaagccgcatctgctagaatcccccccaacggcatgtgcactcaaattaggggggggcgtggattta

SEQ ID NO: 25562 - DNA, 399 bp, Glycine max
  Clone ID: PAT_MRT3847_123084C.1
cccatgcgagagacggctgaaagagaaccacatactgcagagcgcgagaacactcagagggggcagcggcattaaaaatgccaatcttcttgcaaactaagacagggaagactaccaacctggaggttctgagcataaacaccatcgacactgtcaaagccaacatctatgacagggaaggcatcacacccaatcagggggatgctctgaaaaacccaagcagctctgatattgtaagcccctcgactgttacaccatgcagcaggaaccacacgttatgtgcctcatctgcgcctctgtgacaggagagatccgaaccctacggcgtgggctcgaaggtacaacctgctcaagcaactgctccgcaagtgctgtttgctcgtgaaaactacgcttgtg

SEQ ID NO: 25563 - DNA, 188 bp, Glycine max
  Clone ID: PAT_MRT3847_123085C.1
ggggtgagaaagcaaaagagtttcttgtatgccactattagaaaaatacttttccattcagatggaaaaaggaaccggtttttcttcatgtttgaaccaagatattgctcttgtcctctgaaaaatttgggatcctttttgcctgaagtgaccggcatagagggttccaggttttttttttgagtttt

SEQ ID NO: 25564 - DNA, 581 bp, Glycine max
  Clone ID: PAT_MRT3847_123086C.1
ctcaaacagaccactcttgtctggagcataggcactcgacctggctgttcacagctccatggtgtggatggatgctctcgaccttgttaacatttgcatgagagagcaaagggagttatctggcggtagacaccattttgtggatagtacgaggcttgcctattatcacatactttatagatggaacctcattctgctgctcacaaatccagagcttctacactcgggaagtcctttggactgatgagctgactgctgagaagacaaaatacctgcagctgccacaacagctaactctgtaccgcctggaacaaaatatggacccgatagaggacgttgcatgaaagctgattatttatgatctgatcatgtgcttaatgaagtacatgcacatacacttgcatgatgaacctttgcctaacgacaacgggatttggatatcgaaaaactaagagttgtatatcatccgtgatccatcttgccttgccatttatatgtctctatgattacctatagagtagcctggcctctgtgcacagttgcagacataaactctcagttcatctcattgcttatttcat

SEQ ID NO: 25565 - DNA, 1550 bp, Glycine max
  Clone ID: PAT_MRT3847_123087C.1
cagcagcacgctctccggcgacctaactccaaccgcctcctcattctctgcctggtcattggcggcggcggcgacggccaacatcctcccctgcatcgccgccagcacctccctcatggcgacgtcagcatcccctctattccgcagcaaaatctctcccacctgcgccggcgtgagggccccaccgccgcggatgcacccctccaccgcctggaacagcacgtgcgactccaagccgaggtagttccgcgcgagctcgcggaacgcatgggccccacacgtggcaaggctaacatggacgtccatgcggccacagcgcacctggagcgcggggtccacactatccctgtggttggttgtaaagaccacaatcctctcttcaccgcaacagctccacaacccatcggtgaaattcaaaagccctgaaagcgtgactcgcccactctcttcacaccccgtttggcccttcttattactactcctcaacgacagcttcgcgccctgacttttcttaaccttcaccgttctatccgccgttatgtcaacggaacagtcaatgtcttcaattactattatagaacggttcgtcgtttgtattagtaacgaccgcaactcggagttatcagagacttttgttaattccaagtcgtaaacgtcgtaacagagaaaattcgccattgccgcgattaagcttgatttacccgagccccgtcggccgttggataaatacccacgcatcaaggcccggtcgactcgattcttatactctataaagcaagcaaaggacctgtgatggttttttattctggtcaacggtatctgcttgtaagctggtggaacttttaaggaagggtgcacggaaagagaaaataaaagggggagatacgaaagagccggaagcggtggtgttgttcgtgaagagcctccgctctcgcgagacgcgctcgaactcctcggcgcgtgaggtcacgtgcgcgaggtatggcgagaggagcgcgtgaaggtggcgcttcggtagacggagcgtgaagctgcgcctctcctcgagcgagtcctgcgcagtctccacgtggtgcgtccacccgacgcggtggccgcggaaggcgtcgtggacggtgtggttcggcgcaacggcgaaggagatacggttcgacgacggcgagcaggagagagttaatcggcggcacgcggcggcgggggcgtggttcgcggcgttgaggtagaggtgcacatggcggtagaggtcgttgagttcgacgccgcagtagccgttgaattcaggaatctcgaaatacgaatacggagaaagtagatcttgcagagattcgtatagagaatgaagcaaggagagaagctgcgatggaagaacgttctggagaacggtaagtaaccctaacagagaccacatttgtgataatatctccatttctgtgtgttttagtgggtttgattgaaaatttgtttgtgggagtgaaaattggaaactggaattgaagggtttgggtttttagggttcttatacggtgcgaaaaaggaggaacatggttctg

SEQ ID NO: 25566 - DNA, 792 bp, Glycine max
  unsure (1)..(792): unsure at all n locations
  Clone ID: PAT_MRT3847_123088C.1
ccacgcgtccgattgcagggacttcatgaatagtagcttagtttatgtgaagatcataagaggaagatgagaagacactgtaggctttggtggccaaagcaacttttatcaaataaagaatcatcatccagtattttgttggggtggtttgtcacctgctcaccatcatcccttgacattattgcagcctttacttgcagtgaagtcttgctttctagttatagtcctggcattcagatggtttctggaatgatccagtgtaatgagggaatcatttatggcacatgggggagcatgccttcagttcttgaggataagtccaagttctctgtgcttggtctgtgtgtcactgaccctactactagtaatggtttgatgaatgggaaagaagatgacaaaaagaagttctctgagtatggcaatgctttgcaagagggaggtacagatagaaagaataactctaggagttgtcgttgcttccagttagatggttcattgaggaaaagtagccaatatgttcttggaagaagtaattgggttctggtcatgtttgattctcctgaacagaatgatgtangaatacacaggcttccaaaattgcatcacattcattggaatggactaactatgtcacaatatgatgttccggatacaattattctggccattaattgcacagctgctgctaaaagatttttgagacacaccctgtccaagaagatcattgagccagctctccatatttnccatgctttatgttgtcatggggcacctgttttccaaattttgggc

SEQ ID NO: 25567 - DNA, 712 bp, Glycine max
  Clone ID: PAT_MRT3847_123089C.1
gaattcgagctcggtacccggggatcctctagagtcgacctgcaggtagtggagagacacagattactatgggtggtgccaatttcaaagagcccaaaaacaagttgttaatggttggattatatagtgcctaaccaaactctaaaaatagcattcgcacagcaattgcaaatttagttgaagctagctaacactatgaccaaccctttattttttatttttcttacttaaactaaagcaatgagacaaattagtgtttatatataattggtcccgtgtcaaaaacttccaaatgaaatggtatatttgttcgaaaaagttcattaaaaaatagcattagcgattaggaggttagtgcggcctatcgctgtctttggaattgcatttaaatctaattaactcttgcattcgatgaatggtgaactatgaagcaatcaattttgatttggaagtattttaagtgcatgtttgaatagggcggtgtggtcaccgcacgcaccatggtgcttatttttccatggtcataacaaaacaacactttgttgcttctccattttcaattattcaccatgaattttggggctagaatcaattttgtttggtaaccaaacatgcaagtagtaagaacctttccgcaacatgtgattacccgctaacactattagattattagtaccttaatgtgacaaggatagtactagggacaattgtc

SEQ ID NO: 25568 - DNA, 324 bp, Glycine max
  Clone ID: PAT_MRT3847_12308C.1
accaactgcattttcacttgtcgaggggtcttgctttttaagatcattcttttactttttctcactatttattggatacaacatatgtggcccagttgccactggttcttgtgcgccagcacaacacgaaaaacaaacttttttaaaaaaccattacccacaacccaatctctgggtgtggagggaaatgttcaagggcgcccacttttttagcatagaaacaaccaacactacccaaatcaaaggatcacggggggctccaaccataccaaaacaggggcggccggggttcttaatatcggggcggaccagtggggggaacaa

SEQ ID NO: 25569 - DNA, 510 bp, Glycine max
  Clone ID: PAT_MRT3847_123090C.1
ttttaaatttcccacaccgtgcatatgcttcaatacaaattgattaaaattaagcactggtttaaattacattcaatatttctcaaccttaaaacaaccaagtagagaaacccccaatcccaatatctactctttattgatgatgtattcagtatttacaatctaatgcaattgtggaagcagaatttatttagtaaagcagaccatttatccgcctgtaacgagctagaaccaagagaggtcctcgctaattttatttgtctgccacacacatccatcgcatttgcccggactaaggagatatttcaaacaagggggaatcgaacttgtcaagattgcagcatgaatttaaactagcaaaacatgtgcaaaagaatactaaataccatgaaaccactatgcttatcgtacaactaaactacattaattctagttttttttttcagtcccttcagaagagcagttagatgcattgtacagatccttgtgctaccgatccttgctgaaact

SEQ ID NO: 25570 - DNA, 129 bp, Glycine max
  Clone ID: PAT_MRT3847_123091C.1
gccgcccgccttgattgtgttgaatggggaccgcccccctgttgcggcggcatattggcccccgcccgttgtgggtgggtttctctacggccggggcccgtgtacatcttgttccggcgccctaggcgc

SEQ ID NO: 25571 - DNA, 332 bp, Glycine max
  Clone ID: PAT_MRT3847_123092C.1
ggagactagggtaaggtcgcgttgtgttgcgtcgtgtcgtgcgctgttcctcagtctgtcgtgtttgttgacagaccagatcctagctcagcatcacaaccatgtcgacaaagcaaggtggaaaagctaagcctttgaagaaacccaggtctgataagaaggattacgacgaggttgacatggctaacagtcagaagaaaaacgaagacgagaaagcgctaaaggagctgaaagccaaggcgcaacagaagggaagctttggaggttctgggctcaagaatagtggacagaaataagggctctttaacatgattgtatacatccaatattga

SEQ ID NO: 25572 - DNA, 1013 bp, Glycine max
  Clone ID: PAT_MRT3847_123093C.1
ctgatacgcacaacatggtttccctaacaacagagtaatgtaatgctggtaagggggaatgattccatagcgtggaagaatctaccaaactccaaccatctatatctcttcttctttcactcaattacaatatttgttccccaaaagacgcaagaatggcgaataacgagaaagacgcatgttccttcaccgatttcccagaggacattcaggtgtgcatcctctcgttcctgggcccaccggagatcgcaaccctagcctgcacttcgaagcgaatgggctctctctgcgccaccgactccaagctctggttctctatgtgcgagcgcaggtggggctcctacacccgcatcacccagtgggcccaaaaaaaaccccactctctccttcaagcacctctacaacaccctccaccgctgggagaatctcctcggcttctggcgccgaagtggaaccggaatcccttccttgctcttcttcgagtggggcccatccttcatctccgcttctagggtttccccttccgactccgattcgaacacctatggtgtcaccaaaacgccgttcctctggatgagcctctctgaggagggacacgtggtcacgtttctcgatcccgacgggaggagatccgatttcaaacccgagaatcggagcgaattggtggctgtggatgtgagtttcatggggaagacgcattttgttgtggaggagaagcgggttagggggggtgatgacgatgtcgtggtggcggagagcggatcgccgccggagagactgatggcggagatttaccagcatttcgcgaacccgcggagccccgggagtgatcggtccaggaggcagaggcggcgcgagaaggagaggctctacgggaggaagtgggagcctcagcattttgtcaagattgtcaactgctcgccgactccggcccgcccattgcagggcctgtggaaggtgttttattgctcaaaattgttgtattttgtgctcaattcaaatgtgttctcagt

SEQ ID NO: 25573 - DNA, 800 bp, Glycine max
  Clone ID: PAT_MRT3847_123094C.1
aattcggcaccaggttagttactactaactaccccttttgcacacgttgtctcattcactcaaacaacttcaaagaacgaagcttttcaccaagtaacatgttttccatcaatcatttctccgacccagatgccacctcgccggggtcgggaggaagctcccgaccggcgctgtcggacgaggatttttttctggcggcaagcaatcccaagaaacgcgccgggaggaagaagttccgggagacgcgccacccggtgtaccgcggcgtgagaaggcgggactccggcaagtgggtgtgcgaggtgcgcgagcccaacaagaagtccaggatttggctcgggacctttcccacggcggagatggcggcgcgtgcgcatgacgtggcggcgatcgcgctgaggggaaggtcagcctgcctcaacttcgccgactccgcgtctcggctcccggtgccggcgacggcggaggccagggacattcagaaggctgcggcggaggccgcagaggcgtttcgccctgggaaggatgatgatgcggtggcggagagggtggcagcgacggcgacggagcgtgaagaagaacaagaagaagggatggtgccggagtatctgaggaacatggtgctcatgtcgccgacgcattgcttcgggagtgatgagtatggaagtgctgacgtggaatttgacgatgctgaagtttctctgtggagttactccatttaatttaactcagttattggattttttttttactattttgagtaatgtaaagattgttcgtatgggacaagtagaatagtg

SEQ ID NO: 25574 - DNA, 303 bp, Glycine max
  Clone ID: PAT_MRT3847_123095C.1
tcatgctttgggaattgtggcgggaatgggtgcaggtgtgattttacgattcatgaggccaatgtggagcgctgtgtagaccccacacgataaaaacgacgctcaaaagttcgacgtttctggtgggagcaagtcaacgctctccgaggctgacaccgaggacaacaacgttgatgacacccaaactgataaatatgcagatgtagaaaagcctaaacatgttgtcataccggtttgtgtggattctaccgaagaagaaacgttgtcagtctcaaagtcattgaaaataatagaagatgatgt

SEQ ID NO: 25575 - DNA, 169 bp, Glycine max
  Clone ID: PAT_MRT3847_123096C.1
ggcttattcagaggttgagtacagttgctttatatgtaggctcgtttgggccactgacaaccaagctcttgagagaatcttctatcaatacggctaaatcaacgaaacgaagattatcaacgatcgtgagactggaagatccaggggttttggatatatgatcatacgc

SEQ ID NO: 25576 - DNA, 491 bp, Glycine max
  Clone ID: PAT_MRT3847_123097C.1
atctcatgccgcgtcgctacagctccgaattcggctcgagcttgctgatggtgaatcatcgatctttatacaaacatggtcctaacatgatctggaaagggctgaactgtccctacttatctgaggcggctaattattaagacatggacttcccgacgaaaaacggcgacatcacgctctgtgggctctgcataaatgcattgaggaatacactgcacttataattacaatgcgcttccatatgcagtgcgctactatgaccaagaggatgtggactcttaccataatctagcaagagatagaacacacactgcaagtggttggaagctataccaagtcagcagtaaccctaactgctcctatctgtccgcagaatgagaaagaagatgaaatggaagtggaaggatagtgaataaagtcaccagcaacccgcgttccagtttgtattcttctgcggagaaacaatagggtgaaatatgtaacccacaacc

SEQ ID NO: 25577 - DNA, 283 bp, Glycine max
  Clone ID: PAT_MRT3847_123098C.1
cgggctgggcggcaatccctatcctagctactgaaaggaaggataactcactaaccttagggcagggcagtgaaaggcatggctccgtggcctagccaaaacagaacaccctggccatgcgagtagcaaagtcaagtgcagtggagtcctggacgtgaattgtatcaaagcttacgctatgctttgtcctggattagatcactacaacacgcgtcctgtttatctgacctgttaacatcactccctgccccacatttgataagattaacaaaacagttttgtt

SEQ ID NO: 25578 - DNA, 329 bp, Glycine max
  unsure (1)..(329): unsure at all n locations
  Clone ID: PAT_MRT3847_123099C.1
cacgcccgtccgcggacgcgtgggccggactcnnngtgggtcgactccacgtccgtccgcgggacgccgnntgggtttttttgtattagtgtagttccgtnntttcgcttggtttttaagnnttttgtnncctggaatgcctaatgcnnaggatttaaagacccagggtcanngtcagttatttggttctctnnngcattttgtnntcccaaatgannaatgtctattgacttttttcgtcgtnncaagttctttagggtaaccaaattttaaaattgtttgccttgcttttgttatnntattatacccttagannataaaaatgtttc

SEQ ID NO: 25579 - DNA, 741 bp, Glycine max
  Clone ID: PAT_MRT3847_12309C.1
ggactatgattgaccttaacttacctgttgcactggaagttgaagctgatgaaacttttgtgaatgaagtggcggagatgcagcaaaataacacaggcaaggaatcagatgatctcagtgttgtaacaaatgccaaacttagtgaacagcctgacattcacacccggaggcagagcaccagaaaccggccaccaacaacaaaagtgctagaagcttttgcctttggatatctagacagaaaggagaagtgcagaaatagagattatctccaggacagttcaacaaggccttcccgacgtgtttctcgcaaattggcaggctctagaaatggtggtactgatcttgaaaaagaggaaaaaacagatgttgtctgtaatgggaatggtaaccatagcattgacagtaatgtgatatacccaggctccacgtgtaatgaaagataaatgaaacggagtttgaatcgaagcagtggaagtttgattacctgtttctaatatcatgagatggcaacgcatgacataaacaagatagcagccttttcactcattcaagtggttatctgcacataatggatgttagatattaacttcgaaagaagttttttttacagcttaaaacttttcaagtttttccctctggtcttcccagctttgcaatcaacagaatctgagatttctagtctcctgggagttgaagttttatgcttttctcgtttcttagttgcagtgccagtcttcaatg

SEQ ID NO: 25580 - DNA, 216 bp, Glycine max
  Clone ID: PAT_MRT3847_1230C.1
cccagctgcaagaacactacagatatgaccgcgtactggtacacgccatagtacctatagtggcgggcaggaaaaatatataaaggtacgttgttccacgctggttctccataataattacgacccattcccttagccaatctagctcttaatacatggtcattcaagacagtttttctggttattgggactggtgatttcttatatatccatcct

SEQ ID NO: 25581 - DNA, 157 bp, Glycine max
  Clone ID: PAT_MRT3847_123100C.1
ggcaggcaatgaactggggaggggaaactgtacataaaatttcttaaatgttcaactcccaactcaagataactgtattacctagacccaacgtcgaaaacaaaaacacacattcttatgtcttttcagtgaacacaggcatcaggcactttgttac

SEQ ID NO: 25582 - DNA, 256 bp, Glycine max
  Clone ID: PAT_MRT3847_123101C.1
gaccctccttgaggcccttgatcacaatcatgagccccacaagccatccgacaggcctttgcaattggttcttcaagaagtctacatcatttcctagataggaactgggcctgttggacgggatgatacctctgactgagaacctcgaatggagccacttccgaatcaacaggtctttacgagggaactcagtgtgttgacatccacctatgaaactctcactgagggccatcctaataacaatgtggcatctaat

SEQ ID NO: 25583 - DNA, 307 bp, Glycine max
  Clone ID: PAT_MRT3847_123102C.1
ccgaaataataaggagaaaatcatgaaattatgaagcaaaaacaaaaaagatagagctgcaaaaagaagcgcactcacacacccttgacttgatctctatcacactctctctctacctatcagtatctatctctctctctatatatatctacctctcactgactcaatctctttcaatatcactatacatatctaatcctgcaaatctattaaaatatatgctgatctctgctcaaccactatactcaatgcttgcaagatcaacacacattactctcgatcggcatattaacaactatactcattt

SEQ ID NO: 25584 - DNA, 2681 bp, Glycine max
  Clone ID: PAT_MRT3847_123103C.1
gagcgagaagtttgttgtttcgggcttgatccagtggggcgcatatgagccaatgatagtgtttttccgaccaaaaagaaaccaatgacgaaattcctcctcttcgaaaatactacgaaaatcgaaaatcaatcgtagacccacttctcaaacacaagagacaccaccgatgatgatgatgatgatattaaagcaacatcaccaggagtaagagagagcaaaggtggctccttttcatgtgagttttgagtgattcattgattcttcagctaccatcttcttttctactcgaaaaaggaagaggggaaaagaaattgaaacatgggttggattccctgttccggaagttcaaacactaagaagaagttaaagaagaaattggagaagatggaagggcagagcagcctcgttgatccgatcaaagccaccccagggaaattaaagaggaatccatccatgaattccaaaaattcctccaaaaatgggaaccctgagcacattgctgcacagacattctcattccgtgagttggcaactgcaactagaaacttcagagccgaatgtcttttgggtgagggaggctttggcagagtatacaaggggcgtttggaaaatattaatcagattgtcgcaattaaacaacttgaccgaaatggactacaagggaatagagaattccttgttgaagtgttgatgttaagtcttcttcaccaccctaaccttgtcaacctgattggttattgtgctgatggggatcaaaggcttttagtttatgaatttatgtctttaggatccttggaagaccacttacatgatatttctcctggcaagaaagaacttgactggaacacgaggatgaaaatagctgctggggctgcaagaggattggaatatttgcatgacaaagctaatcctcctgtcatataccgagatttaaagtgctccaacattttgcttggtgaaggatatcatccaaagttatctgattttggtctggccaaacttggtccagtgggggaaaacacccatgtatcaacaagggttatgggaacctatggatattgtgctccagagtatgcaatgaccgggcaactgactctgaaatcagatgtttatagctttggtgttgttcttctggaaataattactggaaggaaagcaattgacaattcaaaagctgcaggagtgcagaaccttgttgcatgggccagaccattgtttaaagatcgaagaaaattttccgcaaatggctgatccaatgctgccaaggtcaatatccttcaagaggactataccaggcccttgctgttgcagcaatgtgtgttcaggagcaggccaatatgcgtccagttatagctgatgttgtcacagctttgagttaccttgctttgcaaaaatatgacccaaatacacagacagtacaaagctctcgccttgctcctggtactcctccaagatccaagaggggatattgatatggagctgaatgtttgttagctatatgatattctggtgcaaatttcaaacatcttacaacacactgcaagttatagatttgtagatcataataccagttgtcttatggtggtgatctttcttcagagcatagttgctaaaaatgttttgtaaaattttgttctacctctggtgcacagaactgctcctatttccatttggagccaagatagtatatcctcttccttttgttagtttctatttaaaagcaaattgctggattcattattcatgttccttttgtcttactggtgtaccaacattttatagttgtctattcttcttgtcctgggtgtttgtatagttatgaagctctataaaatttggctttttcaaccaaaaacaaaaataggcagctctcgcgttgttgctgttgcagcaatgaatgtatgggaggaagctaacatgccaaaagctctagaggagcagaatcttgttgcatgggccagacccttgttcaaagatcgaagaaaattttcgcaaatggctgatccaatgctccaaggtcaatatcctccaagagggctattccaggcccttgctgttgcagcaatgtgtgttcaggagcaggccaatatgcgtccagttatagctgatgttgtcacagctttgagttaccttgcttcacaaaaatatgacccgaatactcagacattacaaagctctcgccttgctcctggtactcctccaagatccaagaggggatattgatatggagcttaatgtttattagctatataatagtctggtgaaaatttcaaacatcttacaagttatagatttgtagatgttaataccagttgtcttatggtggtgttctttcttcagagcatagatgctaaaaatgttgtaaatttttgttctaccctggtgcacagaactgctcctatttccatttggagccaagatagtatatcctcttccttttcttagtttctatttaaaggcatattgctggattcatgattcatgttccttctgtcttactggagtcccagcattctatagctgtctattcttctttgtcccggttgcttgtatagttatgaagctctataaaatttggctttttcaaccaagcaaaccaataaaaaggcggccgcggccataagagaaacgtcctcacgggaattgattccggtccgggaccggcacgcgcaccagct

SEQ ID NO: 25585 - DNA, 670 bp, Glycine max
  Clone ID: PAT_MRT3847_123104C.1
caacaagacaaatattgccagcctcaaccaagaccttcgctccaataccaacagcaagaacccaggcatccatcaaaatgcttttcaacgtcgctgccgccgcagtcgcgctttgcgctgcctctgcatcagctattgctctcccacagaacgctggcagctctgccggatccaatatgtgcgatgcgtcgaccttcaacaacggagcagacctcgacattccacaagcaaacgcccaagattgcactgatctcgtcagcggccttgacacaagccagacctggtcggtgtcgaagagctgggctcgtctttcaacacaaggaacatgtgctttcagcgttcgtgtcatcgctggctctaaggacggattggttggtggtgccgacttggctgaccttgtgagagactctgtcaacaacttccagcagggcggtcaagtttcatgcaagggtcagttcggccaagtcgtttctgccgagggcgaggttgactgcaacactccttctggtggctcccaggttagagttgaatgggttattgctgcctccagctacaacccatcgaactagacattggcaggaaaaaggaacacatgtacagcacatgcactggtagaggcattcagaagttccacagttgtcgtatgacaaagacaaatcagattacatcg

SEQ ID NO: 25586 - DNA, 198 bp, Glycine max
  Clone ID: PAT_MRT3847_123105C.1
gtaaacttgttcttaggagcatattgatttatttctagttaatgttatcttctagtgagcaattatctttcctgtgaagtggagtacaatttacatttctgaatagaggaaataccttgtttgtcctcttattcctgtgattacaatgttttatttgcaaatatccattcagatactttcatgttgtcacaatagttc

SEQ ID NO: 25587 - DNA, 261 bp, Glycine max
  Clone ID: PAT_MRT3847_123106C.1
ccctaaaccaggatttcggttctgagcaggtaaacaggggtcgattgttggccgacacttgcaggtaaaaagagtcagtagggataaagctcttcggcaggcgtgactagcgcaaacacatgaacattctaagtgatgctgctgtcttcgcaccagtggctcctaggaggaacagcatgcatctgaatgtcagctacttgtagagcgtgatcgccatcaagtccaagatagcttagtacacagaaagggatcaacaacgga

SEQ ID NO: 25588 - DNA, 262 bp, Glycine max
  unsure (1)..(262): unsure at all n locations
  Clone ID: PAT_MRT3847_123107C.1
tttgcaattgcttgcaagcataatgaatatcactactgagtaatgacttttaaatgagtgttcttagtattgcaatgttacccaaaaaatgtagcatttaccatttttgtaattgtgtcatgcacagaaatgtggtaaataagtcctttgagaactataacatttttatagattatgcaaagatatgttttgttacagtatttcaggaactagatcaatgccatctattgagattcatgtttgctgattatagctgangaaa

SEQ ID NO: 25589 - DNA, 361 bp, Glycine max
  Clone ID: PAT_MRT3847_123108C.1
aaaaaaaaaaaaaaaaaaaaaaaaaaaaaaaaaaaaaaaaaaaaaaaaaaaaaaaaaaaaaaaaaaaaaaaaaaaaaaaaaaaaaaaaaaaaaaaaaaaaaaaaaaaaaaaaaaaaaaaaaaaaaaaaaaaaagaagggggggcccccaaaaatgggccccgtcacccgggaaattatttcgggccgggtcctggaggggttaaaattttccccaagggggatcccttttaggcttggggttacccagggcaaaagctgttcccgggggaaatttgttaccggcccaaatttccaaaaacttaagaaccggggaccaaaagttttaacccgggggggccctaaggggtgggaaaccccaaa

SEQ ID NO: 25590 - DNA, 600 bp, Glycine max
  Clone ID: PAT_MRT3847_123109C.1
cggctgcgagaagacgacagaaggggttgcattgaattcctttccatttgcagcaatctccattgttctcatcctcattccatgtagacagcatgccagcatcatccaaaacgccttccttgaacttgaggagtgcttgtctttctctctctatgcacttaacttctgcaagtttacctggccagttgaatcccagagtagattctgaggtatgcaataaaaccagtagtagtacattaaattttttgagaaaataggttctcattgtaatgatgggagttgtgatcaagtttttctcttttcttgtgacttgtgagtatgaaaactcgatggtaggatttatattcataaaactgcacggatgaatggctatgtatgctcttggttctaaatcatgtttcaaagacaataaaacgacaaagtttcaaaagtggattagataaaatgaatcaataagtaaaacaattgttccctttttcttaatttcttgattttaaattgacattaattgcatatttaaccacaattatttttaagaaataatcattcttttagagcactatctcaaaagtttgataaatgatccatttattctgcaat

SEQ ID NO: 25591 - DNA, 1009 bp, Glycine max
  Clone ID: PAT_MRT3847_12310C.1
caccgaaaaacttctccttggtaacacttaaacttggaaaatagtatactatatatccaatatcaatgtttttctgtcgttgatatcgataacatgtctgctaatggtatcaatacatttttgcttgattttcaatcaaaacattaattctaactattatgaatgaatcgatagggctttgatttggttgagaattagaaattaattaaggtgataggtaggtaggatgcacttgcctccatggtacatcttgggcgagaagccagtcaccttctttgtccagataagcaagttcatagttgtttgattgttgatgatgacctgttaatttgaactcgactaattaataaattaactggaattgaacaagggcatgcatggatgaactttgtcatatatagtttatacttacattttccaaacatgtccatcaaggtttccttgagcgtgtgaaatgattgatgcatactgagatcaaccttccgtgcaatccccacaccctccatcttcaccttcacgtacagagtattcgatgaatatccttggagactatgagtttgacgatgatcaacccataccatgtgatcaatattattattattcccgacaacctcttccacatgaagtttcttcctccaatggtttactggtggccaacccactacaccctcctcctcctcatccttggtgatgttagagcattggctatggtgatcatcaacaacatggtggcttggagttaaagggaggagagacagagtaggaagcataacatggtgtggtggtggtgcatgttccatcatcatgagttgggagaaggtacgttttttgtggctgaaaggctggtcgtaggcacgagaatgggttgagagagcgagacccagttgaagctccattcaacgcaagcaaatgatgcaatgtgttgttgttagtatggtctggaacaataagaagaagaaaagagagagagtgagggctggggatgagggttttaagttggcctggcggg

SEQ ID NO: 25592 - DNA, 310 bp, Glycine max
  unsure (1)..(310): unsure at all n locations
  Clone ID: PAT_MRT3847_123110C.1
cattattatatacattcacttatccatattaattaatatcttcatcatatggtccttgtttatatttcaaanaaccaaggtccacctattaccacttatataaaatttttatacattactcatctaaaattattaacccttaatcatattaaatttctaactattatatcatccatttattatcttaactacccttaaaatacaaatacttattacatttttaaaacttcatacatattttcatactcttttaaatttatcaatcctatttttactaatatatacaatatataaaattacaatttattac

SEQ ID NO: 25593 - DNA, 378 bp, Glycine max
  Clone ID: PAT_MRT3847_123111C.1
tgtacgcgttttgcgttgtcggacgcgtgggtggagagattcatgaaaaagttgtattgaaatttttacaagaggaatttcttacagtttggtcaactcatgtgcgttctgcaacaactctgttggctgatgggtgttcatattcgtatgctatggtgcatgatagttcagtgtctacaataccagtcgattttgtcttttgtgttaagtctgtcaaccataaacaatatgtgttcatttgggctcaatcctggtatttttaggatctcgtcttttgggcaccatttcttaattcattttacagcatactgtttggaatcaaatggcaacagagagaacaccatttgatttttgattctagcaatgctgagctttttg

SEQ ID NO: 25594 - DNA, 332 bp, Glycine max
  Clone ID: PAT_MRT3847_123112C.1
ctccctcctcctcctccttcttcttcatgacatggcctcatcaacaaggttttcccctctgccccaatccgaacctgatcgtgacaaccatgaagaccaattacccctctcaatttccgtggaatccacaaacactaggtctggcatttcgtccgaacattattacgccgaagaaatattcagcatcagcgcacgcacatgcgaaatgattcaagacctccttggcctcacgttgttgatgatgctaatattattaccctctatacaagcgtttggggacgccaaaggaaaaccctattcccccacttttcgttcttaattcaatgtatctt

SEQ ID NO: 25595 - DNA, 840 bp, Glycine max
  unsure (1)..(840): unsure at all n locations
  Clone ID: PAT_MRT3847_123113C.1
gtctcctctcttgttgccgtataaaagactcgccctctgcacaatcccaaacccgaagccgaactaaaacctcactgcaactcaaaacaggaaccaacagtttcctttgcaatattttcttctttctctcaccgccgcgcgaatcctccttcttcgttgcttcattctctgcttctcttcactcgcattcttccttcctaccgctatgtttctatcaaagttggaattctagttgattagttttcctgactctagttggaaagatgggaagcacatttaatccacagattttggtggaaaaactagccaagctgaatgtttcacaaacgagcatagagacgttcgcacattggtgcatttttcatatgaacaaagccaaacaagttgttgaaacatgggatagacaatttcacagttcttcacgtgagaagagattggcatttctgtatcttgcaaatgatattttacagaacagcaggcgaaagggttctgaatttgtaggtgaattctggaaggttcttccagatgctcttcgagatgtgattcaaaatggagatgattttgcaaggaatgcagcacttcggctgattggtatatgggaagagaggaaagtttttggttctcgtggtcaaattcttaaggaagaatttgttgggagtcatgtggaaaataatagccgagatgtgaaacctacaaacatgaaactgctatcgcagaggccatctgtggggaatgcattggagaaaatagcttcaggttttcatgtggtttatggagggcaaacagatgaagatgccgtattgagcanatgcaggaatgccattaactgtcttgataaag

SEQ ID NO: 25596 - DNA, 498 bp, Glycine max
  Clone ID: PAT_MRT3847_123114C.1
ggagtccataagctcataacttatatttcgcaaaatagaaaagctataaaatcttatataattcatcctttatttgatcttttgagtgtggttagtctggagagagctgctattaccagcaacacttggcattccaaaattttattgaaaacacaacaaacaccagcaagggactatagaaagctcaaaccattgtggaaccccataactcaaactagcatgtgactcgatcatagaaaggttagccttaatatgtttgagtcacactcacagacagccagggtgagacctaaacttgagatctaaatttttatgttgctccaaacaaatgccaaactgctttaagtgttgcttaaatccaggttaatatccataacctagaacacccagcccgaataccccttaaatatgaaaatgtaaaatctttaattgaaaaccaaggttcacaatattattgctttgaaatgcattctgtgatgaatttaccacatttttttt

SEQ ID NO: 25597 - DNA, 301 bp, Glycine max
  Clone ID: PAT_MRT3847_123115C.1
ataaatgaggaggtgaaagagagagagaaagcggatcaatgatatagaggtctgatgtgtaaaggtctatgggttatctcatacgaggtagtctaggggagcaggcaatctagatcagttcatatctatttatatgtgaattagatttataacgtagacaaagtaggagctctgagtcagggagaactgagaatagtgattcacgacgaaacagatcggtattcgaggaggacggggattattaggttgaagatatgagaaaggcgccattgtcgaattcagacctaaccattaatcgaga

SEQ ID NO: 25598 - DNA, 710 bp, Glycine max
  unsure (1)..(710): unsure at all n locations
  Clone ID: PAT_MRT3847_123116C.1
aaaggccatggagggttcaagccaaggagagccttgaccaggggggaatatatcaagttcacccactaaaaatcattatccatgtgtatgaagatgaggcttcgggtcctaaatctgcaaaactcattactctaaggttcgagtacttggtgaagttgaatgttgtatgtgttggaatagaaggatctaatgatgctccagagaatgacctcttatgcaatttattccctaatgatacgggacttgagcttcctcaccagtcagccaaactctttgttcaagatgctataacattcaatactcaaagaacctcacgtccttatagatgggctcagcacctggcagggattgatttcttgcctgagatgtctcccttgcttcttactgacaacagtggagcagccaagaatgaaaatgttatatctggtctttcactatatcgccagcagaaccgagtaccgacagttctgcagagaattcgtgcaagaagaaaagctcaattggcccttctggaacagctagaatctctcactaagctagagtggcctcgtttgccctgcaaaagtgttccatgggctttacacactcctttgtgcaatttggacagttggtcacctgtaaaacttccacctgtacctagagagtnctcatctnctgctgtcatagataaagaagagcatattncagaaagcatggatgctgatgtaatt

SEQ ID NO: 25599 - DNA, 554 bp, Glycine max
  Clone ID: PAT_MRT3847_123117C.1
ttttattattaccataaaattttatggaatcctcttgttcaatcagacatatatgtaattaccaatgtgtattattacgtataggtagtagcaaaaccaataaataaaaatctggggtggggattgaggatctgggagatcttctaaaatattactccaactccaaaccctatcagaattacggggaagtggtactatagtacaagtcctaaatttgtcgtgtactgaaactgacttgctatcatttaggcctgtttctgtatgtggattaaaaaataacaactgattatcacttcgcttacgacatgtttaaatactttttaaaatcatgttaactatcttaaaattacggtattatcatgatgtttcaaagtaactatatgttattttgcattcatctagatttcataactcattttggcttacctcaccgtcatccacaaacatgctattaggagttaggactcatcaaccaacaccaagtttatttttatttctttgatcgaaaatattgatgccatttactcattcactatgatatttaatttttttag

SEQ ID NO: 25600 - DNA, 331 bp, Glycine max
  Clone ID: PAT_MRT3847_123118C.1
gccgcccttttttttttttttggttttttttaaagaaggtctactagggaaggaaaaaaggtcacataatggacaatggccagtttagatctacacgggcctttgatgttcctgcattatgtcatgcgaggcctggtctttggctacaactcacattggctactggatgaacaattttaaatcttataagcgattaagactgcaactaaaaggataacgtgcttcctatacggagtgatgttctcaaagatgtgtctgaagcttggacgggctaactctcgagggcattgaacattgaataataaaggcctgcctctttttataatgcacc

SEQ ID NO: 25601 - DNA, 530 bp, Glycine max
  Clone ID: PAT_MRT3847_123119C.1
ctagaactagttctgagtctaaaagacatactaaactgatgttctgattcaaacatattgaaatgcatgcatcaaataattattgcgggctgagatggtttaattttattagttttatttaaggctctcttgtatacaggattcattaatgtcagtattaagaatggtgctggaaccctatccggcagcaacaccacatcctggaaatcatgatgactctgttctttacagtgtaacctatggaaaagcaatgctgcatcaatgtggagcaccggtttctcagccaattgctcctgtaacctacatgtggcaaccaagttcccaacaaaatatgagtacagagctagatggaagaaatcattgtacttcttttggacaacatgacattggtaatgattcaaacaaacatggtgtggagttaagtgaaaaatcaggcaaaattaagcacggttcttcatttagatgcctatgggtgtggatacatgcttctgcctttgaagaaggatacgattatctaaaaattgcctgcc

SEQ ID NO: 25602 - DNA, 504 bp, Glycine max
  Clone ID: PAT_MRT3847_12311C.1
gaatcactaatgcctgaccaaaaaaattcatgttgactaccattttaagtcactgtggtacatgtaaattgattctatctgtatgctggaaatggtcttaggcttatatgagaggaaaaaaaattcacagcatgtgtgtatgttgcaataatgccatgtccttcacttcgtgaagattaggaaaagtaaacccaaagaactactacaaaggagataagcaatctacaacaaactcaaaacaatttacaatcgcagaagagagcattactcacagaaatttatgaaaaagaagatattgtggatggatcaaaattcgaaacaagtttctcacagggcaatgattaatgctataagatcaatccgtccttcacaattgctccaaccaagatgctatatctgacataggtggacgctcacttggacgctctctcacagaaagctctgctatatcagcaagctttagcaaaggttcaacatttcttggaagagccacgtacctatcaa

SEQ ID NO: 25603 - DNA, 318 bp, Glycine max
  unsure (1)..(318): unsure at all n locations
  Clone ID: PAT_MRT3847_123120C.1
ggccgcccttactcggggggccgggaaaaagntaacttaaataacaaagaaaagcacagctcctgttaaagacgaaattccaaacacaaaagtgccaaacaccccatcgaagagacattggaactgctcttcaataaataaaggcaaaagattctgtaacaacggacatgttctttgtagaggcggaggacgggctacaaaacacgtacttgacttctttcacaatacaanttgtaaagtatccgagaggtctaaaaatataaaatttaagcggcccttgaatcgctggcacttaaatgacactttgaaagaaacgga

SEQ ID NO: 25604 - DNA, 200 bp, Glycine max
  Clone ID: PAT_MRT3847_123121C.1
aaaagaaactgttggggggcgtggtactttgaccacacccccgtttgacaccagagcatggacaggacttttgactcttggactatatggggcaccacactacaccgggagttgctttattggacttcactatggcattccgattccctacctcattgttgtttaagtagttttattctcctttggcttttgcatctttt

SEQ ID NO: 25605 - DNA, 178 bp, Glycine max
  unsure (1)..(178): unsure at all n locations
  Clone ID: PAT_MRT3847_123122C.1
cgtnanancacatcagtngtacgaaatgcctccgcngcggtgcacggnggcgtattcngcagtnccgcatattgncaacnacacgagcaagngttngctgnaggagcttggtgatgctgtncctgctcgtgcgattntgagtnacgatctggacnganttcgtggaacntgtnaggng

SEQ ID NO: 25606 - DNA, 183 bp, Glycine max
  Clone ID: PAT_MRT3847_123123C.1
ggcacaagtgtgtctatagatctatagtccctcagattatcttgacattgcctgtttcgtttgttgctacacttctgctatcttgatactgctattgctcaaagtcaccgaacttccctctctcactgagtccagcgtgtcgtgagccatctcgtccttagggcacaggtcttattgggaggc

SEQ ID NO: 25607 - DNA, 446 bp, Glycine max
  Clone ID: PAT_MRT3847_123124C.1
cccccggcaaaaaaaaaggaatttgaaaaaaaaaaaagggaagtttccccgggtttttaaaaagggcccccgcgtttttttggggggccacccacacgtcttttttaaaaaaaaagcccccaacgttccctttttttttttccacatttttttccaatttttaaaacaaggggcccctttttttataaaaccggccccccagggaaaaacccctcccttacgggggaccggggtccaaaaacccaaagggggatttaaaccacccttgagggaaattagggatcctttccccaatttccaccccccaagacccctttttggggggcccaccccaaaacatggccttttgattgaaacccttaccccctttccccacgggggaccccttaatggaaaccgcccttcctttcatagaaccggggttggaaaacaaaacccccggtttt

SEQ ID NO: 25608 - DNA, 1169 bp, Glycine max
  Clone ID: PAT_MRT3847_123125C.1
ctttttaaaaatttcctgatttcattgacagaaactaaaagtaaaaatcataataaagcaagccaaaaaagaaaagaaaagaaaaattaaaaaggcaagcgcgcgaagatttaaacaatgcgtgcgactctctttctttttctcgttttgtttttgatgtttgtgattggaaattcaaaagacaagtttcctacgaagcgagggtagtagtagcttgttgttacattgagattgaggtgaaaacgaagcgagttctcgaatggtttcgccaacaagatccttaaacacaagacgttcgatgtccaacacgacatctcccatctccaccggccattctcccgaccctcgcagagctcgagccatgtccttcttcaacactccgcatatcaccttaaacaagtcctccgactcccacgattcctccctctctcggatcctccgaaactccgaccagaagccaacacttcattcattcattcattcatctctatattgaagatagccacggtcagattttgcctagatttaaagtttcccgatttcgtcattgacagagagtaaaagtaaaataataagaaagctagccaaaaaaaggaaaagaaaaatttaaaaaaggcaagcgcgcgaaaatttaaacaaagcgtgcgactttttttctttttctcgttttgtttttgatgtttgtggttggaaattcaaaagacgagtttcctacgaagcgcgggtagttgtagcttgttgttacattgagattgaggggaaaacgaagcgagttctcgaatggtttcgccaacaagatccttaaacacgagacgttcgatgtccaacacgacatctcccatctccaccggccattctccccacccacgcatctcatccgccatgtccttcttcaacactccgcatatcaccttaaacaagtcctccgactccgcttcctccctctctcggatcctccgaaactccgaccagatctgctgcctctgctcgccgcacgataccgccttccacggcggcaattgctggttccggttcaagatctcctggagtgtgtcgaaatcaacctcctctgcagcgtcgaagccttcgaggtgtctttccccttcagaattgctgcttctccagtaacagaaaaatgtcactgtcttcccgcaagtaagtgcaagctc

SEQ ID NO: 25609 - DNA, 1558 bp, Glycine max
  unsure (1)..(1558): unsure at all n locations
  Clone ID: PAT_MRT3847_123126C.1
cccgccgccgttccttgtacgcaaagttgttagcaatccatatcacaattttgtatgtactccatttttattaagaataagttacacaaccccacgagatattactaattaattcgagttttacagagaaagttgttcaagttgagtgaagtaaggacttcgaagggcctcctgaagcttctcatcaatatcatcattccacgaatcacgatatgtctccaagttggcaaaagcgttcattccagctgatatgcacaactctttcctccattcttctgtctttgggaatccaacattttctccgtatttgtcacaataatcaaaggcatcaaccacatgggtgtagcgtttaggaatgccagctacttcatttgaatgatagaactcctcgatggattccatcatttcctcatatgatggcaaaacttttttcccagacagtagttgcgctatccattttccttgggactcaaagaaagtgatccccaggatctttcgggggatgcctacaaaagagagtgaaggagcatgtgatggtgggaaagtgtactcatacaaaagaccgactctgttatcgtgcacaactgcttttacatttggtgtcgagaaagttgtaagaataattgtacctagtgaacgacggcgttccttgcacgcaaaggcgtcgttttaaattatgccgccggcgaagaggggaaaagcaaaggcggagcctaaggtaacaacgccgtcggaaaaacctaatgattttccgtcttgtattcggagcgtgcctccttcctccgtcgctataaccatccacgccaaacctggttccaaatccgcatccgtaactgatataagcgatgaagcggtgggagtgcaaattgacgcacctgcgagggatggcgaagcaaatgcggctcttctcgattacatcagttctttgcggtggtgggttttaggtgtgaaacgaagacaagtttctttaggcactggttctaagtcacgagataagacagtgatcgtggaagatgtaacccagcaatatgtttttgacgctctggataaagtctcgaagcagcagtgatgacaaaaatgaaaacgtgtttttctttgtgctttctccacaataagtgcagccagagaatatgtgattatctattttcccgttagaagactactattgctctggcagtgttgcagtgtagagtggtgtatttgttttatatattttgacaatttcatgtagatttatgctgggctagtggctatatttgatgagtgtaactttatgtgtgtggaatatcatatatatgacttataattccttaaaaattaatagttgccaatgaagtttttgaggaatagttaaggattgatcttccaaacacacattattggaaagcaaggagggagcttatgtgtgctaagaggccagangagtttttacctgcaaggagggttgaatattattatttcgttgggggatagacgggggggttagagtgtaacagatttttttaacggaatagagnggaatagggggganggagagagcagaagaggngaagatgac

SEQ ID NO: 25610 - DNA, 466 bp, Glycine max
  Clone ID: PAT_MRT3847_123127C.1
tgggaaattgcacgccaggccgcgagcttgtttcagcgacattgataatgcattgtggcacaacacctcatttattgctagctctagacaaagggagattctagcccagcggcaaagccgctggagaaagaagggactcgcacgaggccgacaggcgtactacctcggctattagtggaaagacgaatcgccacgtttgagaggcctagaagaaacaaattctgtccgctgacagagaggaaagggttgaaaaaattgttgtggccggagcggtctagaacaattaaaagtcgaaggtatcagcccaagatagtctccaaattcacttctgagctatcggaccctgcaacagctacagcatattccactgcttggcttgctcagctctgtctttaggggtgtaaccgtctaaatccataaggtctggttgcgccccatgctgtagaaacaaacgtgcacactcgag

SEQ ID NO: 25611 - DNA, 249 bp, Glycine max
  unsure (1)..(249): unsure at all n locations
  Clone ID: PAT_MRT3847_123128C.1
ggctcgagaaattagcaaatgacatacaaatctttactatcatcacactatttaatactttatgaaaccaaaacaaaactggggcacgtgaaacctaacaagggggcccgcgcccnacaaaataatttacccattcccacagacctactatttattcctatagaaactccaattaaatctatccttattcattttcatagctattttctcccacaaaattattttccttcacaagtccatactacatac

SEQ ID NO: 25612 - DNA, 479 bp, Glycine max
  Clone ID: PAT_MRT3847_123129C.1
tacacattcagctttgatcagatgcttaatgataaggtgcattcagtgtatgctagcatagttcagtaaagaagtttttagatcattgacaattatttatggctgctgtgccacttttatttcccgtgtaacaagcatcagatgaagtatagggtaactttgagattaatgtgtggttggtaaccatggatggtaaatagcactgtgttataattttgataaaaataaaatattggattgataactgaccgttaatatgttgaagtcacatccttggatgttttcttcactggttatcggttgcacatctccgtctagagtgtatccttcaccctaagaaataggagccttttttaactacaactataactgttagcaccttattaacaatgggtgttggaactgctaagaagaaatgttgagacttctgtttgctattgttgaactctcttttcatccccatctaaacttgctgatcc

SEQ ID NO: 25613 - DNA, 530 bp, Glycine max
  Clone ID: PAT_MRT3847_12312C.1
aacaatcggtcaaaaaccttagttgagatactcttttaatcagtacacaaactattaatgctgtcatttgattcctctctttctttgcctgtgtaccttgttatagtctttgttaaaattttcttgtattaacacttaatttttttattaattttaatattattctttttttgtacatatatatacaaactaattaagttaatagatcaattatattaaaaaataattaatattattatatataattaaaaattttaatgtatatttaatacatataaatttatttaatgaactttataataattaatgttaatttaataatgtattttttatataataaaaatttatatatgatcaaaattaattaatataaaacttatgtatgtgttaataattgatttattagtttattcgataaaatagcatgctaataacaggaatgttatacttatttcacatatatgttaaaaaatgataatgttaaaattaataaaaaattgaatgatatatgtgaaatttgatagtgtttg

SEQ ID NO: 25614 - DNA, 267 bp, Glycine max
  unsure (1)..(267): unsure at all n locations
  Clone ID: PAT_MRT3847_123130C.1
ctctaccctaccancctcaacacaagctactttcccttatttattagcacacagcacggtcttgccggctggagctggggaccaatcatccactcatcatatactagatatatgaacatccattccatatcaccttttgtaatggcactgctgaaatcaatgactcagatgcttatttaaacatgaattatgttattcttcttactcatgcaattagactccttttcctactcagactatagagacatccactgaaacaaaatctat

SEQ ID NO: 25615 - DNA, 173 bp, Glycine max
  Clone ID: PAT_MRT3847_123131C.1
gcggtttggtcgaatggacccaagaaccggatcctaaccgttgttggagatgggtgatgaaatgaaggccgagggatcatacttagtttcgaaaccacatctttgtgagggagattgtgtggggaccacaaatcatactgtttagggtgggaaaaaaacgagagtcgaacatc

SEQ ID NO: 25616 - DNA, 305 bp, Glycine max
  Clone ID: PAT_MRT3847_123132C.1
aaaaaaccatatctcagttaccggctatttaaacaacaaaatttcgggctaatttcccggaaaggcaaaacaaaagaaaggggggggcaacaaaggctttttttttccaaaaacttgccttttgaaaaagtaaaggccccccagggaatcgattaaataaaggataaaacagttttctcatgtttccgaaaaaaattttcctcattttcataggcctgggacaaccgatatacaaactggagtatatgcccaaaagttcttcctacaagcaaaaactaaaattattttcaaaacttccttaagct

SEQ ID NO: 25617 - DNA, 2063 bp, Glycine max
  Clone ID: PAT_MRT3847_123133C.1
ccacgcgtccggtggtggcaataatggtaggacaataaaaccccttggggttgacatatcaaagaggcagcataaaggtggacttagcaagggcataattgctattattgctctttcagtttttctagtagttgttttatgctttgttgctgctttggcattgttcaagtacagagatcatgtgagtcaaccaccatcaaccccacgggttttacctcctcttaccaaagcaccaggtgctgctggatcagtagttggaggtgggcttgcttcagcttcgacatcatttcgatctaacattgctgcttacacaggatctgctaagactttcagcatgaatgacattgagaaagccacagataatttccatgcttccagagtacttggagaaggtggttttgggcttgtttatagtggtatacttgaagatgggacaaaagttgcagtcaaggttctaaaaagagaggatcatcaaggcaaccgtgaattcctatctgaagttgagatgcttagccgccttcaccatagaaacttggttaagttgattggtatatgcgcagaggtcagcttccgctgtttagtttatgaactcattccaaatggcagtgtggaatcccatttacatggagctgacaaggaaaacagcccacttgattggagtgctcggttaaagatagctctcggttctgctcgtggactggcttatctacatgaagattcaagtccctatgtcatacatggggacttcaagtcgagcaatatcttgctggaaaatgattttacaccaaaagtatcggattttggattggcccgaacagcagctgatgaggggaacagacacatatcaacacgagtgatgggaactttcggttatgtggccccggagtatgcaatgactggacatcttcttgtgaagagtgatgtttacagttatggtgttgtcctccttgagctttcgaccggaagaaaaccggtagacatgtcacaacctcctggtcaagaaaatctcgttgcatgggctcgtccactactctcaagcgaagaaggattggaagcaatgatagatccatctcttggacatgatgtgccttctgatagtgtggctaaagttgcagccattgcttcaatgtgtgtacaaccagaggtgtcggaccgtcctttcatgggggaggttgttcaggctctaaaacttgtgtgcaatgaatgtgatgaggcaagagaagcaggttctagctctagttctgttgatttaagtcactctagacaaccatcagataatttacaaggccaattctcagccaccaactatgattctggaattgatattgaaaatgggttgttagcatcagagttattcagctcatcggcgagatatggaaggcgagtgtccggatcgtttagaaggcattcttattcaggtcctctgaatactggaagaagcaagcggttgtggcagataattagaaagctttctggcggtagtatcagtgaacatggaactatgtttaagttatgaccaggtttcaattgagccaaattgcaagttttgaactttcttctgtgcatactgctctccctcacattgttaatgtgcagttcacaactctactagaggcattgcacctctctgcctgagccattggaagtttgacaagagaatacaagcaagttgtaaataggttttgacatgctttttctgctaacctgcaagatcatgtgtatgtaactggtactaactctttgaagaggggaaacaaatgcaaatctagtttgaaaatagaagatgactgaagatggcctttactaagacctccaattgcaaatacaacatacaagatatagtctatgcagttgcagcatcaaaataatataatgttcaaattgtcaaagccacatgtatcaagaggaggggatggaatggaatctagttaattagttgtgtagaacatgattatataacgaatacattgctgaatttacacaggccactctttttttaaaatatctttatgatgatagtttcgtcatcagatttttataacttcaatgacaatagtgtaaaa

SEQ ID NO: 25618 - DNA, 512 bp, Glycine max
  Clone ID: PAT_MRT3847_123134C.1
gcgacagttgctagtaattgggctcgagtattctctgaacaatggcgtgctctctatcaactaaattaactcctatgcatgcccccgcataactctattaacctatatgttctcaccacgcatcttcgaaatgattgggaccaaaccatgacgctatggcctatggatactggtgcgtgtgcgatcggccaccaacgacgactagtgggggccggataaggaggaggcgtacagcttccttctttgataagaagaaaaaccctccaagcctgagacggagacagacaaactgattaaggcctgggtggattcgttttaccagacctgtccgtggctgaaagcaactagcgaatcgagagcggggatcgttgaactcattacacacttcgaggccgggaaccctatgcctgtaggcaccgacgccttgactatttttaacggaaaatggttgctccgcgattcatcctttgcaggtttatttcaatgagtcgaagcggaacactaccattggt

SEQ ID NO: 25619 - DNA, 444 bp, Glycine max
  Clone ID: PAT_MRT3847_123135C.1
ttcacattcttcctttctctctcttcgtctctattcagtgaattcggattttttttttcctcttcaagctccggccatggcgtctggatcctcgggtcgcggcaactctgcctcgaaaggcttcgatttcgcttccgatgacatcctctgctcctacgacgactacgccaaccgcgattccagttccaacggcaatcacaccgatccggtaattgctcctaattcaactaacgtatatttacccatgtgcccttagcgtcgtttcgcgcgttgactcgcgcgtttttggcctctgaggacgatttcagaacgtgggttttggtcttttggagcgaaagtcattggggtttaggaaagttttaatttttagcgataaagaaaaaatattgacggtggaggggtttctttatttcttttcttgtttggttgctgccaattccttta

SEQ ID NO: 25620 - DNA, 1795 bp, Glycine max
  Clone ID: PAT_MRT3847_123136C.1
tagggaatatgcatggcgtaagatcaataaaggaatacagctcaaccgctgtgagaacaagaccttgtgcatggagaaactttcactggttctccctgattcaccaccatacttcccaagacagtttggacgctgtgctgttattaggtaacctcgggatgatctcttgaaaacaaaatttggaaatgagatagatggttatgaaggatgcttaacaagttgtcattagagaaaatggtgctccaacacagaactacaccgattacgtggctaggaaaagcacatttcggcttctaaaccgaggatccgttaaagcactggataaagttgtagagttagatgaacaaagaaaagaagtctggataataaatacaacaattcatgacatcatgaataaaatgattcgggaggttcctataaaaaatcgttatcacctcacggttggtgcaacctttgggtcagcagcaaaaggaactggacttaaagctcttgaatttgctctctctatgtgtgattcagtggatatgtatggtttcactgtagatcctggttataaagaatggactagatatttctctgaatcccgtcaaggccataccccgttgcatggtagagcttattaccagatgatggagtgcttggggcttatcaaaattcattctcccatgcgagctgatctaaatcgtgttgtaaaatgggttccaagccaccatattataagggctgctagaattgcatcagagaaattactgaggagagttggagcaggatctgaagatccactggccgcatgttccataattaagaagcaagtaaaaagaaatctaaatgcagtttcaaagctcagaaaggctgcacttgatcatttacggtatgtgaagagaacaaccatgtatcctttagagcatagtcctggacatgggtcgctttgcactgtgccaactgattaaactgtacttagattctgtgttcagtttgtgctgttgggaagcatccaaccccatgatttacaaaattatccgtttgtttaccttttccaaactatgtcattaacatgacaaaatggcaatgaagcttcctactcaccagcgtggtggcaaatcaaggaaatttattggttcctataaaaaatcctgtgtacctcatgctaggtgcatcctttggctcagcagcaaaaggaactggacttaaagctcttgaatttgctctctctatgtgtgattcagtggatatgtatggtttcactgtagatcctggttataaagaatggacaagatatttctctgaatcccgtcaaggccataccccgttgcatggtagagcttattaccaaatgatggagtgcttggggcttatcaaaattcattctcccatgcgagctgatctaaatcgtgttgtaaaatgggttccaagccgccatattataagatctgctagaattgcatcagagaaattactgaggagagttggagcaggatctgaagatccactggctgcatgttccataattaagaagcaagtaaaaagaaatctaaatgcagtttcaaagctcagaaaggcagcacttgatcatttacggtatgtgaaaagaacaaccatgtatcctctagagcatagtcctggacatgggtcgctttgcactgtgccaactgattaaactgttgggaagcatccaaccccatcatttacaaatttatccgtttttttaccttttccaaaatatgtcattaacttgacaaaatggcaatgaagcttcctactcaccagcgtagtggtaaatcaaggaaatttattt

SEQ ID NO: 25621 - DNA, 1259 bp, Glycine max
  Clone ID: PAT_MRT3847_123137C.1
cggaattcggcttcgaaactcttccattctctccctctcaataacttgcttgtagtctaaaacctcatagtcacatacctgcgcttcttttctcacccctcacaaaacagaacactctgttttccacttctttattcttctttttatccacctttgaacatctcaacaagtcaccacatggctgcaattgtgcaccacggattgcagtcacaccttgagtcccaacacactgagtcaatagcactcaaactgaggctcccttcctcaaaaccaccccttcctcaactcattgatttagccttcaaaccctctttctgggattcaagttcaaccatcaaaccccacagcgaagaaaacaataacaacaagaagtccacacccgcaaaccccaattcttggagcttccgcgaagcactctccaacgtcacaaaagaaccatcacagaaccaaaccacctacgtgcaccctcagcagaaacgcttctccctgagcctcagtccaaagagcctccagctgtgcaccgaaaacctcggaaacgaaagtggcagcgacagtggcagtgacagtgatgaaaacagcattgacatgttctcctcagtgaacgggaattcggggacaagggaacaaacccaacaaaggcaacctcgtcaactttcgacagcgaagaaagcgaaaacccagaactttccaccccctttgacaacgataagggggggatcagaatctcttcgcgtgagacctcaccgcgaagatggacggctagtgattgaagtcaccaaggtcccacctagttcctcgtgctttcatgctgaacgaagccatggccgccttcgcctctgctttctgacaaaccacactccaagttttgagacggaagcagcagcagaagaagaagatgacgttgaagaaaaagaaccattcgtcaatgataaaggattcgaaaacgaaataggtggacaagtaaaagacactaccaaagaagaacaagaggaaacagaggacgaaacaggggaggaagaagaacaagatgaggaatgtgttgcatgtgggtatgtgaagagtgatgtcattatcatggaaaagtacgagaggctgagaaggtgcaaagaaggtggtgaccacgagaactatgaatttttaaattggagtgagccacgtttggtggctacttcgtaaagctagtttagttagctagccactactatcttgagatttttgcatctctattaataaaaaaaatttacatttgtctttttccc

SEQ ID NO: 25622 - DNA, 158 bp, Glycine max
  Clone ID: PAT_MRT3847_123138C.1
ttgtttatacaccctcataaggcttattataaaagaatagaactacatacctagataaagaaatgcctaaccatatatcctcttgaggccaaaaaacaaacaccaattgcatataagtcttaaataggacaacaacaataaaaaaactagccttagac

SEQ ID NO: 25623 - DNA, 560 bp, Glycine max
  Clone ID: PAT_MRT3847_123139C.1
ggaaggccttacagaagaggagatcaatgccttttatcaggagtgcatgaagttgggcaccactacattaaagctatgccagggcatgcagccaaagttgtccaagttttttgaaccttatgctacgactaacttgcatggagcttctgctgaattgagttctgactccagatctgaagcttgatgctctcggttctatcacggatagacccaagtttcattttttatggcagatagctagtaacattcttcccttttgtttttaaagaaggctgatcacttgggagtgaaagaagtgggtgggttttgatcggaaccctgcattttgcaaatattgcaataagttacaggtgtctcaatcccgcctgcttaacagggattttttttttcttttgggttaaaagttataggttggtggttgggtaggggtaggctaggggctgttttgtctgcagtggaaggtgctgggcaattgcatcttttggggtattttgatccttttttctttcaaagggttgattctacatgataaagtttatgatgtttttggtcaattttac

SEQ ID NO: 25624 - DNA, 128 bp, Glycine max
  Clone ID: PAT_MRT3847_12313C.1
cctctttccattttccttcgtttactcgctctttcgcagtttctcagtggatcagtcatcaccatcgcagcagtaagatgtggaaggaaccattcgggaaaaccgatttggatagcggttctcggcct

SEQ ID NO: 25625 - DNA, 473 bp, Glycine max
  Clone ID: PAT_MRT3847_123140C.1
aaacccaaaaaaaagcagggtaaacaaaagcaaaggctttttaggggggataaaacataggccaaacccccccgaataaggccccagggccattaagtttttttttggttccccatgggcaaacttttttaaagaccccaaggggacggaaccaaaagcaggggtgggcgttttaaaaaggaaaaacaaacaccctttttaaaagttaaaaactgggaggtctggacaaacaaactctaaaaaggaaagccatttccgtttccaccaaaaaactttccaagaggagcaaaaaaatgggccttgcattttgccaaaaaggccttttgagcttgggggaaattttccttttttccaccccatgtttggagggggctttggtgcagggctcccccaaatgaaaaagaaagagtccagggcttaaacacccccaacttgttcattggattcagggggaggggagcttttttttaact

SEQ ID NO: 25626 - DNA, 157 bp, Glycine max
  Clone ID: PAT_MRT3847_123141C.1
tcatgtgacgggagactcttatacaacatgccagtatcacaggcatcacattcagcacgctggaatctacactctgcaggactctattcttccagactccaatcggttcactcccattctattcttctcaacgtacactcatcatcgacatcccgct

SEQ ID NO: 25627 - DNA, 1480 bp, Glycine max
  unsure (1)..(1480): unsure at all n locations
  Clone ID: PAT_MRT3847_123142C.1
gccccgccccagaggcacgttgagattcaccacgccttcccttcccgcgcttacgatctgccccttcctgccctctctttcttcttctcttcctcctcccggcccttttgtattatcaactgtagacaaaagggtctcctcttgctgcagctgctctgtttcactcttcgcctgtcttgcgtgtgtctctgtctcctagtctgtgatgcctgtgtatcgttacgtgttgtcgtcgcctatgcctatagatcttaatgaagatcacacccaccacgtcttcagtacaagccatcaagcctcttcttcgtcttcttctctatctttttctattctcttcaacccggatcatcaaggtcaaggaggatcttgttgccactgggaatcaaagcacttacaaagtgatgaagaggcccagaagattgttccttctagtgaatcatgggagcatccagtatctgaaaaggatgaaaacagaagtgatctcaagctgagagtttggaagaaagaagataagtgtgaaaattttcaatttgaagaataattcaactaagtggatgcctttaaagatgagaatgatgcggaggatgatggtgtcagattaaacgggttttgatacagaaggcatgatctctaactctaagcagatcaagaatgaagagaaaaacccaccactgacacctctaggaactgatgatagtaataactacaattcttctgcaaaccacagcaatatcactgttagggtttgttctgattgccacaccactaagacccctctctggagaagtggaccaaaaggtccaaagacactttgcaatgcttgtggaattcgacaaaggaaggcaaggcgtgccattgccgtggctgcaacggcaaacggaatgaatccggtggaggctgagaaatctcaagtaaagaaaggaaacaaattgcatagcaaagggatgaagtccaaaactaagggtgcaccacatatgaaaaagaagcgcaaacttggagcgaagtatagaaagaggtttggtgcttttgaggatttgacagtgagattgagtaagaacttggctctccaaaaagtcttccctccggatgagaaggaggctgcaatcttgctcatggctttatcttatggccttcttcatggctttcccacagatcgttacgtcaattacttagatttatgagatatattggtggtaaaaccataattattgtatgagaccaatgcttaattagtgttgtgctagatttagtgaagttaattagtatgaaaaactgataatagggacaataaagttatgaggagggtggttttatcaattgtatgttgcatctgaacaagaagacaaacacaaaatactagtgtcttattgttcatgatgatgagtatcctataatctcgataaatatttaataaaattccaagagattttatgttaaaaaggggggggggggcgannnnngagaggggganntgggatta

SEQ ID NO: 25628 - DNA, 312 bp, Glycine max
  Clone ID: PAT_MRT3847_123143C.1
gttttaactccgaagacttggaggtggaggcgggcgcggaattgcatagagatgggagtcaaagatggcagcaataacaatgttttaatttcattggtagcatctgagtttgatggtttcaacgaagaaagaaaacaaaacccccatccttattcacctctctccctcccagagaggattgtaatcattcaaatctaataataatggcagcagtgtcaggaggaggagggactgatatatggaacgcccacacggctattgcgatggtgcaattatttaacggaggctatcacgtcatcaccaaagatgcac

SEQ ID NO: 25629 - DNA, 491 bp, Glycine max
  Clone ID: PAT_MRT3847_123144C.1
gtatgcctgaaatcatgtctagggccagatagccagctctccctaaacagcctgtatttcagatgagcatagggcttcaggatgatgagattagacagaagatggaagacttgcggaacgaacgtgagaggagaattgctgaaagaactgcattctctggtgttggtcgtgcctcgacaaataatgaccaaattgaaggtaaaacatcaaggatttctgccatgagtgacaagattatggaattcagttctgtcaaggtcaggagaatttagcaagtctcacagtaaagcgtgtttaaataaccgctgattagaatgatctgaatagttttgtttcttatataatttcaaaatattctggtttgtttcacgggtgtatatcaatagattctttatcaattgtatgtgaatacttgtcatagcgtttgttggattgatatcccggcattctttgctctatgtattgtatgagaccttctataaatagttttt

SEQ ID NO: 25630 - DNA, 455 bp, Glycine max
  Clone ID: PAT_MRT3847_123145C.1
gttttcttcattttctgcttcaattgcctgagatttcgtctcaaaatttgatgctgtgatccaaagggggagttgctggttgctgtcactgtgaatctttctgcaggttctttgagtcacacatagttttctttggtgagaagtaagaataagagaaagagagagaattttgaggatgggagaccgttgcagacatttttccattgaggaattgccatcacatttggtattagaaattctgtgctccggcaggctcagtgcaatggaccttgtttgtttagaattgacttccaaaacatttggtggtagtcatggtttgcaccctttcaagttcatcaagtccttggttgactttgctgcaattctgtgcctcccatgttacctatgcaagaatgggtttgaattctcagagggagttgtatgatagatgtggaggaaattggaagcgagttttg

SEQ ID NO: 25631 - DNA, 263 bp, Glycine max
  Clone ID: PAT_MRT3847_123146C.1
gaaaaaaattgttggattaaacccgctgcagaaaaaaaactatttggttttaagccggaggcataacattcactttctttttttacccgtcagttaaaaaaaaccgctttttaggcctttttattcggccccactgactttttggcgaggtatttttccctccaaggcccctggggggaaaaaaaaccccatttttacccccttgttggattgaactccccgttcctcaagcccaatttgtcctttcttgttcctacccgggg

SEQ ID NO: 25632 - DNA, 229 bp, Glycine max
  Clone ID: PAT_MRT3847_123147C.1
aacaaggagtgacagcttattatagattgaaaaacgtgatacatttttcaagtgcattttgagtgcaagcacgtaaatcttattttagaccgcgcaaacatctttgtaatgttcaaattcaagtttctgttttaaagaatataaaatacgtttttgagctgtcaaagaataaaatacacccattaaaaacttaggtaaaatgaagagcaacctcatatgtgaagacctt

SEQ ID NO: 25633 - DNA, 412 bp, Glycine max
  Clone ID: PAT_MRT3847_123148C.1
ttttttttttttttttttttttttttgggcaaacccttgccattttataagcaccacttcaccactcactaaattttaacaccgggtcaactggcccaacttacattggaccctatccgaatgggccccacagggtacaaatgtgaaaaaagggaaaaaagattaaaaccagttaccccttttcccttattccacccgggcaaatttttgaaataaaaaaaataaaaagagggggtttttttagggttaaaagggagcccccgaatttttggtttaaggttaccccccctttttaatttcgggttttaacaaaaaatcccaccaggggatttgccattttcaaaaccgacccgggtccccgggggtggaactttcccaaaatttaaaagcaacaacggggggggggcaaccc

SEQ ID NO: 25634 - DNA, 110 bp, Glycine max
  Clone ID: PAT_MRT3847_123149C.1
tcggatttcgctcgagcatgattgctgacgttttttctcgttttatggccgtgtgcacgtgctaggttacgcaccagggtcctacacaggtctccacaagatgttcccct

SEQ ID NO: 25635 - DNA, 262 bp, Glycine max
  Clone ID: PAT_MRT3847_12314C.1
ccagcacaaccaaaatcataaatccctgaaattctaacccatcgcgaattacagtttgatgggaattatgatgtagcacaaaatgcctaaccattaaaatcaaaataccaagacgaagttctaagtaactcaggacagaactcaaaaaaacacaactgggtaaaatgagagtacataattcggcacatcatgccactaaacacttgacctcctttaaggcatatccaacgcttcacaatcgcgcttcacattaatcatcctt

SEQ ID NO: 25636 - DNA, 1121 bp, Glycine max
  unsure (1)..(1121): unsure at all n locations
  Clone ID: PAT_MRT3847_123150C.1
tctcgagccgattcggctcgagtacggctgcgaaaagacgacagaaggggggttttggttgggattcaaacaaaccatccgcactgtgcatccctttcttccttcctcgtcttattcttctccaaaacttccttcttactcttcttctttctgtttcgcaccctccaaacgacgttgtttctcgtcgttcagccatgtcgtacgactacctcttcaagtacatcatcatcggtgacacaggtgtagggaaatcgtgcctgctcctgcagttcaccgataagaggttccaaccggttcatgatctcaccattggtgtcgagtttggtgctcgcatggtcaccatcgattctcgacccattaagcttcagatatgggatacagctgggcaagagtcttttagatccatcactaggtcttactacagaggagcagcaggagcacttctagtttatgacattacaaggagagacacatttaatcatttagcaagttggctggaagatgcccggcagcatgccaatcctaacatgaccatcatgctcatagggaacaagtgtgatctgtctcatcgacgcgcagtgagcaaagaggagggagagcaatttgcaaaggaaaatggacttctgttcttggaggcttctgctaggacagctcaaaatgtagaagaggcttttataagaactgctggcaagattcttcagaatatccaggaaggtgtgtttgatgtgtccaatgagtcatttggtataaaagttggctatggacgtccccaaggtcaaccaggtgccagagatggaactgtttcagccagaggtgggtgttgcagctgattgagagggaaacaactctgaatctaatcccttttgtgcatcgatttctgaattccctgtctcaaccgagtgtatactctttagacttagacatggaacttttgaatagcactacaatttcatgtatagatctaatctcaaaggccttcttgggacagatttcactacatagtttaatggttggctgttgtgttcaatgccagtttttatttgcctttattgatttaaaagagttccactgcaacaacagtggccaccggcttgaatgggaggaaaaatatnaaaaaacga

SEQ ID NO: 25637 - DNA, 400 bp, Glycine max
  Clone ID: PAT_MRT3847_123151C.1
ctaggaccgctcaaaatgtagaagaggcttttataaggactgctggaaagattcttcagaatattaaggaaggcgtctttgatgtgtccaatgagtcatttggtataaaagtcggctatggacgtccccaaggtcaatcaggtgccaaagatggaactgtttcagccagaggtgggtgttgcagctgattgagagggaaacaactttgaatctaatccttttgtgcatctatttttgaattccctgtctccgccgagtgtatactctttagacttgacatagaacttttggatagcactacaatttcatgtatagttctaatctcaaaggccttcttgggacagatttcactacataattttcagatctactaaatgtttaatggttggctgttgtgccc

SEQ ID NO: 25638 - DNA, 1438 bp, Glycine max
  Clone ID: PAT_MRT3847_123152C.1
attctgcccttccctcgcgtttcaacaccgataacccgcaaaaatctccattgatctgcgcctcctgttccatggcaaagctgcctgtggaatacaacggcgactgcgccaccaccgcctcagcatccgcctccgcagccgcggagtctcagagatccattcccacgccgtttctcaccaaaacctttcaactcgtcgacgaccaatccatcgacgatgttatttcctggaacgacgacggatcaacgtttatcgtctggaaccctaccgtcttcgccagagggctgcttcctaaatatttcaaacacaacaatttctctagcttcgttcgccagctcaacacttacggattcagaaaagttgtacctgatcggtgggagttctcgaacgagtatttccgccgaggcgagaagcggcttctgtgcgaaattcagcggcggaagatctcctcgccggcgtcgtctccgacggcgccggcgacggtttcggtcactgcgccgatgccgttgactgcgataccgatcatatcgccgtcgaactccggcgaggagcaggtgacgtcgtcgaactcatcgccggcggagcttctcgacgagaacgagcgactgaggaaagagaacgttcagttaacgaaagagctcgcggagatgagatcgctctgcaacaatatttattctctcatgtcaaattatgcaaacgccaacggaaaaggaaacagcaacggcagttacaaaactaaaggcggcgccggtgtcgcgcacggaagtttagagtccggcatgacggcggtgaagctgctggatttgatgccggtgatgcgaagctccgatgaggacgcggcggagatggcgccggaggagatgaatccgaagctgtttggtgtggcgattggagcgaagcgagcgagagagggaggaggtggtggagattgtggaggtggaggagaggaagatacgctgctgcgcctgcatcacgcgggttctgcggacgtgaaatctgagccgttggatttccagaaccatcgcgagaatcagaaaacgccgtggttgagtccgtgttacaggacaaatcaaagagtgtgcaactgacacgcggcgacggttaagcaaaggaaacattttagattagattacgtagtggcgtagggaatccgagaccggcacgcggagacgtcacgtgcgtcgtttaaccgtttgggaccgattcccagaagtttctcagaagtcggaggaaaacgatactttgtagtccttttttcttctctctctcttttttttttatataaatatattttttttgttgcatgaaattggacttggactgtagctatgcctttgagggtagtgttaaatatttcatttagttctataaattattttacttgccagggaaaactcaagattcatattcatgtgaatatatttaatagttttatact

SEQ ID NO: 25639 - DNA, 759 bp, Glycine max
  Clone ID: PAT_MRT3847_123153C.1
agaacaaccacatgattgtattcatcagctcaacataacactttgaaatagcatcacacagatcagatgtcactcctccaactccaactcacttctcatgcattacgctctgtctcttcccataacttcagacccctctattcatctaagcgtgtcagctatgtaagaaccaaaattagagctgttggcacagtccctgatgagaaggactctgattcagacatcaccactgaccccgatgagccaccttatgtcggcctcgtatttgttagttctgtattgctaccagatggaacaccagatatgcactttcgttctgcttgtggaggccagaggcttaggaagataatgctcgattccaatgttgacctctatggaccctatgccagacctttgctaaattgtggaggaggtggaacttggggcacatggatggtggaggttattgaaggcaaggagcttctaaaccctcgcactgataaagagaagaacatactaaagaaaaaacctattaattgagaaaccaaagaattggagattagcatgtcaaacaattgttggtaaaccagattccagaggggcggttgtgattcaacaactaccagagtggaaaggacacgaatggaaatatgcaaagcctggagagtcggactgggagtcggagtaaaggaaatgatatatatataaaacgaatttcttcctaagacatttttgttttcgcttcattgcaaaccatgaagaaagccttggatacctgca

SEQ ID NO: 25640 - DNA, 1611 bp, Glycine max
  Clone ID: PAT_MRT3847_123154C.1
cccacgcgtccgcccacgcgtcggcccacgcctctctctccttcatccttatatttccaacggaaccttctagaaccaccataacatcattctcccttccctcgcgtttcaacaccgataacccgcaaaaatacccattgatctgcgcctcctcttccatggctccaccgccgccggtggaacacaacggcgactccgccactaccgcctcagcatccgcctccgcgccgcggagtctcagagatccattcccacgccctttctcaccaaaacctttcaactcgtcgacgaccaatccatcgacgacgttatttcctggaacgacgacggatcaacgtttatcgtctggaaccctaccgtcttcgccagagacttgcttcctaaatatttcaaacacaacaatttctctagcttcgttcgccaactcaacacttacggattcaggaaagttgtgcctgatcggtgggagttctcgaacgattatttccgccgaggcgagaagcggcttctttgcgaaattcagcggcggaagatctcatcgccggcgccgtctccgactgcgccgacgacggttacggtgccgatgccgttgaccgcgataccgatcatatcgccgtcgaactctggcgaggagcaggtgatatcgtcgaactcgtcgccgttgcgagcgccggcggagcttctcgacgagaacgagcggcttaggaaagagaacgttcagttaacgaaagaactcgccgagatgagatcgctctgcaacaacatatattctctcatgtcaagctacggaaacaaaaacggaaacagcaacggcagttaccaaactgacggcggcgccggtggagcacagggaagcagggagtccggcatgacggcggtgaagccactggatttgatgccggtgaaacggagctccggcgaggacgcggcggatacggtgccgaaggagataaatctaattccgaatccgaagctgtttggcgtggcgattggagcgaagcgagcgagagagggaggaggaggaagtggaagtggtcgagattgcggaggaggaggaggaggaggagaggaagataccctgctgcgcctgcatcacgtgggttctgcagacgtgaaatctgagccgttggattgccagaaccatcgcgagaatcaggaaacgccgtggttgagtccgtgtcacaggacaaatcaaagggtgtgcaactgacacgcggcgacggctaatcgaatgaaacattttagattagatacgtagtgctgtagggaatccgaaaccggcacgcggagacgtcacgtgcgtcgtttaaccgtttgggaccgattcccagaagtttctcagaagtcagaggaaaacgatactttctaatccttttttcttcgctatctcttttttatttatattatatattcgttaaattggacttggactgtagctttgccattgagggtagtgttgaatatttcattagtcctataaattattttacttgcctgtagaaactcaacattcatacttatgtgaatatatttatagttttattaattacaaagtgcaaaaactcgaaactagttcaataaccttatgtgaatatatttatagttttatta

SEQ ID NO: 25641 - DNA, 667 bp, Glycine max
  unsure (1)..(667): unsure at all n locations
  Clone ID: PAT_MRT3847_123155C.1
ggtccggattcccgggtcgacccacgcgtccgccctaataaccctggttgaagctatcagccatggctgaatcattcctcttcagcaaagcttgcttctggagcttatgaataagcttctcaggtgctgggtttataccatcatctgcaagagtttaaacagacactctcattactcaaggctgtgctgttggatgcagagaaaaagcaggagcagaaccatgagctatgcgaatagctgaagcagatcaagtgtgtcttctatgatgcctaagctgtgctggttgaatttgaatctgaaacactgctaaaggaagtggtcagagctcatggtaccataaaaacaaaggtaggtcgcttcttctcaagttctaatccacttgtttttcgttatagaatggctaaacaaattagagactagacaaggttgcagctgataggcaaaagtttgtgcatagaagggagatgacgcattcctatgtgactgattcagatgtcacaggaagggaacaagacaaaggagagatcataaagctcttgaatcagcaagatcccaatgatgattgtaatagtctctatgttatccncattgtgggaatggaaggcttgngaaagtccactcttgcanagtttgtgttcaatgataagaggattcatgagtgtttccc

SEQ ID NO: 25642 - DNA, 1013 bp, Glycine max
  Clone ID: PAT_MRT3847_123156C.1
ccacgccgtccgcaatattacaaacatttcttctcttcccatatatatcccttcttaatttcttatagccagcgatggatcttttgttcttatgcctccttcccttcttattttactctttctttaccctctacaagttgattcttgaacgtagaggccaaccatgctacatgttggcctacgagtgcttcatgcccccggaagacacgaaactcgacacggactccgcagcaaaaatcgtgctacgaaacaaaaaactgaggttggaggagttaaggtttctcctgaaaaccatcgtgagttctggtattggagagaacacttactgccccagaaccgttctcgaagggagagaagagtgtccaactctcaaggacacgtacgaggagatagacgagatcatgttcgacacactcgacaacctcttcaagaagacaggaatttcaccctccgagatagacttccttgtggtgaacgtgtccttgttctccccagcaccttctctcacagcacgcatcataaacaggtacaagatgagggaaaacatcaaggccttcaaccttgccggaatggggtgcagtgcaagtgttgttgctatcgatgtggtgcaacagcttttcaagacttacaagaactccgttgggattgttgtgagcaccgaggatctcggtgcgcattggtactgtggaagggacaagaagatgatgctctctaactgtctctttcgctctggtggctgctccatgatgtttacaaacaaggcttctctcaagagccgtgcgatattgaagctcaagcacatggagaggactcagtatggtgctgatgacgaggcttacaactgctgcatacaggtggaggatgagttagggtattcaggttttcgactcaccaagagtcttgtgaagagtgctgctcaagccttgacggtgaatcttcaaactatggcgcccaagattctgccactgtgggaaatggtgaggttcttttttgcatctataagggatagtggg

SEQ ID NO: 25643 - DNA, 400 bp, Glycine max
  Clone ID: PAT_MRT3847_123157C.1
gccccatatgcaagcttgacctttataaagcggacgcacgacgctgcggcatagacctaaaactgggtgtgctcaacaaaaatgtaatcggggtactcacgatcccaacacattaaaacataccgatataaatgacacccgcccccttacatcatgaaccgaattctgggaacaaaacactcaagatgactgccaagactacaaactttgttccataaacacgcttcctataaaccaaaacacaaagtcaagaacccaacatttatcgtaaccataaaaaacgactttccacgaagaaccaaaccgcacgattaagttctcttactaggaatccttggtgaccgctgattctgctggagccttattctcacactctttgatgacttcgaccacaactttt

SEQ ID NO: 25644 - DNA, 203 bp, Glycine max
  unsure (1)..(203): unsure at all n locations
  Clone ID: PAT_MRT3847_123158C.1
aacagccccttnnnnacttcccccctcccctctaactcgattcctcagtcctttattccacaggccaggatgtacaacaagccatatgaagggggacacggtgactacgaaaaatacctcgaaggctgaacacggcccaccacnacccccnctcccccccncgggcaaaataacacccaaactttgaaaaaccccttctgaga

SEQ ID NO: 25645 - DNA, 434 bp, Glycine max
  Clone ID: PAT_MRT3847_123159C.1
ggctctggaacctttgggctgatttatgtgcttgtttatgtgcttccatggtcgtccagaagatgatagaagggggagagagagaaaggaaagcggcggtaacggtaatgacggaagagaccttataaagtttagaagtgaagccggggacgtgagcggaggactcccgggatgcctaggacgtatagccgagcctttattgagaagtctaatgtccgccccgaaagtactttcgctctcgtccccttcccggacttcctaaatatagaaaccgagaccaaactagatgttatttcagtagacgtcgccaagacaccggtaggatataatgcccctagtgtgttcgcggcggacgccgaggtgttcgaagatgtcagccggaccgatagacatactggaaccgccgagcccgtcggaaccgccgcacggacccc

SEQ ID NO: 25646 - DNA, 183 bp, Glycine max
  Clone ID: PAT_MRT3847_12315C.1
ggggcctcggctgcctaatgtacgtatagccccgtgacctcgcgagtcggattagacctacgagtcgccttgaagcgcaattcccatcgtgcggcgggtagggccgccctttatttttatatttggagccaaatgacgattttgcaaagcaaagatgtttcctgaaaaaattggaatgtccgt

SEQ ID NO: 25647 - DNA, 407 bp, Glycine max
  Clone ID: PAT_MRT3847_123160C.1
gtattcggttcacgaggaatctatgatgcctcagtgaaacacttgggagtgaagcgcattgaactaacacctcatagtttgcaatctgatgtacaaatgcattccatggcatgcttcttgaatgctcctatgaatactgaatccaattattcaaatggatccacatggatatacttaatatcactttgaatatataacttactcataatgtaattcatatagtataaaagctcatacatgatgacaaaccaccgcacagcacctcaaaattcccaacaaattaacagtgctacctgacggatggaacactactctgttaagtgagcttaagcctgctgcctgccgtgacctggatcactgctaaagtgtcacatactatttgcctacaataatgtgatgcttgcatg

SEQ ID NO: 25648 - DNA, 330 bp, Glycine max
  Clone ID: PAT_MRT3847_123161C.1
agctgctcgcgtgccggtccgaatcgcaattcccggcccagacccacccgttttatgtgggtgctgcatgggagagggaatgtggtgcgcttaatgctgctgcactggaagctggaacacttgaagcaaaacgggttcgtgatacatgtcccctctgtaacatggatgcagcggagagattgactgatgcgtatcaagccgatcgtgagaagagcagcggcactgtcaatgctgatgcattcaactggattacggccaagatccttagatcattttctgacaccaatgtgcgaactgaaccaaacgagactgcactgtgtgagttcttga

SEQ ID NO: 25649 - DNA, 202 bp, Glycine max
  unsure (1)..(202): unsure at all n locations
  Clone ID: PAT_MRT3847_123162C.1
cgggaaccaaatganatgattgagaagagagagcgaagaaaaaaaagagagccaaaccaaaacctttcccngaaaacgggttcgttttgcccttcttcggnaanctcncttctgcgncgctgctgctgctccgggtccgccgtcgggattcttcggtaaaccgaagaacnactgncgatccgtcagaaacctcggatctcgg

SEQ ID NO: 25650 - DNA, 180 bp, Glycine max
  Clone ID: PAT_MRT3847_123163C.1
cccacgcgtccgcccacgcgtccgcccacgcgtccgcggacgcgtgggtccagccaagattgtcggcaagaacattccaaagaattagcatatcttttctcttaacttgtctgtgtatttgttgtgccttccttttagccttttagttgcaagtttatgtatactactattgcttctttc

SEQ ID NO: 25651 - DNA, 468 bp, Glycine max
  Clone ID: PAT_MRT3847_123164C.1
gcccgccctttttttcggccacgcgtccgctgatccgcattgtcgttctaagtggtcttatttgaaaatcactggggcgttggtgcaaatgtctgcttcggtaatcttctctggggacaacaggctcactgcgaaaacaatatttacttgcagagatttggacatcttggttgtttattctacaatagctactaaatttagaaaattcctaccgcattacattaagaggcatctgtatacccttgttgatttacattctcccatctatgctcactgctgaaaataaatgtaagcggcaatctgagtaatatgcatatttccgggtaatttgacgacggcagatacaaatcctggtctaaacacgagaaaaatcttggtttgacagattaggaaaagaatggaagtgattagaaacaaaggcatttcctgctgaagtctttgcaaatcgagctcatgaattttgaaaaa

SEQ ID NO: 25652 - DNA, 1992 bp, Glycine max
  Clone ID: PAT_MRT3847_123165C.1
ggctcgagacctcctccaccacccccagctggtgccaaacctggttcaagaagtccactacatcctcctaagagtggtgtggctcagccgcgacctcagccgaagtatgtttcaaaggtgctacttctcagcgattttttccaacaagtgatggaaggaggatgggtgacattagttcagactatgagagtccatagattcaaaaatttatagtgagaaatggttaaagatgtatctgatcaatgaaggaagtggcatcaaattaaaacaggatcaactcagattaacgcatgtataaaagagactggttctggcaataatgctggggataagaacaatggtcaaaaacagaaacagtcttcctcccaagatccttcaccactgtttatccagatcattgacaaaaagaaagcacaaaatttattgattctgttgcgagcattgaatgtgacaatggaagaagtttgtgatgcactttatgaaggacatgagcttcccccggaattccttcaaaccttgctgaagatggcaccgacatcagatgaagaacttaagcttagactttttagtggtgatctatctcaacttggacctgctgaccgtttcctgaaagccatggttgacattccatttgcatttaagcgaatggaatttctgcttttcatgggctcacttaaagaggagcttgcaaccattatggagtcttttgccattttagaggttgcttgtaaggaactaagaaacagccggctgttcctcaagcttcttgaagctgttctcaaaactggcaaccgaatgaatgatggaacattccgtggtggtgcacaagcatttaaacttgatacacttctgaaattatctgatgtaaaaggaacagatggcaagactacactcttacattttgttgttctagagattatccgctccgagggcataaaagccatccgaaaggcaaaagagagccagagctcgtctagtattaaatcagatggccttcctgatagtacccaagaaacagaagattactaccatgaaattggtcttcaggtggtttcacgcttgagcagtgaacttgagaatgtgaaaaaagcagcagttatagatgctgacagcttaacaggaaccactgccaaacttggctatggtctcataaaaacacgagacttggtaacaaaaaccatgaagaatgtggaggaagatagggggttttttgagacggtgaaaagttttgtgcagaatgctgaggctgatgttacaaagctgctggaagaggagaagaaaataatgactttggtgaagagcactggtgattatttccatgggaatgctgggaaggatgacggcataaggttgttcatagtagtacgagacttcttaataatggtggataaggtatgcaaggaggtgagagatacacggaagaagctggcaaaaactctaaaacaagagactcctagaggagcatcttcatctgaaacacgtccaccacctgattttcgtcagcggctttttccagcaattgctgaaaggaggatggatgacattagttcagacgacgagagtccatagattcaaattgaaagtggtattgagactgttacccttactaacatgacattgtatagcctagagcgtaattgaagacttggatagtgtttggcctggcttttctagaccctaaaaacctactttatgttaagaacaagcttcaattctagttaaacttgcttgataatttttcaatttcttagcttagaagtaacttgtaatttaaaagcttattgatagtgctctcttgggcattggaatttggaatatataagtaggaagagaagcactaaaaattatagtaagtttacctttataataacatttaaggtcaaaaaattatttttaattggttgataatgcaaaagtttactctaaaatgcatgtttattattactgtttctaaagagaagctaattttacattttagggattctgtagaat

SEQ ID NO: 25653 - DNA, 172 bp, Glycine max
  unsure (1)..(172): unsure at all n locations
  Clone ID: PAT_MRT3847_123166C.1
taaatttaaaaattttttttttttttttttggttttggaaattaacagtttctatacgttagccgggaaaaagaacatcagccgtcagtgcatggttattaacattgacgagaaaggggacaagaattaannataaacctgcttccgactgtgtcaataaaacatataaacc

SEQ ID NO: 25654 - DNA, 237 bp, Glycine max
  Clone ID: PAT_MRT3847_123167C.1
tttttggttttttttaccatattatgcgttggaaagcgataatttgaaacccatatttttacttctattactacacactttcttttaatatctctgttacatcactaagtatattacattattctctctttttttcccctcttttgaggagatattgatgaaaaaaatttgttgtggagataacatcactataagaaggccaggggggggaatttcatttcatgtacaaaccaatct

SEQ ID NO: 25655 - DNA, 430 bp, Glycine max
  Clone ID: PAT_MRT3847_123168C.1
atctgagacctcccttctgctcttcatttagacctagtcctcactttgagcccagtcaaatgtcaccttgaactaggattttagacctaatgtttcttatctaggcttcagtcttaaatcttgcagattcacaaccaaaatgagcaccaacacgaacatccattcttgtcactatttcaaaattaccactgcattcacatgtgatctttagtaatatttttttaacacttaataaaaatgttgctaaaatcttttggcaccatttaaaactatcgttaaatataaataaatgttattaatatatttttgtgacattttatcaaattgcgaaaacatattagtgacatttgtttatatttgatgtcattttttaaatgttaggttaaattactcatttggttcttatagttttacgattcttacctttttg

SEQ ID NO: 25656 - DNA, 408 bp, Glycine max
  Clone ID: PAT_MRT3847_123169C.1
acgcgtccgcaaaaattaaataaacatatgttttctattttaattattaataaaaaattgttatcaattaataatttcatcaatatattttatttatattcctatatcttacctataataataaatattcgaccatggtagacttattaattttttatacagttaattacccatacacttaacttaggctatgttcggattgatggtttatgatggaatggaaagggaatgaagtgaaaggaagttaaagttgttccatgatttaatttgtaaaaataagaatgaagcataatggaagacggatgacggtccatttcatagcttaaccccaatttttttccgcttcaatttgggtgtatttgatggaacaaagtttttaaagaaatcgatgtactggttgtatatgga

SEQ ID NO: 25657 - DNA, 345 bp, Glycine max
  Clone ID: PAT_MRT3847_12316C.1
gttcttcttttgtggcacaagaagaagcatgcatcaacaggccgattagttattaagcgcgtattggtctctgtgctgacggtacaccaaacggagataaagatcagttccttctacctgaatctaatgagcttgttaaggacatggactatggggccatcattgtcagaaattctattaaagaagatatggatgcaccacggtttaaagtaggatcttgtatagcataggctagtcccgagaaggaccactatgagcacgagataagtcaactcatgagcatgattagaatgcttcaagacagggtgcgaaggctatgggattaactgcttgagttctgtcgtc

SEQ ID NO: 25658 - DNA, 458 bp, Glycine max
  Clone ID: PAT_MRT3847_123170C.1
ttattgaattattatttgtgaactcgtgttatcaactttaatacctcaattgttattttgaattttggagtataaatgaatattttttaatcaaataatatttgttatatacttatatatatataattttgaattttttaatatatattaagtcaaacgaaatcaattattcatctacccgttaaattacttaaccccaatttactatctcaactagatcactgcccggagaccatgcttcataactttggacaatagtataaatatagttaagaaatgacccttatgttcacccacgcttacctcgcggaggattggagtttgaccatttagtccataagaaatttagatcataagcaactgcaatcatatatcttatattatcttattatagaatacacgcacatgacaaatatatacacatcctttccaaatggggaccaaatgtggttgtcgac

SEQ ID NO: 25659 - DNA, 267 bp, Glycine max
  Clone ID: PAT_MRT3847_123171C.1
ctgttatcttggttacctgtaaaaaacaccaaaccaaaaaaaaacattggcaacaaaccccaattaaaaaaaacaaaacttgcccccacgggggtgacaaggggaacttaaaagccccgtgaaggaagggggagggaccctataacaacaaagggaagtagccccccccaaatggaaggacacaaccaaaaaataagggggcgaatccaaagccttggtacacaaaagcgttaaaaacccaaaactccaagctgggcaggaaaaatt

SEQ ID NO: 25660 - DNA, 171 bp, Glycine max
  Clone ID: PAT_MRT3847_123172C.1
atgttttgttctcggagaccgctcgaaagaaagaagagcggtttacattactgcaagccagactaagtcataatgtccaaggtgtaagaaatttgcaggcagtgttagctgagagtgaataatatagatggggcgttgctcaaggtggaaggtaccaaggaaggaagaaat

SEQ ID NO: 25661 - DNA, 264 bp, Glycine max
  Clone ID: PAT_MRT3847_123173C.1
ggagataagaataatcagttgaaggggttgatggctggtaggttgcctggtgttgggttgctagcatggaagagaacataccagaaccatcgatatgatcactaacaccatgcctcatgccgacaattctatcagctcggagaatcatcattggaaccaccatggatacctctcactgccttagatgaaactgttgtcaaagatagacatatgcttcactagaagcttggacactagttttgctcatacaggtcttgtgagaat

SEQ ID NO: 25662 - DNA, 1100 bp, Glycine max
  Clone ID: PAT_MRT3847_123174C.1
taccgggtcgacccacgccgttcgcgcacacagaaatgcagagtgccctgcgattccatttccaagcttcaaacccaggcatcgttgttccgcacacgaaccacgctttcgccaccaaccttaactcacaccgtaccctctcctgcacaaaacgccgttcccttcccctgtgctccttcaccgcacaaccttcgaaccaaacctccgccgttggatctccatcgcttcaacactggaacctcaccaatcgccacgtcaccgttctcaacgtctttgcctgcgcgacggcgatatgtgcaacgtggctgttttgctccgcgattccgacgctcctggctttcaagaaagcagcggagtcgatggagaagctcatggatgccacgagggaggaacttcccaacaccatggccgcaattcgattatccggcatggaaataagtgacttaaccaccgagctcagtgatataggccaagagattactcaaggtgttagaagctccactcgtgcagttcgcttggcagaggagaggcttcgccgcttgactactgtgccttcttcagcttcgttgcaggggatgacgatcaacccgaaagctgagtatgatgatgatgagcctgcggtggccagaacagcgaggggcgtgagagagggtattgtcaagggtcgtgctacgttgcagatgtttttcaccctcacccgattttcaaggtttgctctaaactttatcactggtcgtagaaaattgtcaagctagcatctcggtttggaatccaacatcattgttctcttctatgttgtttagagtctgtgttaggttttagctgttgggttatgtaatacaaaatatgaacaccactattttcccgtctcaactttctacttgtgctttgatcttctacttgttcattaatggtttggttttgcacttttgctattttctcttattacacattgcaatttgcaatagagacgtttccctgtacatgacccaacggggtctaataatgtgaccaacaatgtgtttaccgatgtctattgacttcatccttgctcttaaaaaaaaaaaaaaaaaactcgagactagttctctctctctctc

SEQ ID NO: 25663 - DNA, 557 bp, Glycine max
  Clone ID: PAT_MRT3847_123175C.1
gacgcacgcgtcaacccacgcgtccgtgttagaccattattttcaaaattcactatgagagcacacaaactcttgttgttttttatacaattctgcttaataaactatagtgccaacatctttccagcaaatggttattttcttggccatcagtgttccattgtcctccatttgaaaaataacctaatattcaactctacaaaatccaaaaagcttaccctttggaaccaaactgaagattgttgccaatggcatggggtgacatgcaacgaggggcgtgttatagcccttgatctcagtgaggagtctatctcgggaggactcgttaattcaagctctcttttcagccttcaatatctacagagcttgaatttggctttcaataacttaagttcggtgattccttcggagttgtacaagctgaataattacgttatttgaacttgtctaatgctggatttgaggggcagaatccagaagaaaattttaactcaaaaaggaggttgtggtattcaaacacgttgatgagaatgcttacagaatcatcccccagcttg

SEQ ID NO: 25664 - DNA, 441 bp, Glycine max
  unsure (1)..(441): unsure at all n locations
  Clone ID: PAT_MRT3847_123176C.1
aaccactgcatatcttgtatttatcattttccatcgtataatatcaccttggaaagaatatttcttgaaaaccaataattgcttttaaatattctctctggttggcatatatcaaccatcatttgacttctattatagatgctttcattgttatattatttattacataacaatgtagaggaatttgggaaatagtcactcaaaacttaattagttaaaattgtaaatatattcctcattaattagttaaaattgtactttgcttttttctatgatttttttttagtttttctcatggtttttgtttttttccttctttttcttggctccttattgagttctttcacttcctttattagtcggntattgaacttcttgttctattgatctcaatttgtatttatcttttctaggcaatgagacagtcagagctatggtcaa

SEQ ID NO: 25665 - DNA, 1211 bp, Glycine max
  Clone ID: PAT_MRT3847_123177C.1
ctttccttcatgcttcggtgagaatgcagttcaggttgcggattcttcatcttcaagcgcgagccaaactgcacagaatctggttatctgcgtttaccaatgccggatatggggtaagtgctgcttcataaccatcacgtggactaagagcttgatggggcaagggcttagcgttgggatcgatgattcgtcttcaaatcagtgtctgtgtaaggtggatatcaaaccctgggtgttctccaagaggaggggttgtaagagccttgaggcttattcttgtaagattgatgtgtattgggacctttccaatgctagattgggtgttggtcctgaacccttggaggggttttatgtaggagtagttgtagatcgccaaatggttctccttcttggagatttgaggaaagaggctttcaagaaatccagtgctattccattaccctctaatgctgtttttgttgccaaaaaagaaacatgtttttggcaaggagatgtttggtaataaggctgtgttttgtgacaatggtcagattcatgatcttgtcatagaatgtgacacctcaggggtgtctgatccgtgccttataattcgcatagatagcaaaaccgtgatgcaggtgaagcggctcaagtggaagtttagggggaatcacaccatcttggtggatggacttgcagtggaagttttctgggatgtctataattggctttttggtacatcccttggaaatgctgtctttatgttcagaacatgcatctccgaggaaaaattgtgggttggtcaacccctttctgatgcaaatgtggtgcagtggtccttctctcagaggttttctgagaccaagtcgcaaggtctcggcttctcacagattttatacgcgtggaagaacgactagagttgtggaaatccaccatactaacagaccttttagtgagttgtgattttacccaggatctgattgttttactacacttgattaaagatgagtacttttgcttgtatcgcttctacccttaaaattcataccctcaatatatctgtgcatttgaacagatcatgagcattattttttaaacaattggctgtatatttatcctcaagtgttaattttatgatatccatattacaaaaaactagtctacagtccgttgtgttattcaagtacatattctcttaatttctttcatcagtaatatatacctgctattcc

SEQ ID NO: 25666 - DNA, 501 bp, Glycine max
  Clone ID: PAT_MRT3847_123178C.1
gactactccgcccagctaccatcgattagcggatatgtcaacatagatacatgtatggcgtgcctctgttgggcgaggcatacgcgctagctgaccttgccgaacacttcagaacccaccctgtagaaaacttgagtatcaacaatgtcagccttctacagagaatactctgtctctctctggtatccaactccgcagcagcggttacctccagagctgtctctcaggtgcatgagagactcggacgttgcgtatccctataccagatcattcgaacagaagacggacggtacttgcttgcgtaggcaatcggacttctgcgagcttagaatcctctgtcctttatttatgagtgagatcatacgcattagtcttgactagcgctgacggtgactctttttcacaatgcgtgcttgtagcactatacatgttgtggtgatctttgagtagaggacagagaaatagtgacatcggaagagagagggatattgtagctaaaac

SEQ ID NO: 25667 - DNA, 179 bp, Glycine max
  Clone ID: PAT_MRT3847_123179C.1
caagcatccacacaaacactttcacgtcgcacgggcgctgcacacagtgagccgcagcgtcggcaccaatggcttactaccaggaggtggactactgctcggaagaagtgaagtcggtggccccggacggcttcggccggcacggaagcggcgtccagcaacacgtcgtcaaagagaag

SEQ ID NO: 25668 - DNA, 1577 bp, Glycine max
  Clone ID: PAT_MRT3847_12317C.1
aattcggctcgaggttgctgtatttggtgtcgactgtgcatcaggagatacttttactgacggttcagttaaatacacaatgacttctatgaatgttcctgagccagtgatgtcattagctgtacagccagtctctaaagattctggagggcaattttcaaaagctttgaatcgcttccaaaaagaagatcctacttttcgtgttggcttggacccggagagtgggcagacaatcatttctggaatgggggaactgcatttagatatctatgttgaacgcattaggagagagtataaggttgatgcttcagttggaaaaccccgtgttaacttcagagaaactgttactcaacgtgctgattttgactatttgcataagaagcaaagtggaggacaaggtcaatatggacgggtaattgggtatattgaaccacttcctgcagggtcatcaactaagtttgcatttgaaaacttgcttgtgggtcaagctattccatcaaattttatccctgcaattgagaaaggtttcaaagaagctgccaactctggtgccttaattggacatccagttgaaaatcttcgagttgtcttgacagatggtgctgcccatgctgttgattccagtgaacttgcgtttaagttggcttctatctatgcttttagacagtgttatgcagcttccagaccggttatattagaacctgttatgcttgttgagctgaaagtaccaacagaatttcagggagctgttgctggtgacatcaacaagagaaaaggtgtgattgttggaaatgatcaggaaggagatgattctgttattactgctcatgtccctcttaacaatatgtttggatactctacagctcttcgctcaatgacacagggcaaaggtgaattcaccatggaatacaaggaacatttaccagtttctcatgatgtacagacgcaactgataaacacgtacaagggaaataaggaaggtgaataatcagcttttgtcgaagtacatgataaaaaaattttatgacaatcacttactaaaagaaaaaaagttgtgacaataatataggatataggcttgaattgattcattttattaggcctaccaattttggaaagcaaataaaagttgctgtaattgtgaattgtgataatatggtttacggataatttatttaggtcgggtagttaaatggttctgggtcccaagtgtaagttacacatgctcgtacttgtcgatgaagatgactcttagattggtgattaagagctcttcggtatgtaattttatgttcattacggtacctgctacgtgtcttttatgaaatttatgattattataaattatttttctacagtttatatgtttttctcactcttttaaacaagcagagggaaatttcatttcagtcttctattcattcactttaaatgttgtttcttatatttcatctcattgcgttagcttgtatattagaaacggaccattattaagacaattgttaaacactttaaacatccattcgtttaggggtgtttgttcccacggataatttttttggtttaagggatttttt

SEQ ID NO: 25669 - DNA, 391 bp, Glycine max
  Clone ID: PAT_MRT3847_123180C.1
acacggggcccgggggggaacccggaaaaccggaaccggacccgaaaaggctaccaattttcctaatggggaacaaaattaaaaccgggcggaaacagggaaaaaccggggcccacggggaaaaaaggaatccgttccaaaaaccaaacaacccaaaagctggaagcaaaaagtccaaagcccggggggcctaaggaaacacccacaccccataaaggggggggggcccactgccccgtttaaaaacgaaaaaccccccgtgccacatgaaataaaaaaacggcccacccccggggggaaggggttttgctcaatgagcccccaggtggtttttttttttcacacaggggaaacgggggaaaatggcaaatggcgcccccccccccccccg

SEQ ID NO: 25670 - DNA, 426 bp, Glycine max
  Clone ID: PAT_MRT3847_123181C.1
aaccaaaaaggccccttacctccaatgggggggtttggaaaaaaaaaaaacgggggacaatagttttggttgggggaaaaacgaaattcctattttataggagcatttggcaatatcattttgggaactaaaccccccctttcataaaatcatttttttggcatcaacccgcccgttttgaaattaaagcaacatttggggaaaataattggttgaaaaatttgaatcggggggaggggaacatttttttggggccgataaacgagcgggggcaaggagatttattttgggtttaaaaaccgggtggaaaaaaccttttacccctgggatgggtggcccgaaaaaaattatggggggtgaaaacttcaacaatttcaccatcaacaagcgggcgccctttgggagccaccctttggatttgcttga

SEQ ID NO: 25671 - DNA, 1106 bp, Glycine max
  Clone ID: PAT_MRT3847_123182C.1
gaaactttgttcattctgttgtcagtctccatctgcccaactccccagccccacccctttatttgcatgtcctattaaatgaaaccgaaacaaaccaaaaacaaaaatgtgagctaattgatctatagtcaaacatttttattcttcaagtgttattctttgtaggctgtttacaatgttatttgttatgatgataatccacggttgagaactggcatggaacttttaaggaccacaaaagaaattgagtcgcaagtacacaaggtctcagcgccattattgattcttcatggagcagaagataaggtgactgatccattagtgagcaaatttctttatgagagagcatctagcaaagataagactttaaagctctatgaaggtggttaccactgcattttggaaggggaacctgatgacagaatatttgctgtacatgatgacattgtctcgtggcttgattttaggtgttcaattaaatgaggtctatccatgggtaattggccccatcttcctggcctctctcattcttagagtcaatatatttttcaggattaaatatatttttggtacttataaaatttcagatttttagttttagttcttataaactttttgtctgttgcctttttttttgtcatcaatatctcccttagagggacaaaaatgggcaaaatttcatttccctgaaattgatgttgatgacaaaaaaataaacaagagattaaaaatatagggattaaaaccagaaattagaaattttataggaaccaaatttatatttaactatctaaactttatatatgcagtattccttatatatatatatatatatataaggaatactgcatctaaacttattaaatgaaaaataagtgtgaaaattgaaaatggatcttaattagttctctagtccaaaattatgtaattcatccaaataaattccaactcatagctgtatcttgagtataaagtgttggatcattgtgccccccaaattattgtctttaagttgggtagagaacgagagggcgcgcgcggggtagtgagctgggcgacccgggaattagggtccggaccggtacgtggaggggtaccagctttcc

SEQ ID NO: 25672 - DNA, 357 bp, Glycine max
  Clone ID: PAT_MRT3847_123183C.1
caatgggaacacgcaagtttaaccaatagagggctgcatcacaaacagacagatgcaatagcacaacagagatctgacacatgttgtcaagaaacacctctttggcttttccgtgcaaatttcacccacagtgtggccagttcatttgcctcagatcctgatccaatcctatacctcagcatactaaacacaatatttggtgccagcaaaacagcacataacatggactacattcgctcatgcacgaactcctccgacgtcatcactgacgactttgtcgtctcacgacgcatacaatcctcatagaacttctcacacacacggctaactgtgggcccagcaaaaccatacaacttt

SEQ ID NO: 25673 - DNA, 2313 bp, Glycine max
  Clone ID: PAT_MRT3847_123184C.1
ctctcacttctcgggttgatttcacaattaggctgagaaaacctcactactctgaaagctccaatttggaggaggcgtcgcctgaagagtcctctctccgccttcgtccgtcgtcgtcgatcatcgcttatgactgtaccgtctctctgtttctgtctctggtttattcgattcgattcgattctgtgaatccattgaaatatagaattctctctctctctctctctctctctttgattatcgctgattttgattgacggcctcgctctgtgtaaggtttttgcatctcaaactcgatttttttttggacgcaaacgatagtgtttgtgaatgataatgacgatgatggaattgaaatttctgaccagtgttgaattgcctgatgtatgtgtttttgaaaataaacggagaatctgcatggaaatgatagttaaagtgtaatagattatgaggaagaagctgaggtttgatgaattgattaagggaattggagtagagttaggtacttgttatgatacattaagtgcaaattgttgggcaacaacattctattcctttgcctggtcagctccagccacatcagcagcttctatctcaaaatgttcaaaataatgttgcgtcgcaacctaaccttccacctgtatctagtctagcccagactcccagccaaaatattgtccagaactccaatatacaaaatataactgggccaaattcagttgggaccactattagccaaaattccaacttacagaatatgtttcctggttctcagagacaaatgccaggaaggcagcagattgttcccccacagaattcacagcaatatctttaccaacagcagtttaagcagaagctccagcttcaatctcagatgcagcagcaacaacaaaaccttctgcaaccaaatcagttgcaatcttctcagcaatctattatgcaaacttcatctgttatgcagccatccatgatgcaaacatcttctctatctagcataccacagaacctgcagtctttgaatgttcaacagccaatgcagtccatgccacagcagcattcacaagtgattacctacggaaaatatctttgaagatgcttacaatggagactaaatcccaaaacaccttggctaacaatatgccaccaaatcaagttggccctagccataaacctcctgatcaagtctcaagttcataatcttgggcaacaacattctattcctttgcctggtcagctccagccacatcagcagcttctatctcaaaatgttcaaaataatgttgcgtcgcaacctaaccttccacctgtatctagtctagcccagactcccagccaaaatattgtacagaactccaatatacaaaatataactgggccaaattcagttgggaccactattagccaaaattccaacttacagaatatgtttcctggttctcagagacaaatgccaggaaggcagcagattgttcccccacagaattcacagcaatatctttaccaacagcagtttaagcagaagctccagcttcaatctcagatgcagcagcaacaacaaaaccttctgcaaccaaatcagttgcaatcttctcagcaatctattatgcaaacttcatctgttatgcagccatccatgatgcaaacatcttctctatctagcataccacagaatcagcagtctactaatgttcaacagccaatgcagtccatgccacagcagcattcacaagttatcaggcatcagcaacaaacagcagtcactcatcagccaagcttaccttcacaacagcaacaacaacttatggggcatcagccaaatacaacaaacatgcaacatgcacagatgcttgggcaacagaacaatgttggtgatatacagcaacgaaagtaagtcaatttcccttcaccggtaaggttggaataacaatatttgttgaaattttaagtcgctttaacttagaaatgtggttctcgcaagtgttgatttaccttcctttgacaattaatataatatttaagattgccaatgaatgagaaacacgagcaaagtaagtacaaatacttcatcaggaaggctacagtacgtggaatgaacaaaaaaaagtgaagtttgttttgcatgttgagccttactttcgttttgattgttttattaattgaaagatttctttgaccagaagaaaaggtacaatatgtaacctctcccacttcttttttgattcatatgtaacctcccatttgcttttaaataatgtataaggatgcttgttgcctataattctcgtaattaaagggcccgttatttcatgtcat

SEQ ID NO: 25674 - DNA, 144 bp, Glycine max
  Clone ID: PAT_MRT3847_123185C.1
aagatgacatccctttcctattggctcaaaagaaaaaagtatagacccttgttttttactagagtacttgtgattagagagtgttgacaaaggagccgcgtactctaatattacgagttattaggatgcaaaccacattttatc

SEQ ID NO: 25675 - DNA, 480 bp, Glycine max
  Clone ID: PAT_MRT3847_123186C.1
tctcctaatttgcgggcggcctttctttttgttttttttttttctctttgccccccccccctctgtttacttcagacctggttctgcaaaacacccacactgcacgggctcttcttctttgattaatcattaaaaaaaatctcacctacggtcaaccacctgaatgggtccaactacatctttcgcctaacataataaaacagtcctctctcagaatcgctaacgtaatgcttctttaacctactagtgcacccagatttccctgatcagacgacgtcaatccaattctttcttgctgtatgacaatgctaaagcatcgcgcccgatggatcggatggccacactaatccttaaaaatttccacgggaaactgccagcacccttcgaatgcatagtcagccatggaatattttctcacaatccggatcaaacactctcctgatttaggaactctctatctcactcggttattctaaattg

SEQ ID NO: 25676 - DNA, 497 bp, Glycine max
  Clone ID: PAT_MRT3847_123187C.1
ttcgtccggtaagtttcaaatcatcacttttgaagagttcattaccatagcactggatgcacccagagttgttggaatatatccagagataaaaaatccagtatttatcaatcaacatgtgagtatttctttctagaatccaacaaatgtacatgttaggagaggggggatttgtagcaacaaagataagttgttccaaaaggcatacctgttgatatataattcatctaactgaagaatacattagaatccaccattcttattgtacatatgtatttgatggttagtgctggactgctcgtggtattgcacactcaatgaaataaattcccatctttaaattaatgctaatgagtattacaggaggtgagattatgttgctggaagtttataagggtgcaaattgcattaagaattcttctaccctgttagaatggtttatgaaaaatcttacaatttcatgcttgataatttgtcctaatagtaatatgttttag

SEQ ID NO: 25677 - DNA, 411 bp, Glycine max
  Clone ID: PAT_MRT3847_123188C.1
ggaattcggcacgagggagtgataggatttatgttttccgtatctataatgggcatttcccaaattcagataaagagttgtctctaaaagtggagataaatatgaataattttaagtgttactgcaagttggtttcaatatctttctcacgaaggacttggatgttgtaattaatttcttttaaggatgaaataaatgtgttgtgatcagccaaaaatatgtagttttattagttgtctattcatggaacttcaattttggtttatcttcatttttaaaatattttgatcaagttttgcctcgattttttacatgtactaaatgtgttcaggattgtatatgctaaattcatcttgtagttctatgcattggtgcatgcgtacttgttttagctcatggtttatcaattat

SEQ ID NO: 25678 - DNA, 1693 bp, Glycine max
  Clone ID: PAT_MRT3847_123189C.1
gaaaatacaattacattgcatacctatagttctttcggccaggtttcctttttttgcaataagcctcaaacttccatggttgaagctcatgaattttgcaaggttttacgacttgataagaaatcctttactgaaatactgaagatatactttttagatggtcgtattgtcttgaacaatctccttgaggtaaaagacttgagtctacaacgtaagcttttggagtcagatttcaacctgactattggtaacatggaaacagagctggcaataaggatgaattttgctgcccatgatggtcatcttgatcttgtgaaacgtttgattggatttggggcagatcccaataagactgattacgatggcagaacacccttgcatatctcagcatcaaaaggatatgtagatatttcttcctatcttgttgagcaaggtgtaaatatcaactgtgcagataaatttggcaccactcccttgcttgaatgcatcaagaatggacacgaaagaagtagcatctatacttgttaacgcaggagctatctttaccattgatgatgttggcaattttctctgcatgactgttgccaggttgctctcgggcctctttcgcagggtcctgggtcgtggggtccatccatttcccaaaaattatgatcaacgtacacctcttcacatagctgcctctgaaggtttgtttacaatggcggaagtacttctagaagcaggagcgagtgttttatctaaggacagatggggaaatacacctcttcatgaagctcataccggtggggatagaaatatgatcaaaatgcttgaagtggcaaaagcttctcagttggttgagttgtccaataatattcatgaaactcaaggtatctatcttatgtttgcaacaccaacagatgaaggctcgagaaagagatgtatagtatttcctttccacccatgggatgatcagaaagcggatagaaaagagggagtggtcctaacggttccacaaagcattgaagagcttataaaggaggcgacaaaacatttggaaattccaaacgcttcctgtattttgtcagaacaatgtggcaaaattgtttatgtaggcacgattaacaatgatgagaagctatttctagtgagtgaagcacagaatgaatgaggtgaaatgttcagcagtaccaacaccactagctggttaatatactttttctttactccacaaatttttccattccagataagaacaatttttatatgtttgcagttattgtcaattagtactaataaacatcctctcatcactctttcaaccatggtacatgtcaacggatccaagttggtgacagggtatgtgaagttgactttgcaaaaacacctttctttctatgctatctcgatcgtagtcataatcccagtgcacaaggtcattcattgactacacctgccggttctttctcagtcttctccacccaatgttagaataaagggttgctttgtgggatgaatgagtaggatattggtggattgatctttgtcttcgaggtggagcttaattgtataaatatcatttttcctctttaattaagctagctagttttctcacgtgcttcaatcgcatgttccaaagtcgtaagaaccaagtattacattgttaataataataataaaaagtcacaagaacttttatcgtaaaaaaata

SEQ ID NO: 25679 - DNA, 285 bp, Glycine max
  Clone ID: PAT_MRT3847_12318C.1
ctgttttgtagtctttatttacgactcctttcatttttcgtactcaatgattgcaattcatcgttttgggtactgtttgaggtttaaacgttttgaaagtttggatctttaatctactggttttgtttccgtcacggatgtcttcagaatctggtccttgctcactagttagaatttgagtggggtaaattagaactgttccggtttgtggaattgctcatcaatatcacattcccataagttgggatctgtttcttctaaagtcaacacttgctttataggata

SEQ ID NO: 25680 - DNA, 426 bp, Glycine max
  unsure (1)..(426): unsure at all n locations
  Clone ID: PAT_MRT3847_123190C.1
ttaactctcttttctagaagaatcagaagcagttttcgtttaacttacagtatccagtgcctggttagaacatgactacgacaataattatgtcgcctgttgttcattattctgatctcattgttcccatttatggtcttatctaagttcaaccagatactattgttcatatcagaagagtgattgctgtattaaggtgcctttctagagctcccaggttgacaagcttggattgcgggtcaagtattagatgttgtatgagatatgaggccaaagttgctgagttgttaccaaaaaattctgcttgtaagaatgtggaactctaatggaggaatgcataatgtttgcaattgctcatgcatatcaatntgattcactgctaactnttcatgattagctatctgacttttccaggttcatgacact

SEQ ID NO: 25681 - DNA, 447 bp, Glycine max
  unsure (1)..(447): unsure at all n locations
  Clone ID: PAT_MRT3847_123191C.1
gttggaacctttgggctgatttatgtgcttgtttatgtgcttgtttatgtgcntgtttatgtgcttgtttatgtgcttgcatggtcgtgagaagatgatagaagggtattcagcgaagaagacatttttgaggtaaacgttaaacacgatataatcatggtagactaggctatccactagctcgtccagggcaataactcaaggccataccataccgaccatgttaggtcacggagttaccgccgcgctttcgacccgcataggaaccggagaggtcactaaccaggcggaaacgtcagttaaaacacgggaccaaatcactttccgaaattacggcgtcgtacgcacctctaagactacccccgttagtagcacgaggaattttgcacatacttactcgaagtaccagtacctccccccgcacagttacgccgaaaggaaaaagtc

SEQ ID NO: 25682 - DNA, 247 bp, Glycine max
  Clone ID: PAT_MRT3847_123192C.1
atccaaacgtcttgcaataacctatggagccctagccgttcgtcgtcactatcgccaatgtcgccacctctcatggtcacaggtgtcgtcctccctcttcgttgtcctcttcgacgtgccctctctgccatttccccatcgccggcgccataggttcttacaaggaacatagattgcatggtgttttcactgatgaccattcaaagaagctagataaagatatagcaggcacatggctacactacca

SEQ ID NO: 25683 - DNA, 285 bp, Glycine max
  unsure (1)..(285): unsure at all n locations
  Clone ID: PAT_MRT3847_123193C.1
ataaaaagaactgnnggggggagaagggaccaattggccaacttttgcttttcccaaaaaccaaaatggggtaggggaaaaatttccgggggcaagactcccgcgataactttttttgaaacaaaagttgaaaaaaaaatgttttaaaaaaagaaaaattggcctaaagcctacccgggtaaaacatccaatcctttcttttaaaatgcctaaaaatggtttgggctcgggcctttttaaaaacaatcaaattaaaacactgggggcccattttttttataaaaa

SEQ ID NO: 25684 - DNA, 305 bp, Glycine max
  Clone ID: PAT_MRT3847_123194C.1
ggacgtgcaaagaaaaaattgttttttaactcaggatttaatctgaagcatttacccccctggttaccaaattacaagtttccttcccttccccctcattgcatttttgcaagggaaggcacgtcatattttggttttgacccatgtttttcataaaaaccctgttgtttttcgagaaaaaaattttataaaaacaacttttaagagacctaatcaaaactgggtgagagatccttatgggtacttttctggcttccataaaaaattcattggcttgggtttcttgaaaatggcaaacctaaatt

SEQ ID NO: 25685 - DNA, 539 bp, Glycine max
  unsure (1)..(539): unsure at all n locations
  Clone ID: PAT_MRT3847_123195C.1
atagacaatgcaatcggggcagctctgtagtataacagaatagaagaatcctccaccgaagatgttataggatgttacagaaaataaatctgaagaacttattttacattcaatatagagatgccaactcgaaaagctctttgtatttatttgatacataagatttcaccttcataatcggttttccatcacttcctggtgaaatacacttcaccccaatgacagtagccaaactttggtgtacgcgaccatacaccggtctttctcctttccagtattccaatggccttgttctgatcctggtgcttctccttaatccaaaagtccatgatgtaccagcagctgcaaggctctgcctattcgaaaggtttttatttttggacactttctgcacacgtgacttaactctctttttgtccattaacagccaccacagaaccatctgtcttttcctgtaaacaatgtnctggatcatcatctgatgttctagcacgtttatccacagcattagcttcatatcctagtgaaattgagtacat

SEQ ID NO: 25686 - DNA, 340 bp, Glycine max
  Clone ID: PAT_MRT3847_123196C.1
ttgtttttttttttttttttttttttttatcttttcatgatcagacatctaaataaccctattaaggcaccaatggacattaaaagtgcgttacttattgattaagtggataggctcgaacagcgaatcgagacgactatattggggttggggcgaatcacaagaggtatgtaacaactgggatccctttaacaaccatatcctaagtgtaactacccataccctacctggatgcttgatgaaactgattagcatccgagggaactggattctcgagccgaatggcgaacgtaatttggcgatgctgccaagccataggtttcttaaagggttgcctaaa

SEQ ID NO: 25687 - DNA, 394 bp, Glycine max
  Clone ID: PAT_MRT3847_123197C.1
ccggaaaaaaacccccgggccgacgagcatcacaaccgcggcgggccgacccaaaaaaggggggggccatagaaacaaaagttagcgcgcgccataccacaaaccaaaaaagagcagaacaaaggaaaaaccagcaaaccaaaaggggcccacccaaggagcccccggaaagcccaaaaaaagaaccaaacaccccaaaaaaaaggaacccggaccctaatagcccaagaaacaaagaaaaaaaccccaccccagtggaaacaaagaggggccaactggtggggccaaaaaacccccaaaaaaagggaaaaaaaaccccggggcaactaaaacccggcgaaaaaaaaggggaggcccccccggagataggaaaaaaaagccgggccccggcccg

SEQ ID NO: 25688 - DNA, 1918 bp, Glycine max
  Clone ID: PAT_MRT3847_123198C.1
attcggctctttggaagaagaagaaaatggaggaggaacaaaacggcggtcgtttcgacctcataatcctgggcgcctcaggcttcacaggcaaatacgtcctccgcgaagccctcaaattcctcaacaccccatcctcccccctcaaatccatagccatagcgggccgaagcccacaaaaactaacccaggcccttcagtgggcctccaggcccaaccctcccccctccctccccatcctcaccgcggacaccgccgacccctcctccctccgttccctctgcgcccgcacgggcctcctcctcaactgcgtgggccccttccgtggaagtgtggaagtagaagaaaatggcagagcagcaaagtagaagtttcgatgtggtaatcctaggagcctcaggtctcaccagcaatcatgtcctcaaacaagtccttcaattcctcaccacccttttcactcgcctctctgggccagccccaacgggccgtgtccccatcacccttatagaaaccctagaatgccactccccgcccaatgctcccccctgtctccccatccgccaattgatcatcatgaaaaatccaccccaactggccctttgcgatcattccgtgcaaaacgtcagcctcgtgaaccatttccacgctccatggcgaagtccgtcgtggctgcgtgcgacgcgcgcggctgcgactacctcgacatcacaggcgagcccgagttcatggagcgcgtggagggtgagcaccacgcggaggcagcggagataggtgcttttgtggtatcggcgtgtggggtggacatcggttcccgcggagatgggcgtcattttgcagtccaggcagtggttaggcccgtccgggcccaaccgggttggggcgtacctgaggttagactcggagaatagaattgtggggaactttgggacgttcgagtctgcggttatcggtgttgccaatgcgcaccagttgcaggaactcagaaggtcacgcccaagaaaacctaggcctcagattcctggacctcctacttcaaaaggagaaactatagagaacaacaagaaaattggtctttgggcagtgaagttaccttcagcagattcaattgtagttcgacgaacgctagggattctaacagaaaacctccatggtctccctgggctgaacgagagtgctgagacagttgagaaaagggaagccttctggtcatctgtgaagccagctcattttggtgtgaaaataggctcaaaatctttcttgggcattctccgaatcatcatggttggagttttcattggtctttttggaagtattggttttggaaggcagcttcttttgaaatttcctgaaatattcagccttggttggttcaggaagaatggcccctctgaagaggaggtggaaagtgcttccttcaagatgtggtttgttggacatggttatagtgatgggagcattgcttcacagggaaacacaaaacctgacatggagattgtaacaagggttatgggacctgaagttggatatctgaccacaccaataattcttattcagtgtgctcttgttcttctctgccaacgtgacaaccttccaaaaggaggagtttaccctcctgggatcatctttggtccaactgatctccaggaaagacttcaacaaaatggaatatcctttgatgtcatctcaaaaagcaccatttcttgacttttgcagtttagtagaaacaagtactgttcataaaactgaattattataaatgagtggggatagactatttcttttgtttaactaagttttataaggatatactaagatttggcttgatatgcgtttggatcaatgaatcatatttttttctgctaaaaaaaactcgagcccatggaaaaatatttgttagaaaattagcctcatgatttca

SEQ ID NO: 25689 - DNA, 310 bp, Glycine max
  Clone ID: PAT_MRT3847_123199C.1
aaaggttctggcctcaaattacttgaactaattgtaattctgagggcaacccaaacttaaaccgaaaaaataataatgggttgaatttttgacgtgaaaagggaggctgagaaggggatgtgattcatcgaccttttacattggggtcacgggtccacctcaaccagcttaaactggaagactaattatttttttggttttaaatgagaagggggcacgggaaccaattccaacaaaaaaattgatggcggaaactttgatgctttaaccatcatcctcttgaccaagacaaattagccaaattgctctt

SEQ ID NO: 25690 - DNA, 286 bp, Glycine max
  Clone ID: PAT_MRT3847_12319C.1
gatcgtgtccctttctgttctcttctctcttgctctcgcgagcgatatccatgccaaacaccactatttttctcttgctgtttgccctctcactcccattccatcttctttgcgagatcttctcacgcctgcccctgtccgtgttgctttctgtgctctccctatgcctctgtatgagtctctgtacccgttatccttcttctataatgatgaccttcgtccatccataacactgcttgtacactttccctcgcctccctgtcagcatccatgtggtgctggttca

SEQ ID NO: 25691 - DNA, 125 bp, Glycine max
  Clone ID: PAT_MRT3847_1231C.1
ggctcgaggcccacaccacaattttcttattccacttttgcttcatgttaattacatcgcgtgtctttggtgcagtagcataactgtgtcaactttactcacgaagatacttaccctgcatccca

SEQ ID NO: 25692 - DNA, 586 bp, Glycine max
  Clone ID: PAT_MRT3847_123200C.1
aacagattgctcttgcaatttcttcaccaacttccatgtgggtttcttgggttactggggatgcacagattggcctcaacgtgaccccagtagatcctgcatctgttggaagtgaggtgtggtatgggaaaaagagtggaagtacacaagtgttgggaaaggtgattctgttgtttacagtcagttgtatcccttcgaaggcctgtggaattacacctctggcatcattcaccatgtgaaactcaaaggtcttgaacctggaaccagatattattacaaatgtggggatagttctattccagccatgagccaagagcattattttgagacttttccaaaacctagtccaaataattatccagctcgaatagcagttattggagatttaggtctcacaagcaattctacatcaactattgatcatctaaattacaatgatccttcaatgattctaatggttggagatttaacatatgcgaatcagtatcttacaactggtggaaagggagcttcatgttattcatgtgcatttccagatgctcctattagagagacatatcaaccccgatgggatgggtggggaagg

SEQ ID NO: 25693 - DNA, 188 bp, Glycine max
  Clone ID: PAT_MRT3847_123201C.1
taccgattctcaattcgcgggacgacccacgcctgcttacagatgacgacgacaacggaggggggcgattaattactagcaatgagcaatagggttggtttgttacctattccgttaggaactgctcattttttggttcatcatattcatgcatttaccatacatgttacaggattgatactcctcaa

SEQ ID NO: 25694 - DNA, 623 bp, Glycine max
  Clone ID: PAT_MRT3847_123202C.1
cccacgcgtccgcgcaaacaaaatcaagtagtaagagcgagaagagagaagaagaaagggagagagataatgcagtgttatggcttaaccgtaccgggaagcgtgcccaccgtatctccagtgttcttgaggcccaacaggcccattatcgcgacccgaatcgcgtttcccaaggcgaccctgaataagaaccagggcttcgtggtggagctgagcttctacgagcttctgggcatacccgaatcggtttcggtaacggagatcaagaacgcctacaagcaactcgcccgaaagtaccaccctgacgtgtcgccaccgggtcgggtcgaagagtacaccaagaggtttattcaggtgcaggaggcctacgaaaccttatctgatccttcccgaagagctatgtacgataaggacatggccaggggcattaacttggccttcaacgctcgtcgacgctataattatcacgatcaggtggttgaacaaaaaagtgaatggaaagtcaggtggaaatctcaactgtcagagctgaagagaagaagtaacagcaaggatgttggagggaatatgtcatgggcagcacgaatgcgccagcagagggatgatttgcaaatgaatcatga

SEQ ID NO: 25695 - DNA, 253 bp, Glycine max
  Clone ID: PAT_MRT3847_123203C.1
cttcctagggctgttttttgcaccccttttcctcttccctaaggggcttgctccttcctacaacccaattaaaaaccccccattttacaaccctccattgtccaaccccccattgtccaaccccccggtttttaacccaaaacccccggtttacaacccaaaaccccctttttacaaccccccttttaaaaaccccccttccaaaaaacccccttttggaaaatgccctccagtgaaaaacaacccccatccc

SEQ ID NO: 25696 - DNA, 331 bp, Glycine max
  Clone ID: PAT_MRT3847_123204C.1
gaagcttgtctcttgggatgacatccactggggatacagttcacgtaccattgacctgcttgtaaccgttgccaagaagtctgtttaattaatgtggttcgaacattaagtgtcggtcaagctgcgatttattatcgtgcacatggaaatattgcgaagtctgaataaattggtttccggaacgagtgttgtcactcagtcatcaacagtacacccggttcttgttgcctcatccgtgtcagggatggacttttttggagtcctagacacgtgcagatgtagtcagggtttattgaatcagatagcagatatttgctctcaatatatcacc

SEQ ID NO: 25697 - DNA, 263 bp, Glycine max
  Clone ID: PAT_MRT3847_123205C.1
cccagtaaaactacaatctcgaactcgttaatcgttgggatttgcaaaataatgttctcaaagagagaaattagtctcacacgttgacaactaaatggaactacaatctcttcctcttctctatggcgcttgaaaatcctagcagaacaatcaaaagaaaaatttgaggagtctcacggaatcgctagagataccgctattacaatcagacttaactcgtgagccctcttagaggtaagagatgagtttatcgcaattgggat

SEQ ID NO: 25698 - DNA, 1899 bp, Glycine max
  Clone ID: PAT_MRT3847_123206C.1
acttctcttaacttcccttgttattatcactctcccccgtttaggtccacacctccatcggacccacccaccaccgccctcaaccacctcctttccgcggcccgccgctccgaccggcgggcctccgccctcccctccctccgatccctctccgcctccaccgccgtggcccccgcctcctcctcccctcccgcccctcctccccccaccgccatgatctatgaccgcgctgccgaggccgtgaagtccaagctccggctgctcgataacccggacccccgcttcctcaagcacgggtccccccggccgaccctctcggaccacacgcgcatcctctccgcccccgagacgcgcgtgaccacgctccccaacggcctccgcatcgccaccgagtccaccctcagcgcccgcaccgccaccgtcggcgtctggatcgacgccgggtctcggttcgagaccgaggagactaacggcaccgcgcacttcctcgagcacatgatcttcaagggcaccgagaggcgcaacgcgcgtgagctcgaggaagagatcgagaacatgggaggacacctcaacgcctacacctccagggagcagaccacctattatgccaaggtcaccgacaaggatgtcccccaggcccttgacatcctcgccgacatcctccagaactcccgattcgaggaaaaccgcatcagccgcgagcgcgaagtcattctccgggagatggaggaggttgagggtcaaacggaggaagtgatctttgatcacctacacgccactgctttccagtacactcctcttggaagaacaattcttggtcctgctcagaatattatgacaatcactaaagcccatttgcagagctacattcagacacattatgcggctcctaggatggtgatagctgcatctggagctgtcaagcatgaagacattgttgaacaagtgaaaaagttgtttaccaagttgtcaacggatcccactaccacatctcaattagttgctaaagagccagctatttttactggttctgaggttagaatgcttgatgatgatattcccctagcacaatatgctgtggcttttgaaggggcatcttggaaggatcccgattcaattcctctcatggtcatgcaagctattttgggttcttggaataagacagcaggaggtggaaaacacatgggttcggagttagcacagcgagttggcattaatgaagttgcagaaagcatgatggccttcaacaccaattacaaggatacaggtctttttggtgtttatgctgttgctaacaatgattgtttggatgacttaagctatgcaataatgtacgagacaaccaagttggcttatcgggtttcagaagatgatgtcacacgtgcttgtaatcagttgaaatcttcactcctgctccacatagatggaacaagtccagtagctgaagatattgggcgtcagctactcacctacggcagaagaatcccatttgcagaattgtttgctagaattgacgctgttgatgcaagcacaataaaacgtgttgctaaccgatttatttatgacaaggatattgcaattgctgctatgggacctattcagcgtttgcctgattacaactggttcaggcgcagaacctactggaaccgctactagttttcatcgatatttttttatgcttcatctcaatttcatggagaatttggccaagcaagtgatttattcaaattttcatcttgtatgtctccggatagctgccccgaccttcattttttatttatttggtacaggtctgtttttgtaacacttatacagaaataaataagctgttatcagtggtgtaattatgcttgactcgtatcacttgttgaaagttttagtgtgttttttttccatttc

SEQ ID NO: 25699 - DNA, 1156 bp, Glycine max
  unsure (1)..(1156): unsure at all n locations
  Clone ID: PAT_MRT3847_123207C.1
accggtccgnattcccgggtcgacccagcgtccgctagtatatgtagcacaaaccccacagcattatcaggtattgaataatgaggaagaagaaaataggaaccatgctgcaggaaacagaaggatctgcagctcttgccagcgagatacccttctaatcatagatattacaattgcggagatggatatgatgattcaggaggatgcacaatggcatatgaagattctgacattgatgattatgagtatgattgggaggacgacaatgaatttgatgatgatgagtatgattgggatgatgatggtagtgatggaagtttggaaaatgatgaggctgaggtatgtaatggaaactctaaacagaaagagttgtcggagccatgctatccttctctggcacaagataagataaagaatcagatgctagatgatgctaagctgaaatccaatttacgtggacgagacagaagcaaggacatgcattctgttctgatccctgtggagaatctcacacagtggaaagcaatcaaaacaaaagttgtatcatcaagcaagcacacgaggaaggagaatgttccatcaaagcaacatacaaacatgccctcagtctctgaagcaagcttgaatttctcaccttgcagcttggaatcaaatgcccttcagtccatgcctctattgccagaaattgcagttgatgctagtctttcaaactggttggtttctcctaattatcgtgtctcctcgaccacaattcattgccaatgatgcggtcatgtcattgaaaaaaacagaaacttagaaaatatcaattctgtggacttaacgaagcattttttttgccaccagcatggacagcaacttcaaaggaggacgcatcaaattttgattcttctgtttgattattcattcaccaaatcagtatctgccggttgggttgatttcattgtatttgtatttctaattcttatgccgtattttgttttgttttgtgaatggttatgttgtaatcaatggggagtgtatttgtgtattttgtatcttcatgtaacagctatacaatttgaggtgttctcaattttcatgttcacattacagtacattgtattcattaagacattctgcaaagtgatatttgaatcattcaaaaaaaagaatg

SEQ ID NO: 25700 - DNA, 323 bp, Glycine max
  Clone ID: PAT_MRT3847_123208C.1
acggctcgaggcatttagaacaggtatagcccgccgattgtgatgtcaaaaccgtgggcgatactctgctacgtactctaattcgtactgcgcaatgccaatcattatagcgaacccttgcccggttacactgacaacccctaccgacaacaatgactaccctgttcaggctaaccataacacatccctacaccccaccgcaccagatccaatacctgacaactgagacgacgccgacggcgacactttcgactgatacaccttaaattccccgacgcccgagtctggaaacgacgcttcgctctccaaatttcaaaacaaaa

SEQ ID NO: 25701 - DNA, 451 bp, Glycine max
  unsure (1)..(451): unsure at all n locations
  Clone ID: PAT_MRT3847_123209C.1
tctcgatcgaactgtccaaggtcctgtcactgtcacttcaagtcctgtcacatcaaactgaccgtatccgcggtgaaattagggggtcgcaaaagaccgcggggggggacggtcgtcgggggtgtggtcgcggcggcaacgctaatcttagccagttacagtaccctatggtaaaactttccgacgtttaacggtaaatttaccaagtgtaaactacgttcagtgtttaaaattcaagtccagcagacgtcaaatcaacagcgtcaacgcttgcncgtgtgtgcgtcgtcatcatagcaaaagttgcgtaaaatgtcagttgaaacgtcaaacaaaagtgactcccaacggctagggacgtggccaacggtagtagtataggtttgtaccatagagcctatacgtaaagtgagacagacgcctatacgtacggccggtattagtgaaagag

SEQ ID NO: 25702 - DNA, 701 bp, Glycine max
  unsure (1)..(701): unsure at all n locations
  Clone ID: PAT_MRT3847_12320C.1
tagaaacataaaaaactaaattatttttttaaaatataaatgaccaaacttaagttcagctgaaattttatgttgatactgttggagtattagttgatgcctgtagaaaacaaaatctagctctgttgagatcctatgagagaggcataatatatatagccacataggatttccaataattttccaaaggaatgtgcgtgaaacaataaagttttgacttctgcaaataggatatgattattgttgcagtgtgggcaggatgacattttggaaaattttcaaaatttaaaatacctcaataaattattggccttttgtttggtattgtgaatgacactgaatgagattaagtgcttgttctaatgatttattctggggcccatttacaccttaaaagggttacaagattcatctttgtagcaatttccccctccttttttttcatcttacgaagtgccacctctatctggctcccaccaaccaaattattattagaaattcagagattcttacacttaggttccatgtttggcatatcaacttatcatggtgacacattaattaatagctagtgatcagtttcactatgtacaatcacacaaagaaaaggagtgtatataattatatgaagaagtagaagagtaaaaaagttatttaggagtttncttttttttttttttctctcccttttttgtaaagca

SEQ ID NO: 25703 - DNA, 152 bp, Glycine max
  Clone ID: PAT_MRT3847_123210C.1
tttggggtttttttttttttttttttttttgaacacagggagaattcttattttccacaaatattagaattcaacgaaaattcggcccttattaattgattaagtcccccttgccggacttatgtggaaatttagagggaagttatttccaa

SEQ ID NO: 25704 - DNA, 483 bp, Glycine max
  Clone ID: PAT_MRT3847_123211C.1
cggaatccccgtcgacccacgcgtccggtgaacatcatcatcacaattaagatgagtagtgcaacaagcaaggcttggattgtggcagcgagtgttggagccgtggaggctttgaaggaccagctgggtgtgtgcaggtggaactatgttttgagatgtgctcagcagcacatgaaaaaccactttagatccttgtctcaagcaaaaaatgtttcttcttcatctgctcttgttgcaagcaaattaaagggtgatgagaaggctaaaaaggctgaagagtccttgaggactgtcatgtacttaagctgctggggtcctaactgatcttaaaggagagagattttcttaattgctggggattaattgtgatttgaaatgaatattgctttgtgtaaatagagatatgatagattgtatgaaaattgtaatgccaaacaatattaattaatatactattcaatgatgaaagtgtcttcatcagat

SEQ ID NO: 25705 - DNA, 378 bp, Glycine max
  Clone ID: PAT_MRT3847_123212C.1
cactcgtcctgcttcctcagcatacacttaactactaagtcttttgattcagtctaccaaaatcccttaaaagcgtcctaatactctacattgtccattgttattaccttcactgtgttcttgctcttgcattgtctacttaaaacttacaagcaaaaatcgagtcacaagtttccccctataccatggaagctacccatcactggtaacctccatcacctttcattatcatattcacttccctgatcaaactctacaaaaactcgttctcaaatatttacctctcattcacatccaactatgtgaaattttaacactctttgtgtccttcccccaagaatattataccacatatgaaaacccattaagttcattttt

SEQ ID NO: 25706 - DNA, 1266 bp, Glycine max
  unsure (1)..(1266): unsure at all n locations
  Clone ID: PAT_MRT3847_123213C.1
aatagtaatagccatagtaaaatgactaagaatatctaatttcttgaaaacaatataatacaattgtcttttggtgaataaagagaatcattaacaagaaaagaaagtaggattaaatagttattcatagttaatgtaccttttgccaactatgaactgcacaggcgtgctaagaatacatcttaaaaacaacccaagagtaagcatattgtggaccttgtagtttaaccagtttccataaggaggaagcatgggaagcaccatggcaaatacaaacacaggaacagaaaataagcagctgaacaaaaattggtccctatacatacggatttcattcaccttatccctttctctttgaccagaaggagagtacaaggttgcttgatacttcttggagccacagctagcttcctcctgaacacagtaaatgagagaccttggacctgtaatgtctggatcatagctaacagtaactttatgttctgacaaatccatctcaacgtggttcacccccacagctaactcaagagaagacattactgcatttacatcctctgcagaatcaaccccttcaagctttagatgcactttgtntgcatcattcccagagctaataagatcagcccccaaaaccagcatcatctatggcctcaattatcttgtcaacattggtgaggttgggatcaaagtgcacttttgcctcctccaaagcaagaccaacaattgcctttttcaccccttcaacaatttgaagggcattctcaacagattcggagcagcttgtgcatgccattcctttaatcctcactcggcacactgctatgtcctgctcatgaagctcatttactcgaaacccactctcctctatgctttcttttatttgtttcactgtaacgaacttagggtcaaacttgattgcggctcttccatcaagtggcgatacggcgatgcttttgacgccgtcaaggttcttaacgacggactcgacggaattcacgcaggaggcacacttgatgtcactcagttggaaataaactgtcctaacggcgccatcttccggagtctgcaacaaaggtatcttaagttcaccaatcccgttagcttccatcgaaagggttgaaattcgaacaaacgcaattcaaagtttaaacgtgaattgggatttcagggagaagagaagagaagaagaaaaaagaggagagggagagaaccgggggttcggaggtttcgagcggacgcgtggtcgacccgggaatccggaccgga

SEQ ID NO: 25707 - DNA, 457 bp, Glycine max
  Clone ID: PAT_MRT3847_123214C.1
catgattatatgtcaagattagtttttcggatgcgagcatactcttactaatatggatcctctatatttgggtagtgacatgcattaaagttttaggaccttggcattatgatatccaattgttttcgtttagtatggatcaaataaacacagtatgttatctagatatcagctagctttctctcttaattatctgaagttaagcatgtatgcaacaaatttaaaggaatgtaaaattccattctattaaatatttctgaaattgagtggatggtgattttgaatttattcaagttgcctataggtttccagttactatgaactttatttggcaattcattgcgcttctcttgtgtcattgacccgtattattttcagttctttccattgaaaagtttacctgaataaactctacaagataaaggaaatgaaaatgaaagtgaacaagtctgaccag

SEQ ID NO: 25708 - DNA, 628 bp, Glycine max
  Clone ID: PAT_MRT3847_123215C.1
aaacgtgagtgaggataaaacacgttgaaaagtcttgtgttggtttgtggggtcagtcattgatcctgaaagcaggcaaaactgatgtttgaggtctcggaaagggttacttacggagggttctgaccgataaggatgttgagtgatgtaccaccgtgcaaagtaccgtacaatgcaagccactgagaaatcgacaatcagggatgttacattgttcaacttttatttcatgatctattgcatctgcttgatatatcatatttatggcataacaaagcattaagattgtgaactgcaagattgtgttatgtgacaacatattttatttctggtgttgggctaccttatgcccttgcattggtttatacaataaattgatgcttcttaaagctgctttcttttttctttgaaatattgcagtatttgtcttttgtcctgtcatttataggatttgatctttttctgtctttgaaagctatggtcttactcttatgtcaagaaccaactctcctgaaaggcttatgctgttgggttatgactgatgccgggaaccaacttttccaaaagcttaagccattaggcaaaggctcagaaccaattttatatagcacttatagaaaagaagtgt

SEQ ID NO: 25709 - DNA, 149 bp, Glycine max
  Clone ID: PAT_MRT3847_123216C.1
ggtagccctcaacacgctggctgctcctgcctctgccgttgatccggccgcgcggccttacttcaaagcgcctccggcggtcattccgatctatgattggagcggcttctacgtcggcagtgctgggacgtggtcaacgccggcggcgt

SEQ ID NO: 25710 - DNA, 353 bp, Glycine max
  Clone ID: PAT_MRT3847_123217C.1
ggctcgagcttctatttctagatcttctatctgggttattaggataatttatacaaatgggggggatgctaacgaagctttggcacaaatgctgttcacaagctttgggagtggcagagaaatcagcgcaccgctgcggcaaatgccattagatgtatacatgctgacctgttgcatgtcctcctgggaatactgttgactaatgaccgagacgatgctcacccagaggatgcactgtcgtgtgtcgcaccgggcatacatggctgatatgttctgactgcatcatggacgaagatgcttgtctttcataagctgacaattgagactatgtcgacactgatgcctgcttacca

SEQ ID NO: 25711 - DNA, 456 bp, Glycine max
  unsure (1)..(456): unsure at all n locations
  Clone ID: PAT_MRT3847_123218C.1
gattcattgcgctacactctgtagaagatgaaaaataagaaatttgaaaagaattatttcttgtgataaaatgtgctttgtgcttactggaagtaggtcaattagaaagaaatgataataggatgataactgttttcatctcatccattattttttaatgcaaattcagaagcttgaaatgggagttgaaaacaactgttattgcttaaaataaatttgacttacctgcccctttacatactagaattcataagatgagattgatcaagaattttcgaagcctaccacttaataccttccaaaaactctttgggaggtaaccttaatttgagtgtaacgaccagaggaattaatttcactgtgtattcatttttgaaaaaaagatgttattatcattttctatccaacatatgcacactccagcacaagtctacatgactntgtatattatttttt

SEQ ID NO: 25712 - DNA, 233 bp, Glycine max
  Clone ID: PAT_MRT3847_123219C.1
ggcaagttgcttctcaaagggctgttgggggtcttacacatggcaagccaaagggtctgctgggatctatgtctcttcattagcattctcgatggattaaactctgggatgatcgcacattgtaatagcccaagctgaggaatctctgcttgttgagtcagtcatgagatggaatcttgctcttgagtctggcaattattggtgcactgttgacgtctataaccgtgagaatg

SEQ ID NO: 25713 - DNA, 419 bp, Glycine max
  Clone ID: PAT_MRT3847_12321C.1
tataggtcctgaagaatgaagatttaaattcaaggtcatggctaaacatctgaagttcattgccaggactgtgatggttcaggaggggaacgtggaaggtgcctacaggaccctgaacagaatcctcaccaccgacgggcttattgacgtcataaagcgacgacgctactatgagaagccttgccgccgccgccagagggagagctatgaaacatgccggaggatctacaacatggaaatggctcgaaagattaacttcttgatgcgaaagaaccgtgcagacccatggctgggctgctaaggcttgagcccacattgtttttacgtccaactcctttttttatgcaaccaatttctgttacttttttccccaataaactcaatcacaggtgaacaagaaggagaaaaaaataattact

SEQ ID NO: 25714 - DNA, 306 bp, Glycine max
  Clone ID: PAT_MRT3847_123220C.1
gtcattggagcactcgctgctggaaaagctgttgctctgaagccatcagaaatagcgccagctacctcatcgctgttcacaaagctgctacccgagtatgttgacacctcctgcattaaaggagtggggggaagcgttccagaaacaaccgcactctcggaacagagatgggatacgatcttctacacaggtaatggaactgtatgacctatagcgatggcagcaggcgcatagcatctgaccccggtagctctggagcttggtgggaaattccctagtatcgtggattcaaatgttgaactgcat

SEQ ID NO: 25715 - DNA, 155 bp, Glycine max
  Clone ID: PAT_MRT3847_123221C.1
attaatttgaatttcagagatggaattcttaacctagaaactagaatgcgtattctcggatttgggggaaaatcgtaaaccctattttaggcttgaaattgaaagtgtcgtctcattataatgccttaatatagatataagactttgttttgtgc

SEQ ID NO: 25716 - DNA, 376 bp, Glycine max
  Clone ID: PAT_MRT3847_123222C.1
ctatacggtactatgcagagatgatggctgagactagtggtttgatcatatgactacagtgaaactgtatgaggaggacaatacgagggtaaggatatcacagcaatgggtgtgacagtgactatacactatattatatggccacttcacaatgactgctaagatgtgtgatctcatgcgatgcatacatgtagttgctcgaggataacccatagttagttcaaggacacaaatggagatgtgtgatagcgagcataacatccattgccagggcctatctcttattctggggacactcatgcctactaatgcattcgggtgtacatcacaataccaatatcacgacacggcgctcttaccactaaagaatgatttt

SEQ ID NO: 25717 - DNA, 422 bp, Glycine max
  Clone ID: PAT_MRT3847_123223C.1
caacaaatgaacagaattttttttgggtttggccatccgttagtcaccgagaaaaaacatggtgggccctgtcgccaaccaaaggtaaaacttttttgggggccgggctggggccgggggcaaggccccattcttaatttccaggaaaggggggcccgggggaagaaacaggattccaatccttggccagaaggtgttccccccgggaaccacctccgagctgaaatccgggggccggccgcgttattgccaagccaaagtgcgacctaaaggccccggacaggcaatggattgacctctttttgacggcgccaaaactggggacacccggcggggtcccacagcggggcgcccgggaaaaccccgggggcccccaattgaataggctcggaacagaccccccttccaccagctgggcaaaa

SEQ ID NO: 25718 - DNA, 246 bp, Glycine max
  unsure (1)..(246): unsure at all n locations
  Clone ID: PAT_MRT3847_123224C.1
tcganacaaagaaaagagaaatccgcgattcgctcttctcttggaaaagtgaaaaccagaagtacgaacgaaagagannnnngnnnnngaggggggagaagacggggcgcgcgctcaccaccctgcccaccaggttgcccgccaagaaggaactgcctgttcccggggggggggcgcgctgctgcctggaagacacccatctcgtgcaagctcaagctgggagagcggggcaccactatccccacc

SEQ ID NO: 25719 - DNA, 731 bp, Glycine max
  unsure (1)..(731): unsure at all n locations
  Clone ID: PAT_MRT3847_123225C.1
cgaaaaaaatattagtaatttttaactgctatgttaacttaattattctaaaaattatgagaatactaaagtttcttaacaaaaaattgaaaaaaagaccataatgatatatgattagaatttttttaaaaaaaaagaatagaaggcatgaaatttgtataacttcttaaaatcgtgagaattcttagagttactcctatttgaaaattattacaaaagttatatccatttaataaattctagtaaaattgttcccttttcatcaaacgatctttatacaataataatttatttatatatataattgaaatacattaatcaacaatctaggatcacaacatcaacattgttaataaatcagtaacgtgaataattttcatgactaattgatagaaatatttagagtgacacatatgaaaagattaagtaatccaaatgattaacataatagtgtaaggttcacgaaatttacaagattcaaaataatttatttaacgagagaatttatgttcgaattttaaccttgtgtaaataaaaattgggtcagcaacagtgaaattaatctctcacctaatgagtttaaagaacctcataatcttttacctnnnnnnnnnnnnnnnnnnnnnnnnnnnnnnnnnnnnnnnnnnnnnnnnnnnnnnnnnnnnnnnnnnnnnnnnnnnnnnnnnnnnnnnnnnnnnnnnnnnnnnnnnnnnnnnnnnnnnnnnnnnnnn

SEQ ID NO: 25720 - DNA, 1283 bp, Glycine max
  Clone ID: PAT_MRT3847_123226C.1
ccagaagccagcctctgggcaagtttttctcacttatgggtaatttgtaaaaccatcatttagaaaaattctagtgcattctggtgcggatgttaaattgaatgtctctcatgatggtgttcttcttccaatgagtcaatctcttgttaaatataagaaggggacaaatgctcaaacagctactgcactagaccgagctaatgctgaggatgccttgcttccaattcctaaggtttttgattctcatgagaaagagaaagcatttcaaaactctctggacaaggatgtaattgatgatttccatagaagtagtaaagatgattctgttgagatagaagatgatatggcacaaagtgagattgatgtaatttgcatggaggaccggatgagatctctagggatgatttccagtgaaagtgactatgcatcaaacattgaactttgctgtaagttgttgaagggtattgatctggaagccactattccagtgaaaaagataagagcagctgttttgtctatgaagtcaaccaaagcatggaagctactggaagtgttactggctgcatggaaatcaaggtcatctagtggaaagtatattcttccatggatatacagcatattagtgaatcatgatctcaatcacattcctcggcaatatgtgacatgtacactcaattccttagacaagattaccaattttagaggggcaactcatcagcctttgttacaattatcaggtcgtctgcaactcctgacatcacagattgagaaggcttctcagactataagccatccggtgcatgaactccaaatgcaagaaagtgaagatgaagatgaggatgaggttgaagatgaatattatcacgaggaagatgatggttctgaaatgagtactgatgatgaaagctagtctgattttttcgagagattgggttccaagttgtctcttttgcggctgacgaagatagaggaatggaagctgtatttcatccagcctcttgttcacaattttgttgctatatagatagatacatcctcagaaagaaactttggtactatccagatttgttaaaaatgacacggcccctaatttatgtaatttgagaattttattaagtaaaaatacataaatatagttcgggcatatttactatatgtttgaatacatgctcaaaatactacgataaagattttgtattttccagatcaaaaacagctttgatttcgtgatagcagttttgcataccccaaattggccctacacgtagcaagttaattgccag

SEQ ID NO: 25721 - DNA, 810 bp, Glycine max
  unsure (1)..(810): unsure at all n locations
  Clone ID: PAT_MRT3847_123227C.1
ataccttacaccgcgcgctgtanatccgatctgcgaaattatctagaagtcaagacttccacaagctccgtcgtatcaaacttcaaaaaacaccgccaacatgggtaaaggagaaaaagtctcacatcaacgtcgtcgttatcggccacgtcgattccggcaagtctaccactactggtcacttgatctacaagtgcggtggtattgacaagcgtaccatcgagaagttcgagaaggaagccgccgaactcggcaagggttccttcaagtacgcatgggtccttgacaagctcaaggccgagcgtgagcgtggtatcaccatcgatatcgctctctggaagttcgagacccccaagtacaacgtcaccgtcattgacgctcccggtcaccgtgatttcatcaagaacatgatcactggtacctcccaggccgactgcgccattctcatcatcgccgccggtactggtgagttcgaggctggtatctccaaggatggccagacccgtgagcacgctcttctcgcctacaccctcggtgtcaagcagctcatcgttgccatcaacaagatggacaccaccaagtggtctgaggctcgtttccaggaaatcatcaaggagacttcctctttcatcaagaaggtcggcttcaaccccaagcacgttcccttcgtgcccatctccggcttcaacggtgacaacatgctggacgtctcaccaactgcccctggtacagggttgggaaaaagaaaacaaggccagggcccccggcaagaccctcctcgaggccattgactccattgagccccccaac

SEQ ID NO: 25722 - DNA, 525 bp, Glycine max
  Clone ID: PAT_MRT3847_123228C.1
tcggaattcggctcgagataccttacaccgcgcgctgtaaatctgagtatcaaacaacttcccctcaccaccacataacctcaaacaacacaacaccgccaacatgggtaaggagaagatgcacatcaacgtggtcgttatcggccacgtcgattccggaaagtccaccaccaccggccacttgatctacaagtgcggtggtattgacaagcgtaccatcgagaagttcgagaaggaagccgccgaactcggtaagggttccttcaagtacgcatgggtcctcgacaagttgaaggccgagcgtgagcgtggtatcaccatcgacattgctctctggaagttcgagactcccaagtactatgtcaccgtcattgacgcccccggtcaccgtgatttcatcaagaacatgatcactggtacctcccaggccgactgcgctattctcatcattgccgccggtactggtgagttcgaggctggtatctccaaggatggccagactcgtgagcacgctctcctcgctta

SEQ ID NO: 25723 - DNA, 419 bp, Glycine max
  Clone ID: PAT_MRT3847_123229C.1
agtcccatgccgtgaacaattaatagaaatatcccaaaagtagaaaagaaatatgggtgctttcactgataagcaagaggctttggtttgcacctcatttgaagcattcaagacaaacattcctcaatacagtgttgtgttctacacctcgatactggagaaagcacctgtagcaaaggacttgttctcatttctagcaaatggagtagaccccactaatcctaagctcacgggccatgctgaaaaactttttggattggtacgtgattcagctggccaacttacagcaagtgccaacagtgcgcgattcccgccggacttaacccgatcccatgtttttttttccctccccgcctcccccatacctgcctccccccccccccccccccatccacttttacccaacccccccccatccc

SEQ ID NO: 25724 - DNA, 315 bp, Glycine max
  unsure (1)..(315): unsure at all n locations
  Clone ID: PAT_MRT3847_12322C.1
agcangcaaggggggtcgagatcgatcccaaaaangccaccttactggtttttttaagaaacaatgtaccacatcggggggattcttgaggagacccggcatgtcaaaatacacaccaaagaataaacatctacaaaacaacatgccatcacactgaagacctcataacagaacaccataatcatctctacagtcaccacaaaaacactcatcaccattggctgcacaacatgtgacttgactatactatcaagaacatgaaccatttaatggtcatgacctccacaagaaaaagcttaactaagactgaaacaa

SEQ ID NO: 25725 - DNA, 469 bp, Glycine max
  Clone ID: PAT_MRT3847_123230C.1
cccacgcgtccgacggctgcgagaagacgacagaaggggcttctcttaaacctaattctgggtgtttctgtttcatgcttctgattgtttttgttcattttattacacaatggtaaaaatactttaaactcaataaattgaatgttgtaagatttcactgatctatagatagagcttagattatatatcaacaacaaatttactgtttttgcagaagaaacttaatctaatgagaaaagattttgtgcaaacctcagcaattatctcagcagacactattccagtttcttctcgaagttccctaacggcagcagatttgggctcttcaccatcttcaattcccccctgagaaccccaaaagaacagtcaattttatcagaacaatttaataccataaagagatagaaaataatttacttattacaggcaacaaaagggggatatttttttaataatcctataaccaaaa

SEQ ID NO: 25726 - DNA, 1155 bp, Glycine max
  Clone ID: PAT_MRT3847_123231C.1
cccagctcagcgcgtccctatccgggggcagttggtgctcgctcgggatcccaggtctgagatccttcacaacacaaccttatcctttccaattgctaagttaactctcatcaatatctcattcctattcctatgtcttaagccttaggattattttcttttctactcaaaacaaaacatgtctcacaccccacccagctaatctcccccttcaacacaacaacataatggttgcaactgccgccacatttttcaatccactatttcttcacacgcatggtagggttaacatatgggcactaagcaggattagctacttaagtggaaatgtgaagtctaggttccctatttatagatcagaaattcatcatcaggttcattacttttcacaccttgcacctatatgtgcaacctttaaggaacccaaggggtttggtcctaccccaaagaaaaagaagaagagcaagaagatgagaagggattatgaagaagaagatgatgaagaagaagaggaggaagaagaaccagacaggggagttattcctgaagtagtgaccaacagaatgatgagcagaatggcagtgtctgtaggaattccactgggtattgggcttttgtttttcccatttttctactatctcaaagttgggttgaagattgatgtgcccacttgggtgccattcattgtgtccttctttttctttgggtctgctctgttgggtgtgagttatgggattgtgtcctccagctgggacccactgagggaagggtccttctggggttggactgaggcccaaaagaattggcctgttttttggcagtcccttagaggtggtgaatctaggaagaattagcccattctttctttagccctttaaatgtttgacccttttgtttcaatgcatattgtatctggccagcactcttggaggttgtttggtatgagttataaaacatctctaaaattctcttctcaaaagaattggcctgtgttttggcagtcctttagaggtggtggtggatcaaggaagaattagcccattctttctttagcctttaaatggttttttgttttcatgtatattgtatcttgccagcatttagagcttgtttggcattagttataaaacatctctaaaattctcttaaaaaaac

SEQ ID NO: 25727 - DNA, 1974 bp, Glycine max
  Clone ID: PAT_MRT3847_123232C.1
ccacgcacccgtctgccctccagtctcaggccacaatttcaacgccacaccaaaaattccactgcaaccaccaccctcctccatttctacttttcttctcattctctttccactcccctgcattctgaacacaagtgtgattagggttttggtttggtgtttttcttaagcttgagatcaggaattaatttcagaggttcagagaatggcaacggattcttctaatggtaatggacatcaccaaacaacaacaaagcaacctcctttgccgtctcccctgcgcttttccaaattttttcagtccaacatgagaatcttggttactggaggagctggattcattgggtctcacttagttgacagattgatggaaaatgaaaaaaatgaggtaattgttgctgacaactacttcactggatccaaggacaacctccaaaaaatggataggtcatccaagatttgagcttatccgtcatgatgtcactgagcctttgataatacgtgcaggatctgatctaccatcttgcatgctccgtctctcctgtaatctacatctacaaaccaataaagacaacaaagaccaatgtgatttgcacactgaacatgcttgggcttgcaaatcgagtatgagcaaggtaggttgcttacatagatgtcatcattggatctgaattatctgatagattgataaaaatggaaaatattgaggcaatggttacccaattggaggtccgtggatgctaggataaagggaaaactgtagccgagaaagtatatttttgattttaattggcagcatgtgattgaaattcgaatttctggaatcttttactcttaaggaccacgcatgaactttgacgagtgggcgatttgggaacaatttaattatgccaataatacaaagaggaaacattaaacctccaaatgcctaggaacacaaaactagaaggttcggagaatgtctctgacctgttttatgacctttttcggatcatgagaggttataacaacgtaccaataaagttaggaaatcaaactgagattgcaatgtctgaacttgttgaaaccgtgaaagagcttattaagccaggtgttgtgatcaagatggtggagcacactcctgatgatccgcgtgaaagaaaaccattcatcaaaatagcaaaggaattattgggctgggagccaaaggtcaagttgagtgatggtccttcttcgtatggaagaggattttcgtctgaggattgaacttggcaaaaagaattaatttgttttcgctcttttagtgacatgtcaaagtagagaaataataagtgagatgagtcggacccattttcaaaattttcatcattataggtattattatgattatgatactgagaaagttgggggacgtgaaatttggcgtctacagctatcacattgctatatatacttggttttgtttggcaaaagactgcagcatttcactacaaattttgctgtttgtaagatgattgaattgaaattttttccgtgttttcttgcttatcttttcaactttcctttgctaagtgtatttgagaactgagcttcaggaatgttaattgcatagtcgaattttgtaagccatttatttacactgatgcaaggtctacacacaagtggtttaattttgttttgaattgtataattcatgcattggagaacgattttgtcagtaataaaattctattcaaaagtttatgttattatcaaattgttaaaaaggttatattgtttagcaaaagactgcagcaccgaaatacaaatcagactgtgtgtaaggggttcgtatttggatttgaggaggtttgaatctccttaagaaataaagttacgatgttctgatatgaatgtgaaataggttctactcgaaatgtgtttctcaattcttatttgttgagatctattcttccagtcgttatattctactaggggaacggagatccgtctctc

SEQ ID NO: 25728 - DNA, 374 bp, Glycine max
  Clone ID: PAT_MRT3847_123233C.1
taatgcaacaaaagaattatatttgaacagtgggggggcgaaccaccattgaggtttttgtcttcccacccttattgaaaaccccccatttcctcctttatcttgaactagggccaggactgcttaacactgatattcctaattgcttctcttacatttgagctcattggaaatggacagaagcctgccattaacaacctcgctctccatttgacgggggctacatacctgcctattatttactcgccctcacatgcaacaacgcggacaatgtcctttgccaggcataggcttgcaacattcatgctgaactggctgtccctggggagagttccctcttgtgtgatgggcacactaaaacttgaatcgtgggt

SEQ ID NO: 25729 - DNA, 774 bp, Glycine max
  Clone ID: PAT_MRT3847_123234C.1
gaattcgagctctgtacccggggatcctctagagtcgacctgcaggaagcgctatccttcatttaagtgcttcgaccttggtcaacaatgtaaattgcgaaatcagtaatcaacaaaatgcagtgtttcatctttcccgcactactgaacttcaaaactatatccacaaatagaacctccttatcccctctatgtataggcaaaacaaacatagaaatataacataaaatggattgacagtgccaggatcatcttaagaaacatagaaaagggtgttcttaggggggaaccttatttgtgtaaaatcttcattaaaaaaggggtgaaggaatgttgaggtgtagtcacgcttgtagtctctgaagagaggccttgcaatggaccttgatggatgtccatggatggttcacattgacacgttttcttagcaagggaaccacaaagtttacatttttttaatattttattataaggccttgtcaccctacctgaacaacccaatctctttctggttggttcaattctgatcgggttgcctttccaaagacaaagaaaccgaaccaactcaacctgccactatgtaattggtttggacttcagaacacacaaatccgaccagacccaactacaccgttatatgtttgccatcaagctgattttcaaaacatgctctagatttactacagctaattatagatttatcaggacattattgcagaccactgactctgaggggtaagtagtgacagtgtcttctgtatcagattttgggat

SEQ ID NO: 25730 - DNA, 551 bp, Glycine max
  Clone ID: PAT_MRT3847_123235C.1
ggtttagttccaaaagccagtttgaatattagaaaggaaatatatatatatatatatatatatatatatatatatatacatatatatatatcttttgcattaatgggaaaaactattgtactattaacttctcttcataatcacgttaaaatattagttaacataacttcggtaaattttatgtttaatttcatgttaaagaattaattttggatccaaaattgattcttaaagcatcttaagtagtttttgtgttgaataaaaaaaaattatactaaattttacaaataacaagtttttataataaaaatatttaaacataaatcatatttaaaatcaatttcattcaaaatcaatattgtgtgaacacttatccaaacacactaatgctataattatatgtagctttgagttggatgcatagtgctatgtgaatgcagttacaaacaccttaattttgcaaaatcaagatcatctaaaatcacatttgtaacagctcactcaaacacactaaactgttgaatatagttacaaaagaaaattgtttcttg

SEQ ID NO: 25731 - DNA, 439 bp, Glycine max
  unsure (1)..(439): unsure at all n locations
  Clone ID: PAT_MRT3847_123236C.1
aattaaaattataatttttttttaaataaaaaatatttttttagttggaaaatttataataggagggaaaaagaaaagaagaaagagggaggggggggggggggggggggggaggaggagggggggggggggggggggggggggggggggggggggggggggggggggaggggggggggggtggagagggggggaaaaaaagagggggaggaggaggcttttgttgggaggggaaaaaaaaaaaggagggggggggggaaaaaaaaaaaaaaaggggggagaagaaaaaaataaaaatgatgaataccagaaggggggaagggccctccctccaagaagaaaaggtnattcggaaaaggacaataaggggggggaacccgcgnggtattgaaggcccttgaggaaaggaggaatggccctatggctcagggagaaaggg

SEQ ID NO: 25732 - DNA, 261 bp, Glycine max
  Clone ID: PAT_MRT3847_123237C.1
atgaaagtttgtgccacacgaacctttttgatgaagagttcctaagagatattctgcaacggccacaagagggtgctccaaatcttaacaactcatccatcatgtcgtctctttgtgctcaagacattaagccaactaccttatttccaaccacttacatactctctttcgacaattccgctgcattgttaccaacagaaactgatcgtgatttttcttcttccaaattgccctcatcaaattcaagggccaaccatggaa

SEQ ID NO: 25733 - DNA, 364 bp, Glycine max
  Clone ID: PAT_MRT3847_123238C.1
ggcacgagtttgttgtgagctataagctactttatcgtgtggagaatatgtcgttgtctgtgttctctgctgctgcagtacttttggtaccatggccatgccatggtgcacgctattaaatgttccctctccgaatgaaaactggctatggtgaccgttcgtcagatgtacaatgcgcaagttttatgcttgctgtggaagcacacaacatccgagcctttatcaccattcctgaatagtgcgttgaaccaacaacagactacattaatggtgaacattttagatcatactctataacagttaaccatcaagctttcttttatgctactgaacgcgaagtccatcacaacgacatatttatatt

SEQ ID NO: 25734 - DNA, 293 bp, Glycine max
  Clone ID: PAT_MRT3847_123239C.1
ggctattggtggcttggatgctgtggtttttgtgaggatacttgttttcaggttgttcagtccttccaagatttgaatagttttatctgtgtgccttatgttatagtaataacacaatgtgctagagtcaattgttttcttatctgttaattttttaatctgaaaacttcagatgccaaccaactatcaatattttttatacctagttaagtagaagtgaagatgttattaaggtcgttctaatggatatttttagtctactctctgtagtctagattcaaaaaaaaaaaaaa

SEQ ID NO: 25735 - DNA, 393 bp, Glycine max
  Clone ID: PAT_MRT3847_12323C.1
aaaacgcggccatagacaaaatttttattccaccaagcctcccggggcggggttttaggggggggtcctttcccccccatggaaaggtttacaattggctaggaaagaactgggtttaagggtttaaaattggtttttccaagagacccaatggatttttggctgggaaacccatttttaaaaactaaaggggggaagcccactcctagtttgctccaccttttaaagggggtggtaaccttacatgcccccagaaaaaaagctggtaaaatttcaggggcgacccgtgaacaatggcattggggggccgaagaatttcagcccccatcaatgccataatgggcccctttgggaaatcagatttccttttttggagaattttttggagaaaac

SEQ ID NO: 25736 - DNA, 639 bp, Glycine max
  Clone ID: PAT_MRT3847_123240C.1
ggttgacgagcccgctatccgagagggacttcccctccgaaaggccgactgggacaactacctcgagtgggccgttgcctctttcaggctttctaccgccgtcgccgagtccaagacccagatccactcccacttctgctactctgacttcaacgacatcttcgcccacatcaaggccctcgacaccgacgtcatctcgatcgaggcctccaaggccgacatgaagttgatccagaccttcaagaacgagggatacaactctggtatcggacccggtctttacgacattcactctccccgagttccctccgaggaggagatgaaggagaaggtcaagaccatgttggagatcctcgacgccaacaacttcttcatcaaccccgactgtggtctcaagacccgaggttggaccgagaccgagcaatcgctcaacaacctggtcggtaccgccaagtgggcccgtgccacttacgcttaaacacctcatattacatccggaatgcgttcaacggcattgccaacaccaaaacgacctcttatgacgaaccgcgacgattgccgctctgtcggcgggctctgagcccacttgtatcatgttttagttagaactttcgggtcgcatacaatcgttcaacaacg

SEQ ID NO: 25737 - DNA, 209 bp, Glycine max
  Clone ID: PAT_MRT3847_123241C.1
agaacggaagttaccccttcgacatttattaaaacccaaggggttcactttttattttttaaaaatattttaattaaaaatttcttatttttaaaccacacactacatttttggaacaacaacagtgttatcattatattaccattttcaaaaatttttaattttgcttccacacaaagttatttctgtttgggccactttaccctttt

SEQ ID NO: 25738 - DNA, 492 bp, Glycine max
  Clone ID: PAT_MRT3847_123242C.1
tattgcaaccaaacgctgattttctgattagctccattattccttttctttacagagtacaaggaaaatacacttccggttcttttcatcatcttgccggcacaacgaacaaataactcaacagcgctacaaggtttctctaaggtacaaaaaagatcaaaattgtacacggtctggatcctttgagcacgtgagtcagcctgggagtcaccaaccggatggacaactggatgttcaatgacaaagttctcgatcttatgaaacgactcaataccaatgtcggttggtgttagcttccatacatgatcatgaccctgtttagatgcaatctgttcaagagaaaccctcacatcagcatttgcataagcatcgaccctttgctccgcgagcatgctgagtttagaaaaagccattgtgtatggatcaccagatgggtgatctacaagaggacggcaggcagtccccactttagcaatacgcctagcaagagcg

SEQ ID NO: 25739 - DNA, 384 bp, Glycine max
  Clone ID: PAT_MRT3847_123243C.1
accttttggagcacccttatccgataatacctgctatacaccatatgttccacaacgatgacgactgccgcgcagctccccacaccagcacaccagctgtccgctcccacatcctctgccaccacatcatcatccaagtcagaagacgtcaacttccaaggcctccccatcccccgtggcgctgtcaacgcctctctatccttctacaagagcccggaagatggcgcacctccacacaactacgtcgagccactgccaggtgtaccgcaacgaaactggggcgacaattggcagaatgtaactcataacgacctgcgtggctcagaacaacagtttaccctcgatcacaatgcgttcgatacatactcgaacattcccagcaac

SEQ ID NO: 25740 - DNA, 274 bp, Glycine max
  unsure (1)..(274): unsure at all n locations
  Clone ID: PAT_MRT3847_123244C.1
ctaaaacaacctggggttgagtcttagcacatgcattttgaatctcttattttcatttganaattttgggtttgatcatgaaattgncaacatgtaatctcctattttctaggggtatgggtggaagcagtttctactcgtttctcaagtatttaaactcgacacattggccacattgggattttacagggaaacaaaatggaagaaaaaacagaaaattgactcccaaagtaatagaattgccgttttatgattttactgtatcgtgatgctt

SEQ ID NO: 25741 - DNA, 382 bp, Glycine max
  Clone ID: PAT_MRT3847_123245C.1
ctcgagccgcgtcaagcctattacggtgtcgtttttaataaaaccttcagtattgccgttagcgacacagccagagccttaatcatgtgccagtctagggaatcaccgtcactactttcccttttcctagaccttcttctacgtatatctaccgtaatcgcaaattctattaccacctttctttaatctgcatatcaatattaatataattccttcaaagtttttttttaacttattaacaaaaccacctggccttttttttacttttatcatgcgtccatctatttctactctcctttttttttatacattgcttctattctttcatttaaccccagcatgtaatttaatgataatctattttccttttcttccagatttt

SEQ ID NO: 25742 - DNA, 316 bp, Glycine max
  Clone ID: PAT_MRT3847_123246C.1
cttttggttaacagggaatggattgcactgtgcttcagctgactatctataggggaaacccagcactgaatatggcaaaagtaagcctgcagcaactatgaaggggactcgcaacgaaatcaatgacactgcaactgggacagagaacaaagaaatttagcgcaacaaacacaactaaacaagacatattcctcagcatataattgaaatacgaatcctatcactggaagccgtgaacgaccgcttattataagtaaaatcatcctggagatactattggtaacgaacttgttgaacgaacagatacaagagtact

SEQ ID NO: 25743 - DNA, 313 bp, Glycine max
  Clone ID: PAT_MRT3847_123248C.1
gtggaatgctttgattagcaatccagatacagtggtaattgatgtgcggaataactatgaaaccagaataggaaaatttaaaggagcagttgatccttgtaccacatcatttcgtgaattcccatcttgggtggatgagcatttccagcttactgaaacagatgattgggcgcatccaaaagttgaggtaaactcagtccaacctgctgaaaaagaaatggataataaaagacaacatatgccacgtgttgcaatgtattgcacttgaggtattcgatgtgagaaagctacaagtctacttcttaacaaaggt

SEQ ID NO: 25744 - DNA, 1475 bp, Glycine max
  Clone ID: PAT_MRT3847_123249C.1
ctctgtgtgttacaaagtaaaatacttaccttggctccttctctgcattctgtgctacattgggtgtaagggtgcaaagtgaagagtgaagagtgaagagtgaagtaacaaaacaaaaagagcggagggaaagtcgtgggaacgaagaagccaacaaagacaaatcaaggtgaaaaggaaaaagcccttatgcttttttgagtttgtttctcaccagcttgagttgtttagaagctcatcttaagcattgtggcagacctgagtgagcattttttgagtggaaaatatgagctacagtggctcctcaatgagttctggtagtggatcttctagaaggacatttgagtttggaaggacccatgtggtcagacctaaagggaaacaccaggcaactatagtttggctacatggccttggtgataatggctcaagctggtcccaactcttggaaactcttcctcttccaaatattaaatggatttgcccaactgctcctacacggcctgtagccttatttggtggatttccttgcactgcttggtttgatgctggggagatttcagaagaagctcctagtgatttggaggggttagatgcttctgcagcacacgttgccaatcttttgtcaacagagcctccaaatatcaaacttggtattgggggcttcagtatgggtgctgcaactgcactatactcagctacatgccatgttttggggcactatggtaatggaaacatttaccctatcaacttaagtgctattgtttctttaagtggctggcttccttgttcaaggaccttgaaaaaccaaattgaacgatcacgtgatggcataaggcgtgcagcatcgttgcccttatttctctgccatggaagaggtgatgatgtggttgcatatgaacatggggagaggtctgcagtgaccttaagttcatcaggattccagaatcttatatttaggagctacaatgggttgggtcactatacagtccctgaagagactgatgaagtttgcaggtggctaactgcaaatttgggactggaggggtttcggttgaactagagaaataaagctcaacaaggtcagattataaaaccttagttttaggcaatgaaagaggggctatagaatacatagtggtgtggtgtagtggggtatattggtaaatggcatagccgctttgttctctctcttatattctcatggtactaaataaatgtttttgaatccaagggtcactcactatctttattgctttgggatttgggaatgctttggtggaaggacatggatagtttccttcacatccagcaaattttgtttatttcattcgggcatggatatgtagtatgttgctttctgtattcatattctgtctaaataaagtcaaattttagtaagtcatatttataaatattgcctatgatttcattatagatatatgaacagaaaaaacctatggttgttggtgggt

SEQ ID NO: 25745 - DNA, 2486 bp, Glycine max
  Clone ID: PAT_MRT3847_12324C.1
gtggaattttggctgtaaagaatccaccgtttttttctctcgggaatcagtaacaaaaacacaaccaaaccaaacaatgaagaaacccttaaccttaaccctaaccttgtacccctcactctctccctttgtcgtcccttccctccgatccaagtgagcaacactcaactccactcgcggcgcgtgacatgaaaaaaagatcccacgctggaacccacaggccacgcaatgcaagaccccgccacctccgacaccaccgatcaccaaacgacgccgtccccgtcgccctcgccgaagcgcaagaccacgacgacgacctaaccgttccaacaacgcgccccgtgttcaaggtcctcccggggcagatcgcgttccgcctcgtgtgccacgcgtccatcgtcggcggcctcatcggcagctccggctccatcgtgtcgcagctccgccgcgagaccgcctgcaaaatccactgcgaggactccctctcctccgccgaggaccgcgtcatcctcgtcatcggctccgtctcgccgcgaaagggccttcaactcggcgacggcggcgaggtcgaggtctcctgcgcgcaggaagccatcgttagggttttcgagagggtttgggacctcgaagccgagaaaggcgttaattctaacagagctgttaacggcgaggttttctcgaagttgctagctcacacttcgcagattggtgccgttgttggcaaaggagggaagaacataacggccattaggaacaataccggtgccaaaattagggttttccctcctccgcaatgcgccaccaaagacgaagagttagttcaaataactggtggaattttggctgttaagaaagcgctgatttctgtatctcattgtcttcaagattgtccgccattatgcaaagttccagttacttctagtacaccaactgttagctcttctgataggttgtcctctgatccaaatgctgaactttttcctcgccttaattcattgttaacctccatggaaggtttatctatatacgaacggaccacaaactctaatgaatcctctaaccgtgactcaaaaggtggagaacacgaagttgtgtttagactcctttgctctaataatgtagctgggagcgtgattggcaaaagaggggctatagtcagagctctggaaagtaaaacaggtgcttctattatctttgcagctcctttaagcgagcatgccgagcgcattgtcaccatttctgctatcgagagccttgaatcttgtaattctcctgcacaagatgctgttattcttgtctttgctagaattattgaagatcacattggaaagggttttctccaagtctctagtatggaatcacctgtaactgcaaggcttttagttgcaacaagcacggtaaatagctggagtggcaatgaaggtcaggtgattttagaattgagagaagtaactggggctgacatacaaatattgcatggagagtcagttcttaagggtgcttcagatgaggatgtggtggtgcagatcactggagagtacagatgtgtacaaaatgccctatataaaattacttctagaatcagggataatctttcacccaatgaggtggttgctgaagcaagaccaaaatccaattggaaagtgaataaggatcctgtaaagggtaaaccttttgcccgtggaaaatctgcttttccttctggaaggtttctgccacggaatgcaggggtgcatgctgaaacaatattacaaaatggagaattacatacggatttaagtgagaatttggaacgtgggagaggaaacatgtttgctacggtgacaaatactactgtggagataatagtttctgaacacgtctttggttctgtttatggtgaagatggtggcaatttggatcgaatcagacagatttcaggtgcaattgttacggtttatgatccttccgttggtacaagtggagggaaagttgtcatatctgggacaccagatcaaacctttgcagcgcagagcttgcttcaagcctttattcaaacgggacaagcaagctgatggaaagctgcatttcatcatcagttggtgccatgaatggtgtacatagatgtcacacgacaaccttcactttgtgaatacggattcactcttttttcttaaagataatgcttacctcttatagactataaacacagattttgttctctttctctccctccttcccccgcactctgtctcacttttaatttaaggttcatcatagtaccattttgctccaagacccattcatattcatcctcacccctttttctatatatatatatatatatatatatatgcattgttaatgttaatagagtttgcagaaaaaaggaaactaaaaagacaaggatgatatttatttttgtttggaaaatcaaacaaatgaataaataaataatgaataggtaagcttattctgaaaacaatcagtttaaagtaaaaaaaaaa

SEQ ID NO: 25746 - DNA, 199 bp, Glycine max
  Clone ID: PAT_MRT3847_123250C.1
tgcaccggtcgggttcaccccaccagaactggacccacccggcccttccccgatcttcgggggcagcaccggcgggctcctgcgcaaggcgcaggtggaggagttggatgtccttacgtggcactcacccaaagagctgatctttgatgtgcccactggcggcgccggtgtcgtgacggttggtcctcgcctttttagg

SEQ ID NO: 25747 - DNA, 305 bp, Glycine max
  Clone ID: PAT_MRT3847_123251C.1
atttatacctacctctccctcaagaatccaatcttcgacagaccctcactgctagactatcaaccttgacgtgggaagctatgacaccatcgacaacgtcaaggccatgattcacgacaaggaaggaatccaccctgaccagcaacgtctcatattcaccagaaagcaactcgaggacggtcgtacccttgctgactacaacattcataaagagagtactcttcaccttgtactccgtctccgtagtggcatgcagatcttctttaagacactcaccggcaagaccataaccctagatgttgaaa

SEQ ID NO: 25748 - DNA, 250 bp, Glycine max
  Clone ID: PAT_MRT3847_123252C.1
caaacttgttgttcacattaccaactctccagcactcatcatgatggggttgattcccatcatgatgagtgctggagcgttggaaagtggaaatacaggagagccagcacaactgatcaagcagagataccgtgaacctgcagacttgatcaagaaaggacacttgtgtgctctcttcatcaacgatcttgatgcacgagctggtcatcttgatggaaccacccaatacactgtcaacaaccagatggtg

SEQ ID NO: 25749 - DNA, 1646 bp, Glycine max
  Clone ID: PAT_MRT3847_123253C.1
ccacgcgtccgtacggctgcgagaagacgacagaaggggatacaacatggatccgtgccccttcgtgcggatcctcgtcggaaacctcgccgtcaagtccccggcatcatcaaagccctcttctttctccggcaaagtccacccttcgagttcccccttcttctgcaagatcctactccagggacttgattcgaattccacttctcctagagtgtccagtgtccctctgatatcagactccgacccacaccctcactccttcgccgcctcctttgatttctccaaagcccaaatcttgaaagcctcgaagaagcccctgatgaagatctccgtctacaagggccccaccactccctcctgcgtcttcacctccgccaaactattgggcaaagtttcaatacccctcgatctcaccttggccgagtcacgcccctgcaccttccacaacggttggctctccctttccaagaacaccaacccatcccagttacttcacctaacagtccgagccgagcctgacccgcgctttgtattccggttcgacggcgaaccggagtgcagcccgcaggttttccaaataaaaggcgacgtcaagcaaccggttttcacttgcaagttcagcttcagggacaaggacaaggctcacttcccttcgctcaacgccaaccacgccgccgagcgtaaaggatggtccatcaccgttcacgacttgtccggctctccggtcgccgccgcctccatggccacgccgttcgtcccctcccccggctcgcagcgggtcagccgctccaacccgggggcctggctcattatccgccccgacggagacggcacctggaagccatggggccgccttgaagcctggcgcgagcccaacaactctaacgccgtcggctaccgctttgaagtccttcccggcaccgccgaccccgttaccctagccgcctccaccatcagttcccagcacggtggaaaatttgccatcgatgctacatccggcgttactccggtgaacactccccgcgggagctgggacctcgggtccggttccgggtccggttccaattcggatttcgggttggaaccgaatttcttttataataaggggtttgtgatgtcggcgatggtgagcggagaggggaagtgtagcaagcccgaagtggaggttggggtgcagcacgtgacttgcacggaggatgctgcggctttcgttgctcttgccgcggccttggatttgagtatcgacgcttgcaagttgttctctcagaaactccgaaaggagttgaggcagtagattccattccttcgtttcgtgtcgttttgcgtgcaattaagcggaatctgtaaccaggagaggagagaactcattatattctttttcatttttttttcttcttctgagtttttgagtgaggatgtacagttaggaaattatttggcatttgcttagcttaggcataaagttttgaattcttattttgcttacagatcagatcttcttgtattcttttattcttcttttttttatgaagagtttgtacagtatttttaattcatgtctcgtgtgttggaattaagtaagatgtgaaatgaagcttgagaatccaatgttttggtttaaatgaatgcatctgatctgaggtccc

SEQ ID NO: 25750 - DNA, 420 bp, Glycine max
  unsure (1)..(420): unsure at all n locations
  Clone ID: PAT_MRT3847_123254C.1
ctccagcctaatcttctctagcttatcactcttcactcttcattgatcatcaacacttanacccagcgggtgtaaattaagggaggggtggttaatttacatttccaccattacaaatcaaatcacaacgcgattaattcgttttctatcatatcaggcatctattccatcttcatgcacatgaatgagaagaaacttactgtatatggttacataaaccctgtcaatgtggtgagcaaattcataaaaacctgtcacccataatatttaacctttttgccatcaaaatagccacatattaataaagatccaaattaacaaatttatgagcttttcaagctctacaaagcatataatccccacatgaccacccactattatgttcaaaatgctgattaaaacccaaattcttgttctatt

SEQ ID NO: 25751 - DNA, 1632 bp, Glycine max
  Clone ID: PAT_MRT3847_123255C.1
aaaaaaaaaatcacttattttgtagaacaaattcatctaattcacttaaaaagtggattttacgggccttaaaaacggatcggaccgtcccgtatataaacccctaattttaatataagaaaatgtgatagcaccttggtttgtttgggttagtttaatttattgattttctcttttttggtaaggcagttgaattaggagcaactaaccaaaccaccccaatttccaaccacaacacggaatgttcaaccatcgcaaaacggaaaaaatggaaggcgagtgaagacacagagagagacagagagagacagagaaacaaagaaaagaagagagagagagagagagagagagagagagtaaggcatggctgggttactggcatgggcggtaggaggtggcggaggaaaagaagcggaggacgacggcatcatcccaatcctgttttctgcagatcagcaaaagtacgtcaacgaactcgatcagaaggcgagctctctccggcgttggatccatgatctacggcaaagattgcctccccaggacatctcccagagcctcccacacctccacgcccactccctggcctccaacgccgccctcgccctccaattaaactcccactccaccacgcgccaacaggcccaacttagagaggtgacgttgaaggaagagaatgctgcgttcgaaaatgcaatatcagattgtgagaataaaataaaggagaaattgcaggaggctgatttactgagggaaaagttgaaggagatggatgaaactgagaagaaactgaaagctgaggtggagaatatgaagcagccaagttgggtatctgatggttgggaggaagagaagaaggcaaattctaaagctggattggaggcagaatcagctttactagatgaattggaaaagaagaagaaagatatgagttcaatggagaatgctgtacatgagttggagaagaaatgggcacaagttcaggaaaatgcacttaaacagccttcccctgggcaaagggagaagacattggataaacacctgcatggtctaattgagcaactagcagttaaacaggcacaagctgagggcttacttggtgaaattcatctgaaagaaatggagctcgaaagattgaatgggctatggcgacgaacggagagtagcaattcagaggcgaacactgctgctaggaatcgtttcagtaaaggctcctctgataagttacatagtttgtcagattacgaaggtcatcagaggcttccttatcattctgctggccgaactgaaagccagcagaggcttatgctactcaggtcggcgttcgtgctctatattttagctttacatatactggtatttatcaggttatctttttaacaagcattgacacatgaagatgacatgttaatttttaccgcgcatgtttgaatctttatttgtactcattaaatatccattgcaaatatatacagaagtctgtaaaaatattttttgtttttttcattcatgctttgaagtttgatcaaaatgtagcatctatgcgtacagttacagttgaaagagagataagtacaagaaaatgcagtttttgcagccgaaaaaaaaaaaaaaaaaaactcgaactagttctct

SEQ ID NO: 25752 - DNA, 2362 bp, Glycine max
  Clone ID: PAT_MRT3847_123256C.1
cccactcgtccgccccacgcgtccgcccacgcgtccgcccacgcgtccgcagccattggcatgtcaaattgcaagtggataggaactggagagaacattttggaggatttggatatcaattcttgtcatggtctcaaatcaaaattgtccgagcattggatggatgtctacaggacagctggaggcaaagatattagttcacctaaacagaagatatttttctccctttgcagcagttaccgggatatactttactgtaacaagaggcctttctatctcaaaggtcttgaagacacaagcatcatggatgcatacataatgcattctctcaatcatgtcttcagaactagagactgcgtgaaaaaaaatgattccaaactgaccaagcttaaagagaatgctgatagtgataaatttcgagatcagggttttactcgtcctaaggttttaattttattgccattggcaagtattgtgtaccgtgttgtgaagaggcttatacagcttacaccttcagctttcaaggtcaatgttgaacatatggatcgtttctccactaaatttggaagtgaagaacataaaggtaatacagaaaatgacgatgaatctgaaaatgcaaaacctcaaaagtcttccaaagcgacagattttcaaatactttttggtggtaataatgaggatgactttatgattggcatcaaatttactaggaagacaatcaagttgtttagtgatttccatacctctgacattattattgcttcagcactttgcttggttaataaaattgaagaggctgggagtaataaggaaaaagatgtagattttctttcttccatagaggttctgatcattgatcatgcagatgtaatatcaatgcagaattggtctcatgtgcatacagttattgaacacttaaaccgcttaccatctaagcagcttggaacagatgtaatgcgcattagaccatggtatcttgatgatcatgccagattttacaggcaaacaataatactgggtctttattcaaatccagatgtaaatgcttcattcaatcatcagtgccttaattatgaagggaaggtgaaattgatcagtgaatataaaggtgtcttacacaaagtggtacccgaaatacgacaaatttatgaacgatttaacgtagactctatagtagaagctgatgatgctcgatttgattattttgttaaaaaggtttttcccagaataaaagatttagatcagggagggaccatgttgtttaccaattcttactttgaatttattcgaatccgaaattttttgaagtcacaaaatgcctccttttgtctgcttggggagtatacaacccaaagtgatatttctcgtgcgcgtctttggttctatgaaggaaaaagaaaaattatggtttacacagagagatctcacttttaccacagatataagatccgtggggttcagaatttaatcatttattcactcccagagaggaaagaattttaccctgagattgtgaatatgcttgatgggtcggacaatatgacatgcactgtccttttttcctaccttgacaagcttcggctggaaagaattgttggaactactccagccaaaaggatggtggctgcggagaaaggtgtttttgttttctgccattagaattctgccaaggcaaccatgtgaattaccatgggtccatggtagtggcatcattgattattatatgtgaccatggattccaagaggctcccgaaaacgatcttgatgatacaatgagtggaaaatagtgccgaggatgcttgaagggacactgactgtctagaaaaaaaatcatggaggaaaactctttgggttggttttgttttctattaggccccccccccccccccatcacaagtgaattcagtttagttcaatgatagaactgtaaatgtaataggggttattttttatgatagcaaacattctagaagtagtacgaggggttataattctgataatagtattatttttttggtcagctatattgaatgatgtcaaattatagtcatgtttgaagcagtttgtaccctagaacgggggcattaaaatgctttatccttttcaatgaaaagtctagaagttcttctaaaaaaaaaaaaaaaaaaaaataaaaaacaatccatgtccattattatgtcattagttgaatgtgattatttgatactagtgattttttctaaattcatattaggtagttcttatgttgcattttgatttatgagtggtcttttttggtaatttaggtatacaacccaaagtgatatttctcgtgcgcgtgtttggttctatgaaagaaaaagaaaaattttggtttacactg

SEQ ID NO: 25753 - DNA, 576 bp, Glycine max
  Clone ID: PAT_MRT3847_123257C.1
ggatgacatgtatcttttaccggaactaatcttcaagcaaaataaaatcagggtagatttgagtaatagataatttacaagaaccaatataaagaatgggaagtaacctaaaaatgttttttccaccttaccaaacatcctatattttttttaaaattgaataacaaaatcggacaatacaaaaattaggaaagggtgtacagtctacaataatcgatggatggaaagagtggtcattgaaatggtagcgaagtctccgcactttcctgggtctgcggggtttcaacactgcaactttccttaaaaactgggccagcaattttatttgggggccaatagcgaaataccgatctacctatgatatttttggcacacatgggagtcatagctgttattggggttgtctcccattacaaagacgtagttttttggcacacgtgtgggtttcatttcataagcagggggttcaaggatgtactcttcatttttttcaaccccattaactacaaaatggcctttacgaacctccacaatatcacctttctttggaaccataccctttataaacacatcaaa

SEQ ID NO: 25754 - DNA, 813 bp, Glycine max
  unsure (1)..(813): unsure at all n locations
  Clone ID: PAT_MRT3847_123258C.1
ccacgcgtccgcggacgcgtgggttcttcctctgctctccgttttcctcaaaccccactcgcattggtcttgcacaaactcttcaattccttttcttcttcgcttccagcacgagcattgctacctgacttattatcagcttggagaacattgagctaccaatcgaacagtgtctaaaccattttaatttgtgggtcaaataacaacccgcctcggttgcaattcctgattggccatggctgattttcagacctctacacaccgagccaagtggattttctctcctcaacagctggttgagaaatatagagctgccaatcagagagccaaacaaattctagagaagtgtggagcaacactaatggaagtagatgttaatgggtcgttgtcatatcctgaaccccatatgactgcaaaggatagtggtaatgttattagtgtaaatttcactcattttccccctcaatatgtagatagcattatgtcttttaatcttttaattgttttcaaagtatttcattaggttttgttccccttgattgactttaattttctattctctagggcccacaagaaacgtattttaaatcagctgaaaaacgttatcgcatgaagaaaggcacttgtggcaattgctatttttcttgttgtctttactcttgttcctgttgggaattagcttgcagaggaactgggtataggtcttgtaactgcattttgatgtttatttatgtgtacactaaggccatttttaattaaaattgagtagtgaaatatatatatatataggtaatatcgttaccctccnncctc

SEQ ID NO: 25755 - DNA, 252 bp, Glycine max
  Clone ID: PAT_MRT3847_123259C.1
atttttccttttatttcttattttttttatctcgcttattctttgtttcaaaaggtgcaaacatggggactttaataaaactcttaattcctgcaataaaaatatcctaccagaaatccgaaaccggccgtatgaagaattgtccccataattggaaccaatcttatatcctcagcgtttcccacctcccccaccaattttgggacctttgggcttggcaccctttaaaatacattattccccttgagaatt

SEQ ID NO: 25756 - DNA, 683 bp, Glycine max
  Clone ID: PAT_MRT3847_12325C.1
ccacgcgtccgtcccccacacgtccgctctctctttctctcactcatcagtaaccaaaagacaaccaaaccaaacaatgaagaaaccttaaccttgtacccctcactcgctccccttgttgtcccttccttccgatccaagtgagtgactccactcgcggcgcgtgacatgaaaaaaagatcccacgctggaacccacacgccacgcaatgcaagaccccgccacctccgacaccgatcaccaaacgacgccgtcgccgaagcgcagcaacaccaccacgactaaccgttctagcaagcgccccgtgttcaaggtcctcccggggcagatcgcgttccgcctcgtgtgccacgcgtccaccgtcggcgggctcatcggcagctccggctccatcgtgtcgcagctccgccgcgagaccggctgcaaaatccactgcgaggactccctctcctccgccgaggaccgcgtcatcctcgtcatcggctccctctcgccgcgaaagggcctcctgctcggcgacggcggcgaggtcgaggtctccagcgcgcaggaggccgtcgttagggttttcgagagggtttgggacctcgaagccgagaaaggcgttaattctaacagagctgttaacggcgaggttttctcgaagttgctagctcacacttcgcagattggtgccgttgttg

SEQ ID NO: 25757 - DNA, 478 bp, Glycine max
  Clone ID: PAT_MRT3847_123260C.1
attccctcacctttgagtccctgagtccgaccattaacttggcctacatcaggaagaactactggaacccataggatccgacgatcacatttcttgggtcccgcaaggctagggctcgaggtccttcagatgcttctacttctacccctgctcccactctagcacctgcaccagcactagttccttctctagcaccctccggccccttcacttcgagcacaaatgtgatagtgccgatgctgcagagcctccaccacggcttatgcctggtgatgcaaagtatctatgacctggctcagtagaggcccatcatcagcatagaagcctttatggcccaggtggcctggccaggagtccagccttcttcttctggggaggtgaggctcctatagcccaggagccgcagctagaggcagaggcagaggagacgccagatgacacacctacgaccacgcccatataggtcactgatgaggat

SEQ ID NO: 25758 - DNA, 484 bp, Glycine max
  Clone ID: PAT_MRT3847_123261C.1
agcctctcccctgcgaagcgcggatctattcaccaagcttttgaaaagctttggaagcctttgggttgtccaagttcaggagtgctcgcaaactgctcctatcctagaaacagctatagaagaattaaatctttggcttgttcaagttcagcaacatttcaagttgctctctaacttttgggctgataatgtggatgaagacaaggaaggagcctaaggaagaggagttctccactgtcatttccaagggaaacaagaaaaatatgaatgttaataaaaaagcttcatcctgcaacaagattgctagaaaattattctccggttgggaagaaaaaaccttcacactagggtacatgtaacttataaagaaaccgtcagcattattggcgatttgaccatacagcgacatgtggagggaggaaatcgtcaatagttttgacgagatacatgcatgaggaaatcgccaatcaaaccagcgatttaa

SEQ ID NO: 25759 - DNA, 620 bp, Glycine max
  Clone ID: PAT_MRT3847_123262C.1
ggggatctaaacgcatctactgatttaactaggatcaaaggactttacagccacaattttttattatcaaactacactacgccaagggaaaaaaaaaaaaaccctaccattttattaaaacaaaaaacgtataaatgaaaaaaaaactgaaaggataaaagatatgcaaagaaactaactaaaatacttaatttaaacctacaaaaatataactgtttatatccttaaaaagaaacagctgcatcacttattcaaagctcatcttttactgattcttgctgaaccactttatcccggtttttttcaaggaaatctatgagggcttcctttttcctacttccatcaaactgggaaatctggccacttgctgacctgaagtacactgttggataaccttgtacatcaaaagtatcacggggtatatcgttggcagttgcatccagttttgcaataataacatcaggattactttgatatgaaacagcaacttcctccaatatcggagccaactttttgcagggactacaccaaggagcataaatctccagcaaaacatttttccctgagttgaaaacaatgtcctgaagattgtctgcaactactactttaacagattcatt

SEQ ID NO: 25760 - DNA, 301 bp, Glycine max
  unsure (1)..(301): unsure at all n locations
  Clone ID: PAT_MRT3847_123263C.1
tgtcccacagccgatcgtcagcttatcacacactacggngatntcncntncncccgcctgntcntgatntgncagtcccncagtcgantccggcantcgtcnctgcacctgntgcattcttatttgatntgctanatgcnnacacgcttaccnnntcngtttgtnccgnnngncgccattncggtttnacaaaatcntgcnatcgttgnaatntccttcccagtcttcacnnancagcanaccagtnttnccgngnccaatccgntnaccatccgattttgnccctncgncgcanttttnn

SEQ ID NO: 25761 - DNA, 462 bp, Glycine max
  Clone ID: PAT_MRT3847_123264C.1
ggcttcgaacctttgggctgatttatgtgcttgcatggtcgtgagaagatgatagaaggggatacaaagagaaagtaacggtcctctcggtaagtccagtcgccgcctaattactcatcgctaagggttccgtcggaatcaagtctctccctaagtttctctgttagagtcctagatttaagaaccctaggagcggcgttgccgcagtaaagcatggcgataagagcgcgcatcccgacccggaggactcaggtaatatcatcggctagcgggatccgcatggtcttgacgtattcctatttcataatttctcctagagtaagcctcctgagatacctgttgtcttacctataaagaggggaccgccatcaaagcccccgacttcgggaggcggccttatttcggtacatccgagcgttatagtgctaggcgatacctcattaactaagaagggtttataat

SEQ ID NO: 25762 - DNA, 1039 bp, Glycine max
  unsure (1)..(1039): unsure at all n locations
  Clone ID: PAT_MRT3847_123265C.1
cacaaacacaacctctctccctctcgattttaacaaccaactgccaaataattaataatacaataacctaaataaaccgaactctggttaatcattgtgacacgttattttaatttttggtagaaagtaaacaacaaaaaattaaatttgattgttgcttattaaagagagggggagggagacaagatacaccaaagtcgtcgctcatggaagacttactcggccttttaaggattcacatcaagcgcggtgtcaacctcgccgttcgtgatgtcaatactagcgatccatacgtcgtcgttaagatgggcaagcagaagctgaagactcgtgtgattaaaaaggatgttaatcctgagtggaaggaagatcttacgctttctgttacagatccaattcatccatttatactgacagtgtatgactatgacactttcagcaaggatgacaaaatgggagatgcagaatgtgacatctcagcatacatagaagccttaaagatgaacttagaagacctccccagtggtactataatcacaagaatacaaccaagcaggcaaaactgtctggcggaggaaagttgcatcacttatagcaatggcaaagttatccaagatcttgtccttagattgcgacacgtggaaagcggtgaagtggaaatccaattgcaatggattaatcttcctggctccaagggtttatgatttctttatcatatgcatgcattcaactttcaagcaggggtgggttttatatatcaagtacgcgtaacaaatattaccgactctacgtgtctacctatatttattttatttatttatttgcagttcattagttggcttcaattgtttgttctgttgatcgagctagcctgtcagcaggcaaatgtatcgtgttgttgactgatgcaagagaagctttttctgttatttcttgcatattttttcaagttcaaaaagtcatatttaatcatcaaaatcacttgatgctttgcaacacgtaagatatatttgttnatcaatatncatattgatattat

SEQ ID NO: 25763 - DNA, 317 bp, Glycine max
  Clone ID: PAT_MRT3847_123266C.1
ccacgcgtccggaactcgtcaagaatattctttttagagtttaatggccataatacactgacaagagtttggattctctacaatccctctacagccatcccatctctctgtatcatttaatttcaacattttattttctccccccatccatacacttttgtcggtgtgaaccaataaaaaacaatacttgatgttttttttataaaaatcaataaatttattatattacttgtgatgagatgataatgtaaaatgtgagtatgtgtttaatctttaattttttctttttttgtgggcatgtttcttgatatatctac

SEQ ID NO: 25764 - DNA, 620 bp, Glycine max
  Clone ID: PAT_MRT3847_123267C.1
catgttgccatgcatgactgggatattatacaagtctgcattctgcactaacatgtacagatccaaaaaaatgtctatgacaaaacaaaacatggaataagagtagtgtagggaaaatataaaacaaagaaatttaagtgcagtccgaggtatgaggacacgtccaagttactcaagaaaaaccagaatagtacaattgctcaggcttgtaattgccccatttctcctctaccagttcctctgggttgttaaagaaacttcctagtgactgaagaggggctatgcggagttcatgctgtaaacatgggtagagatcagcctctctagcaacataagggagagtattcggtgttgccacatcctttttttctgttctttttcttatagaataaacatccttgatgttagaggacaggagaatagctgtctagatcaaaatcatttctcctttgcttgtagcttgcataatttctgatgatatattgcagttggtggcttaaaaacataggtccagatttgcaaattgattttgctgcaacttgattgagttttccagggagggtttggcagcatccttttttcgtccagctgagattcttcctttgcttctttttccttga

SEQ ID NO: 25765 - DNA, 515 bp, Glycine max
  Clone ID: PAT_MRT3847_123268C.1
aaggtagtgttaaggtgaatcagaagttattgtacaatcgaatgtaaccatgcccgagaaacgcctctgaaatcgtttgacgcctcgctgttaaagaatgcccctaacccatatgttataacaacacacccgctatgctcgtacaaatgttccgtcgtttttagttttccttctctcgtgagatgcaacaaaaacgcccttgcctccaatttttgatcgatcttccgtctatatctaacaaattttgcattccagaaatggcgcctgctttgaaaatgtacaaatgtgtgggatcggtccatgtgtaccggttcccatgttagtgtgatgagacttctctagtggaagaagtacttgctcaacttgagcctgctgacgtcgaagtcgcccttggccgggacgtcggggaacttcatcggcagccagacgtaaagtttcttctcgaacttcttcttgctcgccggttccttcttctccacggtgtgctcgtcggtggactcgtcgacgacgtcgtc

SEQ ID NO: 25766 - DNA, 143 bp, Glycine max
  Clone ID: PAT_MRT3847_123269C.1
gagaggcataatcaccagtgtctataacgacggctggtgcactaatctgttcaaactttcatcctcgaaagaaatgtctcgttacatcctcactcaccaaatcatcttaaccaaacggactgcctttttccccaaaaactatt

SEQ ID NO: 25767 - DNA, 1200 bp, Glycine max
  Clone ID: PAT_MRT3847_12326C.1
tacggctgagtaaagaagatagaaggggaaagcggtgactgtgagaatggaaggaaggaggcgtggaggttatagtggtcgacgcatagttgcaagcagaagagggagcggcaaaagcaatgccaacaacaacaacaacaacaacaacaaaaacaacaacaacatcaatgtcatcaagaagcttcagagccgcgaaatttggtcgaagcctcatcgagcttttgcttctgtcactgcttctcacagattccgctctatgtgcttgacgcaccaatacgacactcatgatccctccaagactccctcttccctttggcccttcttgatgaagagaactaaagttgtcgaaattgtggctgcaaaaaacgtggtctttgctctttaccattctggtttgtgtgcagcttttagtagagtttttttcattcggagcctcttctataataagaacaacgactcactcatcacagtatccgtttatgcttctgagaacttctgctctttgaaatgcagatccacaaagattgaatacatacgaagaggcaagccggatgctgggtttcctcttttccaatctgaatctttgaaatggcctggatttgttgagtttgatgatgtcaacggaaaggtcctaacttactctgcacaagattgtatttacaaggtctttgatcttaagaactacaccctgctatattcgatttcagataggaatgttcaagaaatcaagatcagccctggcatcatgttattaatttacaatagaaccagcggtcatattcccctgaagatcatatccattgaagatggcacaattctcaaagtgttcaaccatctacttcatcggaataagaaggtggacttcatagagcaatttaatgaaaagcttctagtcaaacaagaaaatgagaaccttcagattcttgatgttcgtagttctgagctgatggaagtaagcagattggagttcatgactccatcggcatttatctttctgtacgagaatcagttgttccttagtttcagaaatcgaacagtttctgtttggaacttccgtggggagcttgttacttcatttgaggatcaccagttgtggcatccagactgcaacacgaacaacatatacataacaagtgatcaggatctcattatatcttactgcaaggctgattctgatgatcaatggattgaagcactgct

SEQ ID NO: 25768 - DNA, 635 bp, Glycine max
  Clone ID: PAT_MRT3847_123270C.1
cccaattctccatttttatttataaaataaaaaaggagaagtaatttgcgtccgcttttttttccctcttctttccctttacatgatatgaacgcttcactctcttcttcttcttattctttccctttctttgttttggtgttttgtttgcagtcgccgaatctgtttctgcacgctagggtttccgcgcgctctccacgctgctcccgacgctgccgccaatgccttcgttcacgatgttgcgtcgctccgcgacttcctcgccgacacgcgcagggacgacgccaccgtgcaggtccccgtccccaaggttctgcccccgccgccgcctcctcctcctccatccgacgctgtttctctcggcgctgacgcgctcgatgagtcggcctccatgaaggccaagcgcatcgccctccagcgcaagggtgccgccgccatgatcgccgccgaggagtacgctcgccgcttcgagtccggcgatgtcgtgaatactccgggaaatgttactggagacgaccagggtcaagccaataggagctattggtcgaatttgcaaatgtggagaaaatgaaggaagtgagaaagcttcaaagatgctatctgtgcaaagttgtgggaagaagtaccataggaac

SEQ ID NO: 25769 - DNA, 327 bp, Glycine max
  Clone ID: PAT_MRT3847_123271C.1
taacttgctagagtgaataaatgttgcatgacttggcatatcgatttaggaagagcgttttcagactacacagggggggcaaaagacctcgaaccctctctcttctatcctacgaaattcttaacctcgaaaagttatcgtcagatgaagcttctgcgcagattccggctccgatttccaccggaactaaagtggctccttcacctgcgctgaattatgcggcactctcgtcactcaattgagaccaggatattgacaaaattaacatatatttgtctatggaggtaatccacgatgaataatgccgaatcctaatttaattccatg

SEQ ID NO: 25770 - DNA, 568 bp, Glycine max
  unsure (1)..(568): unsure at all n locations
  Clone ID: PAT_MRT3847_123272C.1
ccacgcgtccggattcaattcatcacttcactctttctcacgaaccctaatccctaatctacaatcaattagggtttctcatctcatttccacgaactccatttcattccactccttgatgatcacaaatatactttcccctttctccccttcttctcaattcccgaatcaatcgcaaacctcgattcctttttcctcttccaatcgcacccaaagctaaagaataaatactcgttcaaatatcaaacgcccaattccctcaatcccaattcactcgatcacacacacacactctctgtttcgatcatggacgtggacggtggcaacaagcgcgtgtacaaccgccttggtggggacgcgaagcaccagaaagtgtgctaccactggcaagcggngaagtgcaaccgctacccgtgccccttcctgcacagcgaatcgcccgcgaattcgcaccacgccaatggcacctcctcgaagcggacgtacgacaattcgggcttctccggcccacgccgcagccccaatttcaacaacacgtggggccgcggcgggggccgcggtggtggtg

SEQ ID NO: 25771 - DNA, 1503 bp, Glycine max
  unsure (1)..(1503): unsure at all n locations
  Clone ID: PAT_MRT3847_123273C.1
tacggctgcgagagacgacagaagggggttccaaaagcaacttgtgaagcagttggacagagaaagaagaataaaacagtttttagaacattgcattcagtcactttgttgcacagcttaaactattttgaaagaaacgaatcctgaagcgtgtcactcccactctcactcaatcgttcagccccttctcttcaattttagggttttatcacaaactaaaatcctcaatcatgggcaccaaggttaggagaccctcccatgctggctcttggtacaccgacaatcctaagcagctttcagaggagcttgaagggtggttgcaatcgtgtggtttgaccaaatcttctgatgtgcggggagtgatagcaccacatgctggttattcctattcaggaagagctgctgcttatgccttcggaaacattgatccatcaaatattacacgtgtgttccttcttggtccttctcaccactattacactccaaaatgtgctcttacgactgcaactgtctacaagacacccataggggacctgcctattgatttggaagtaactgaggagcttaaagctacggggaaatttgagctgatggatattcgtgttgatgaagctgaacatagcatggaaatgcacctgccatatcttgccaaagtatttgaagggcaccaggtgaaaattgtacccattttagttggtgctgttagtgctgaaaatgaagctatgtatgggcagattcttgccaaatatgttgatgattccaataacttcttctctatttcatcagacttttgtcactggggatctcgattcaattacatgcactatgacaagaaacatgggcctatatacaaatctattgaggccttagacaagatgggcatggatatcatagaaacaggagatccagattcattcaagcaatatctgttggagtatgacaatacaatctgtggacgccatccaattagtgtttttcttcatatgctaaggaactgctcaacaaagataaaaatcaaatttcttcgctatgagcaatccagtcagtgcaaaagtaacagggatagtagtgttagttatgcatctgcagcagcaaaaactgatgattcaagctccagttgaaggtcttcatttatggggcattcagcaatttcatttcctctaaattgactatttatgtttaagctttgaagtttgaacaattggatattatgttcgatgtttatagatcattctcactatcatttatcgcttgtctttagctggggaagttgtcaaataatcaaattcctttacacttctagttggcgtccctagctaacgtgcttggaaagttgtgactatgaacatgtgatcatgttttggttgcaactgtcaagttcttaatttgcactttgtctacatcagctttgtttttttttttttgttttttttttatgtagtcttagctgcgtaatgacgtgttagtactgcttactgtggcatttgctaatgatgctnnnnc

SEQ ID NO: 25772 - DNA, 327 bp, Glycine max
  Clone ID: PAT_MRT3847_123274C.1
gtgtgtttttttttttttttttttttcacaaacgctgtttaataaacttgaaaactacctgggagtttaccaaactaagtgtacggttgcaccaacggtcaccttttagtaaacaacccaaagggagatagcgccaatgattttccaacccctcccaaaaattaattaaaacactggtagctgcaaataagttttcaagattctagaacacacaggagtttccctttacagaatgctggctgggaaagaaggcatcctacggaagaaattcaccggggcagggggtacctggtttcaaagcatggggtgctctttcgggtaaattcc

SEQ ID NO: 25773 - DNA, 308 bp, Glycine max
  Clone ID: PAT_MRT3847_123275C.1
aacttattaatttgtttcgtttttgggctctttttttttttttttttttttttccgaaaacaaggggttttttccccccttgagaaaaattctccgggaaaccgcagggggtatatagataccacaaggttcctccaattaaaaaaaaattctttttggttgagaacccccccttcgggttttttaataaaattctagacggacaacaagattcttctttgttttgggggggggggggaaaaattggtcgaagcccctccccgtaccctttttctaataacgccgtggggaaaaaccgtggcttcacg

SEQ ID NO: 25774 - DNA, 563 bp, Glycine max
  Clone ID: PAT_MRT3847_123276C.1
ggaaagtgttcctggagatgttaaacaattgcttggaccaagtgagaactcactctgttcatcgtgtcgtcatgcgctgctacattcacttcgagggctcgtgaaacggcacgttgagcttcaacacacttattggacgtgctgctcacattgaattcttggagtgtgacatttttgtcaagttcataatgtggtctttcccagagctctttagttagtaaaaaaagggtactatttgcatgacataagacttacactattacacaacatagtgagatcaaagcaatcattagatgccaaggtaattatttcttgcattggcatgcacaaccaacagcacgtgtgtacgatatcggttaaaagttaaaagtgttttacaagttgttggttttgtgggcttattaggcaaaatggtgtatagtaacaattggaattcaagaattttctgctgaaagtcaaagttatctctttacattgtgattttgccttgttggtccagtgtcgtgtcaactgtttgttttgccgttgtctacggtctaattctgattcttatttttcatctc

SEQ ID NO: 25775 - DNA, 264 bp, Glycine max
  Clone ID: PAT_MRT3847_123277C.1
caccccgggagcctgttgtcgagttcgctcgctacgatatcttcatgcaccacacttttcgcgatttccgagatgacccttttctctggaacgctctgctcatgtaccactctcacggatgggacccggcagagcccctattctgctctgcttgagaccgaaaaggggagcatgcggatgggcactcgcttcccgcggttctgaatgcttgagctatagtggggttggttaaggagggaatgcaggcttatgggttgttgtgga

SEQ ID NO: 25776 - DNA, 636 bp, Glycine max
  Clone ID: PAT_MRT3847_123278C.1
aacaaaaattatccaccggggcttcttgtcaccatattatcatatcatgtacaaagcaacaaatacaaggatgcacccacattttaacaacaaacactattttctggagattaagcacaccagacagggactcatggcatgagattatcatctgacccgtaatgtagctgggccacctggtgagcaattcgggtttggagaccgacaagtagcaccgggaccaacattgtttgaaaacttgtggcgcatccggcagtcagagattttgttcatggcaaaaggcccagcactcccactatttgatccagataatgagacttcacctggaccaacacttgaactttgcaagggctccaatgtctcaactacatcactcattagtggccttgctttgggattttgactcaaacagtaataagccaagctacatgctttttgtgctgccctcactgagtattgattctccaatctaggatcaattatttgaaggagctttcctccctgttaaaagctccaaaagaacaacgccaaagctatagacgtcactcctagccgtcaggtggccagtcattacatattcaggggcagcataaccataggtacccatgactcgggtagatacatgggtttcatcac

SEQ ID NO: 25777 - DNA, 865 bp, Glycine max
  Clone ID: PAT_MRT3847_123279C.1
cgacagaagggggtagattaaaataataatggtaatatttatgaagagggtctgaggtccctaaagggaggggcacagaaaagattgggaagggacgtccgtgaaaatcggagacaggaagaagaagaagagcatccccagcgacgaatgaatgggcaattgcggaagcagagaggaatctgccgtagtttccaaggctcaagttgttcagcagcttcaccatgcgacgtcgttgggcgccagtgccaggaccgacaagaagcacgctcacaggcacaatctcagcgagtgcgcttcggatctcagcgagtcctgttccacaccgcgcggtaacaatagcagcaacacgctgctctacacgcacgtcatcgctttcacgctctacgagttggagaccataaccaagagcttccgcgccgactacatcctcggcgagggaggcttcggcaccgtttacaaaggctacattgatgagaacgtcagagtcggactcaaatcgctccctgtagctgtcaaagtcttaaacaaagagggtttacaaggacatcgagagtggcttacggaggtgaattttctcgggcagctgaggcatcctaatctggtgaagttgattgggtactgttgtgaagatgatcacaggctgcttgtgtatgagttcatgttccgagggagtttggaaaatcacttattccgaaaggcaactgtccctttatcatgggctacaagaatgatgattgctcttggagcagccaaaggacttgcctttctccacaatgctgaaaggcctgtaatctatcgcgacttcaaaacctctaatatattattggactccgactatacagccaaactttttgattttgggact

SEQ ID NO: 25778 - DNA, 214 bp, Glycine max
  Clone ID: PAT_MRT3847_12327C.1
gacatgaaagtgggaagagactagttgggaaaataaagggtcgtcaggagtcggaaggaggtaagatataggaactgcacatgagcacactacattgtatacatgctggaactgtcaaaagtgttctaaaacccctacaaatatgccgtactaagtcactgaattgtataagtgggcaaatgtatactatgtaaactatcaataaagaatttaa

SEQ ID NO: 25779 - DNA, 2071 bp, Glycine max
  Clone ID: PAT_MRT3847_123280C.1
gaagagggtctgaggtccctaaagggaggagaaaagaaaagattgggaagggagaagcatgaaaatcggagacaggaagaagaagaagagcatccccagcgacgaatgaatgggcaattgcggaagcagagaggaatctgccgtagtttccaaggctcaaggtctcagatctagggctctctgtttcataattaattactctcctcactcactcgcattctttcttctttacttgcttcagttgttcagcagcttcaccatgcgacgtcgttgggcgccagtgccaggaccgacaagaagcacgctcacaggcacaatctcagcgagtgcgcttcggatctcagcgagtcctgttccacaccgcgcggtaacaatagcagcaacacgctgctctacacgcacgtcatcgctttcacgctctacgagttggagaccataaccaagagcttccgcgccgactacatcctcggcgagggaggcttcggcaccgtttacaaaggctacattgatgagaacgtcagagtcggactcaaatcgctccctgtagctgtcaaagtcttaaacaaagagggtttacaaggacatcgagagtggcttacggaggtgaattttctcgggcagctgaggcatcctaatctggtgaagttgattgggtactgttgtgaagatgatcacaggctgcttgtgtatgagttcatgttccgagggagtttggaaaatcacttattccgaaaggcaactgtccctttatcatgggctacaagaatgatgattgctcttggagcagccaaaggacttgcctttctccacaatgctgaaaggcctgtaatctatcgcgacttcaaaacctctaatatattattggactccgactatacagccaaactttctgattttggactagctaaagcaggaccacaaggtgatgaaacccatgtatctacccgagtcatgggtacctatggttatgctgcccctgaatatgtaatgactggccacctgacggctaggagtgacgtctatagctttggcgttgttcttttggagcttttaacagggaggaaatctgttgacaagaccagacctggaaaggaacagagcttggtagattgggcacggccgaagctcaatgacaagagaaagctccttcaaataattgatcctagattggagaatcaatactcagtgagggcagcacaaaaagcatgtagcttggcttattactgtttgagtcaaaatcccaaagcaaggccactaatgagtgatgtagttgagacattggagcccttgcaaagttcaagtgttggtccaggtgaagtctcattatctggatcaaatagtgggagtgctgggccttttgccatgaacaaaatctctgactgccggatgcgccacaagttttcaaacaatgttggtcccggtgctacttgtcggtctccaaacccgaattgctcaccaggtggcccagctacattacgggtcagatgataatctcatgccatgagtccctgtctggtgtgcttaatctccagaaaatagtgtttgttgttaaaatgtgggtgcatccttgtatttgttgctttgtacatgatatgataatatggtgacaagaagccccggtggatcatttttgtatcaatttttggtcttctgttcatctgggtgggaattagtgtgtgaaaatctgtgtacttgtaatcatcgcggcatcagaactaatataacgggctcctcacaacatcagcagtgcaagagtaagacgacccgaacacgcaagtacctaatgatgtattttatttgagattattaggtaaaatgagggtaagataagacaatcttagttaacatttctctgtcaaacccggttagattgtctgcacgctcgtgtctttttgaaatggcctattggtgttttaaagaaataaagatggagggtcattttcaagctttttaaaaaaaaaaaaaaaagggtttttgtaagtttcctagtttgaagtctcggtagatgctctctttttgtagttgatagcatctgtatatactataatacataaagtgaatgagcttgttt

SEQ ID NO: 25780 - DNA, 283 bp, Glycine max
  unsure (1)..(283): unsure at all n locations
  Clone ID: PAT_MRT3847_123281C.1
accacagggccagnccacgatatcagacttagacaagtacttagaggaaccaatcttcccacgcaagtcagattataacaaattgaatttttggaaaggccacatgccaaggaacccaattgtgtctatgatgggacgcgacgacctagggactccaatgacaaccatggcaccagaattggcatttagcacggggggcagagtgctagaatcatctcgaaggggactaaacccagacacacgaaaggctatgagaagcaccgaagaatggctccaaaatgaa

SEQ ID NO: 25781 - DNA, 1120 bp, Glycine max
  Clone ID: PAT_MRT3847_123282C.1
taaaaaaaggaaatatagaaaacgaaaagtgaaacataaaaatgttccttatgaaccagttcttgaagaataacagaaatacctcgaaagaagacatgaatcctgtaaagaattaatgaaataagtgcataaacttttcctatacagtttggaatcttcactccgaagttgaattgcattgaagtttgaactttgaacctctgctggaatgagcaactatgataggttttactttagttagaaatgaggccaaccagtgcctcctgcttgtgatttcctcctactacccaccaaggtctgtaatgctcagcatggccatggccagtgccttcttcctctgtagaagcaggaaggttaaggtcaaaaaagtccctaatttctggtgctgcttcctcaagtacaattgtttgactttgaaaatttcttgcactctcagacccaccagccaagtgatgagatctcttgtggccacccaaggcttggccagatggaaaaaccttgtggcaaattggacactcgtgccctttccccttcttggaatctctcactgtttcaacctcattgtcaaattgagtagtagtagtagcagtagtaacattagtaaccatttcatgttcttccacatactcgttcttcaggagcttactttctgttgtagggtctggggagagttctgcctccaactcagtgctgttctcactgctctcatttcttgaagcaaagcaacccttgatcctcttgtgactagccctgtggcctccaagtgcttgatatgagtggaagattttcttacaagtagtgcactcaaactttcctctcttattggagcttttgctgaattcaccttctgagttcttgttgttgttcacccaactcttcaaaggacttgacttcaactcagagtccataaactttgccttgattgaagtgtacttattgttactattatgattattatctgttccattgtcctcaaatgcagaattagaaaccatggtcttgctgaccccaaatccacttccaggactctgagtagtacccaaaagctctgaactcgtttttccttttgagttgagatttgaacaatccaaatttcccggacgcgtgggcggacgcgtgg

SEQ ID NO: 25782 - DNA, 279 bp, Glycine max
  Clone ID: PAT_MRT3847_123283C.1
tcgaggggctcgagctagatgatagttccttttgattgaaattcatcaacttcttgcagctatggactttctgatatggatgggggacaagacactaaagagaagtggcaaaagtactctgaattcagaggcagtttctccagacaccgatgaaatcacgctagaatacagcgaagacatgtctgtactgagaggacgctcaatcgttttacataggacgccataactgaggttggaggggaacggttattacggacttcagaggtattcatgcagact

SEQ ID NO: 25783 - DNA, 454 bp, Glycine max
  unsure (1)..(454): unsure at all n locations
  Clone ID: PAT_MRT3847_123284C.1
taaagtangnnnaaatgatantatnatgaagnttnaaagggaaanannatattanaaaagaaanngagnanatatttggagtttntaaataaggggtgaatgtannagaggagntgagtggnnttatagaaatgagatgnnagtaattggggaattgtntnaanaaaatattaaagattgtttttatggggtgaatgatnnagtggntttgaagntatttggtaaggcaggagagatgtnnannntggaggntnntgaggatgagagnattaaaangntttatgttggtggaattgatggtaaggtaantgagnaggatttgggggatnanttttatggnnatggagaaattgaatntataaaaatgggtnntnaaagggattgtggttttgtaaaatataaaanaagagaaggtggagaaaagggagaagaagaattttnaaaaaaatgggta

SEQ ID NO: 25784 - DNA, 711 bp, Glycine max
  unsure (1)..(711): unsure at all n locations
  Clone ID: PAT_MRT3847_123285C.1
attacacaaaaactgnnnnnngatctctaataaatactgtactgttagttataaatatagtaatacatgaatatcattagataacactagttttgctttacaaagttttcagtatatcttagctctcttttagtagtagacttcaacccagtatttaacaagcatactataaaattgcaccactacaagaacaagagcctgccgatgtcttctggactgcaatctgaatggaatctcaagacaaaattggtggaagtcggcattcacggtaattccgagcatcggatacaagcataattcaaaagcttggagacaaggctatctggttcagggatgagagaaaatgtcacgctgttccagaaatgaaatgtcaacgaattgtgcaggatattttcaagcagcacatcttgttgagctttctcagtctctgtcgtcggtgcaatgaagtatcttgttatgttctgagaactaacagggaagaagatataagagggttctactttcaactccaagtgcttaacagatttattctcatctcctaaatattttcgagcaaccctcgtcaacagatcagcaccattccctctcaaactggtatcatcatatgtcatgtagaactcttccaaacactcctttacgaacaaactgtgtcttggaaaagacattacagcaccattcaaagcacttccagcaccatgaccctccatacca

SEQ ID NO: 25785 - DNA, 274 bp, Glycine max
  unsure (1)..(274): unsure at all n locations
  Clone ID: PAT_MRT3847_123286C.1
gattcaaaaagtagccttcattgnagaatagtgttttggaaggtgatttggtctntcttgnntnctntcgtactcatanatatctcgcttaagcccctcctgggaactcgtaacgttnctcangtccttaatttcacgagtntccactttgaggtgggatacaagatatgagggannanatagttggtggnaaatcaatccatcactgangntagnancctgnnttcangnttgaattggctcnatnnaatcgtcaangaaaatncnnaaggnt

SEQ ID NO: 25786 - DNA, 1258 bp, Glycine max
  Clone ID: PAT_MRT3847_123287C.1
ggctccagcccaatcttcgccttcgcccacaacaactcctccttcaggatcgctgccaacgttactttccatttttacccttcatcctcgagaaaaaaatggcgaacgcagcatctggtatggccgtccatgatgagtgcaagctaaagtgtacggctgagagacggcagaaggggccgattcccaaaatttctcattctccctttcctctccgaaccctcgatcactctcacgcgctcctatatccgctcctccaccgtcgctctctccaacaaccacaacaccatcttcatcccatggcaaacgcagcatctggtatggcagtccatgatgacctgcaagttgaggtttttggagctgaaggcaaaagaggacacaccgtttgcatagtttttaagattgaggagcagcagaagcaggtcattgtggagaagcttggtgagcctgcccaagggctatgaagatttcactgccagccttcgctgctgacgagtgccgttatgctgtttatgattttgagtatctgactgaagggaatgtccctaaaagcagaatttttttccattgcatggtcccctgacacatcaagggtgaggagcaagatgatttatgcaagctccaaagacagattcaagaagggagctggatggaattcaagtaagagctgcaagcaactgatcctactgagatgggtcttgatgtgttcaaaagccgggccaactaaaatgattatagaaaatagtaggctttctggtgggagcagcactccttaagccttagttactcatggaaaatatcctagtttgtgggatggtcaacttgggtagttatggtcccaaactctcaattttccaagttgtggcataaattctattgcaccttttaacaagctttgcttgttccagtgtgttttattatgatttgtgatttatacaaccttgcgtttgagtgccattttagtcgtcttatcccttactagttgaatttgtaactgtttgtgttatcagacaaaaaatggggtttcttcacttattgacactcgtcatccactaatgttttgtgacttgttctggccgatatatgctttcttttgtatgggcatacaaaggcatcttgttcatgctatattccttttttgttttatggtttggtggaatgagattttattcaactggttgattgttcttgaatgggtgttcttacttgaaaaccaaaaaaaaaaaaaaaaaaaaagaaaaaaaaaaaaaaaaaagattac

SEQ ID NO: 25787 - DNA, 518 bp, Glycine max
  Clone ID: PAT_MRT3847_123288C.1
ccacgcgtcccatcttcttacatggcaaagggggggggggggggggggccatgatgactgcaagttgagggttttggagctgaaggcgaaaagggcacaccgtttcatagtttttaagattgaggagcagcagaagcagggcattgtggagaagcttggggagcctgcccaggggcttgaggaggggggtgggagccttcctgctgacgagtgccgttatgctgtttatgattttgagtatctgactgagggggatgtgcctaaaagcagaatttttttcattgcgtgggcccctgacacatcaagggggaggagcaagatgatttatgcaagctccaaagacagagttaagagggagctgggtggaattcaagtagaggtgcgagcaactgatcctactgagatgggtcttgagtgtggcaaaagccgtgccaactaaaatgattatataaaatagtaggctttctggggggagcagcacccctgaagccttagttactcatatggaaaatatccta

SEQ ID NO: 25788 - DNA, 1001 bp, Glycine max
  Clone ID: PAT_MRT3847_123289C.1
gcacgagtcttgtctttttttttgtttttggttgcatatattcttattctttcattagatttattttaatgatgtttctatattagatttattaatgaataaatatgattttattttgggactgaagacacgacaaacgtaacgcggtttttttaatttttattgatgtttacttgttttggcactaatcactgtctgcttctatccccttgatttggaagataccgtgtttgtggaagtattatttacttatttcgctcgccccctctccctctctctctgcgcgcgctccatccggcgcgtggagtcttttttttttggtaagcaatttgatttactttatggcatatttcaacccaattatgttaacaagttaacaaccctttgctttttttctttcctggagtaacaatttaaatgggaaaaaaaaaagattaacaacatatttgtgcacaattacttggtattgatgaccatggcggtgtgtgtctgcaactgcaattctataggcaaacgccgcatctggtatggcagtccatgatgactgcaagttaaggtttttggagctgaagacaaagaggacacaccgtttcatagtttttaagattgaggagcagcagaagcaggtcattgtggagaagcttggtgagccagcccaaggctatgaagatttcactgccagccttcctgctgatgagtgccgatatgctgtttatgattttgagtatctgaatgaagggaaagtccctaaaagcagaatttttttcattgcatggtcccctgacacatcaagggtgaggagcaagatgatctatgcaagctccaaagacagattcaagagggagctggatggaattcaagtagagctgcaagcaactgatcctactgagatgggtcttgatgtgttcaaaagccgggccaactaaaatgaattatagaaaatagtaggctttctaggaggggagcaagcactccttaagccttagttactcatgagaaaa

SEQ ID NO: 25789 - DNA, 290 bp, Glycine max
  Clone ID: PAT_MRT3847_12328C.1
actacccgtcggtcgccctttgtcgccctttttaaagtattaacatatggaactttaaaatcatttatttccatgggatgacaaggttgtttttatgagaccaccctagttaaaagcatatatgcattggctagagtgaaacaaaacaaggcatctttgtttgtgaatcaagcactgcccgggccaataaaggatacgcattgattatgggaaagactaaagaaaacaccacgaccatcgaggttggggtctgcagacccaatcattctcagcacattgtacattaaatc

SEQ ID NO: 25790 - DNA, 785 bp, Glycine max
  Clone ID: PAT_MRT3847_123290C.1
cactttcattgtgtttgtgtgcaccagaatcatttgtgggaggctaagagggggtgttgaatctcggatgatgtacgagattcaatcaagaattgatatggaacagaacatcatgttaatgaccctgaatccgatcctgttcttcttgatgcaatccctactttgaagttcaaccaagaggctttcagttcccttgaacacacacagtgtgtaatatgtttggcagattacagagaaagagaagtattgcgcatcatgcccaaatgtggccacacttttcatctttcttgcattgatatatggctgaggaaacaatccacctgtccagtatgccgtctgccgttgaaaaactcttccgaaacgaaacatgtgagacctgtgacatttaccatgagccaatcccttgacgagtctcacacatcagacagaaacgatgatattgagagatatgttgaacctacacctactgcagccagtaactctttacaaccaacttcaggagaacaagaagcaaggcaatgatcttagagaactaaaggggttgttctgctcaaaaagagaagaatgtagaatttctgcttctatagaggaatgcttctaattatagattggattcaaattctttgtctgtaatatggccttcatattcacttggtggtgtaaatatgtttccttttgtagcatatgcgggccaaggttttggtggaatttcttgcataccgatttgaagttcttttgtctatggtatcgcttactcaagcaagcacactgcgcttgttatgcta

SEQ ID NO: 25791 - DNA, 411 bp, Glycine max
  Clone ID: PAT_MRT3847_123291C.1
aagggcactattttttatgaagaaactttctcactcccactggaaagggggaaaaacaaatttttacagcttccttcccttcaaattatggacagaaaaatatactttctttcacttgtacttttttagggggacagaccttttatgttaaggttatcaaacatcattcaattggtgctctgagattgaaaaaccttgtacgaatctgtttaaaaatttttatcaggtaccctgttttttactggaatattccttgaaggttaaaaaacattataggtatcaaaaaggttattgggctttttttgaacattgggcaaaaggcatatcggcttttttttttttacctatattggagccaaaacttgccagaaaaggaatcttcaacacattgctttaacaaagttgttcata

SEQ ID NO: 25792 - DNA, 228 bp, Glycine max
  Clone ID: PAT_MRT3847_123292C.1
ctcgagtacggcaacatcgctgaagggtgagctcaataatgtgtcctctgaaaatggtcctgtcgaaagtgtataccagaccgatggtcagaaagcaaatgataaaacatgcaccagcgaatacgaagcatcaccgccttcttctacacccggctgcaagcaagcttgggtgttaaccagatgcacatatgtgattttgaattgcaagcatgcgatacacatccaagt

SEQ ID NO: 25793 - DNA, 694 bp, Glycine max
  unsure (1)..(694): unsure at all n locations
  Clone ID: PAT_MRT3847_123293C.1
gtttgtttcccttctttctttccacgcacactcacactaaatggcaatttctgttgctttaattttgggtctatgtttagcaatgaacatggccctgccgacaggtgcagctacccacacggtgggagacacctcaggttgggcactcggtgttgattacagcacatgggctagtggcttgaaatttaaagttggtgatagtcttgttttcaattatgggactggtcacacggtggacgaagtaaaagaaagcgattacaagagttgcacaatgggcaattcactgagcacagacagcagcggcgccaccacaatcaccctcaagaccgccggcactcactacttcatgtgtgctgctcctggccattgtgacggtggcatgaagcttgctgttaaggtaaaggctaaaaatgcctctgcttctgctgcagcaccttcacctgcaaaggaatcaccttcagaatctgatgatgccaaagacacacccactactcctacctccaccaccaatcctaaaacttcaacatccaccaccccttcaactgaaacctncactactactacatcttcttatacgtcatcagcaattggcggctcaccgattgttgctatgtttgttgtttcttggatctcatacttgttgcttatgatgtgaacttgagaggagtcaggacatangtgcttaatttcgggg

SEQ ID NO: 25794 - DNA, 548 bp, Glycine max
  Clone ID: PAT_MRT3847_123294C.1
ccacgcgtccgaaagcaccgaccctctccggctaccgctgcctgagttggtgctccactttggttttcgttacccttcttttggtgcccaagttttgatttttcagagaagattcacttccttttcttcaaattcaggcactttttccaaaagggctaagtcactcaactgattgaattagagctatgaaccccgttgattgggaacaagaactgaaaaagtatgaggatgttatagcctcaggtaccaattgtatgaaaataaaggccatggtgatgctgacacgtttatctaagcatgcccctgaggatgtgttagctcgcaccatacccattctcactgagattcttggtcacaatgtttcaaatgattctgctcctacacttcaagaggctgctgcttattgcttgaagtgcattgcttgcaggggtgatggtgagttggcggttgaaattggtggacatggcgccactcgttccttgatgaggttgttgcctcactctgaagggaggatgcagaaagtactgactaaatggatgcttgttatt

SEQ ID NO: 25795 - DNA, 134 bp, Glycine max
  Clone ID: PAT_MRT3847_123295C.1
accaggtcaattttacaaaaaaaaaaggaaattaaaagcttctaattttagagtatgttgatattgctattcttggtagtgtgatctttctttccatgctgggacctgtctcgcatatgtagttgagatgaata

SEQ ID NO: 25796 - DNA, 289 bp, Glycine max
  Clone ID: PAT_MRT3847_123296C.1
gacaggatggtaactgatgaatcccactccactgttcagttccgttttcatccccctcaatttggggagcacaaatttcctaatttatagaatatctaatttgatcttatttttttttataactgtccactccactaagaacagttaaactttctcctttctcttcctgctagtgccatgaggcggtgagagttcttcttcctcttgtgtgctgctgcctgcttctcctgtcaaagctacatgtgattctacatgcttcttcttgcttggtgtttctgaatgtcctgct

SEQ ID NO: 25797 - DNA, 253 bp, Glycine max
  Clone ID: PAT_MRT3847_123297C.1
acccttccggctttaggctttgttattccgttccaagggggtaggattgagttcccaatttttgaaagggcgggggtttcccatttttaaattgtccggccaccaggtgcccctaataactctggaggggttcagctgcctcgaaatgatggaaaaatggtggggtctgatttgcagaaccctatgccttttgaactaactgagcgacctaaactgaagttgctcccaagggcaaagccagtggaaagtccaa

SEQ ID NO: 25798 - DNA, 275 bp, Glycine max
  Clone ID: PAT_MRT3847_123298C.1
taattaactactgataatccaaccttacacctgattatagatccacacacaaggcacccagatttaggattaattaattaatcacttcagattaatcttgtaaaccagcgcacggcctttgcacatggcatacaatggagccaaccttgacaaagggacccaatttgcctccctcatatcaatctcttcctgattcactcttttccaccccaagccctgcattaacaatcccaaaggcacccgacgatctgcaaggctaaaccttttcctggaca

SEQ ID NO: 25799 - DNA, 603 bp, Glycine max
  Clone ID: PAT_MRT3847_123299C.1
gacacttttaaacttttccagagcttgctgtctcttctctctctctttggtgacattcatctctttctttctctatttgttgttcaaagttagtgaaccttttctatttggaatcaaagtcttcaactttggctatctttttgttcaagtgattcctctcttgttggtgggtgtggccagaatttccaaaggagagaccaaaaactatgctgcctttgttcttctcagtggctttctctgctgtgcctctgatcctctatattccaccactcagaagcttgaacctctttgttgaaaccattgaagacatggcaagagagtcaagaatccacaccaacaggatctacccgcgcctgcgtgtggcttggtcaagggtcatgaattgtatactgtgcaacagaacaaggtagattcattcaagaattaatggtcttgagatggatcttaatgtaaatattttacttttctgtgttttttttttgttcttttaattcttttgctctttaatttatttgctttggattcccatcatggagttgttttggacttttggagcagtggttgctcttattgcgggaccatgttgagtaaaattattgtaat

SEQ ID NO: 25800 - DNA, 421 bp, Glycine max
  unsure (1)..(421): unsure at all n locations
  Clone ID: PAT_MRT3847_12329C.1
atcggatatgatgccgagnccgacgaacaagagccacctcatgagctccaatggcgggccatccccgacccgnggcnggccatcacttctctgttcctcaactccatctgctggaggatcatagagccctctctgaccactttcatgggcactttgcgcctcgactgggccgcttcagtgatgtccgcgcattttgatcgctgtttataatgccgcttacatgacatcggctcccattacggggttgtgagcaaccatatttgaccagtcaaatgaggcccatgttggtgctgactccaaagggaatggacatggtcatgcttatgatgggtccgtcaccgctgctcagctcgcccaatttgatgataaaccgccgagacgttgcattgcttggcattgttgctggtgctaactatgtgcc

SEQ ID NO: 25801 - DNA, 181 bp, Glycine max
  Clone ID: PAT_MRT3847_1232C.1
ggcaaacgctatttgatgccatggaccatgcagaaccctcaactactgggacgggcaactcatttgtctcaacggaaggtgcaaccacgaccgcgaggggggaacccacatctgcggggggggaatggcgccgaattcgtctactaaagggggaagctggcgctcctcccgaaacctaaat

SEQ ID NO: 25802 - DNA, 179 bp, Glycine max
  Clone ID: PAT_MRT3847_123300C.1
tacggctgctagaagacgacagaagggaaattagaggattttgcttgattatgtcctacatgcaagcgttacatggcaatataatatgggttggtgggttccttattcacaaactataaaactccaaaaccctaaaattaatctgccaccgatatgtgaactcgtacaccctttaatct

SEQ ID NO: 25803 - DNA, 404 bp, Glycine max
  Clone ID: PAT_MRT3847_123301C.1
ggccggggaaaaaaaacataatttataggagcctgctgggaggggccctcaaagggaccttgaaccttcttaggaattcccgccccctcaaatttcaatgctaaaagggggaataaataattgaataaaccgcccaataattttatttgtaatggcaaactttggccgaaacacccctgaacggggaaccgtttcttttccttgacctacaggggctacacaaactggaacaatttaacaacccgtttttttttttttgggacaattaaccccatgcgggtattttcctgccccaattttggatttctaccccctggaagccctaaaaggcttcgggggggaaaccccccaaaaagggggtgttctgttgggcccgattcaaaagccttcgcaaagcatatttt

SEQ ID NO: 25804 - DNA, 470 bp, Glycine max
  Clone ID: PAT_MRT3847_123302C.1
aaaaggaacaagtctcccccactttcacatatcctatacagatttttttcattcaactttttttaatccgacccattaaaacttgggataaggcggaaaaactcatgggattcggactcactttatttttgtttaacaaccccaaaaataaaataaaagacgcgtgggcaacaacaaatggaagcgcggggcctggcttataatcggagggggcctcatcatcatcatcatcaagggtttgattcattgggggggaaagaagggagggctatgggggaaaaaaaaagggccaagcgggacgggactggcacggggggacctgagggggattttgttcacctgcttcccgtttctattggaaaaaaagacgcccgagaaatccaacggttcacacttggcccccatcaggaaagccttttggcacaccccacccttcccccaattttccttacccctttttttttttctaa

SEQ ID NO: 25805 - DNA, 240 bp, Glycine max
  Clone ID: PAT_MRT3847_123303C.1
gctataatactacataatggggctctaaataatataaatctactgtcgcatcatctacgacctatgcgaacccaatgtcatctgcctcaactcaaccctcgcactgtcacgctctcatactcattctctcactcgctcaccctctacggttttttgcaatcaccaaactaaatatggttttatccccactatcatcgtaccatctaaggttttctcggcaatcgcccgcatacctttcat

SEQ ID NO: 25806 - DNA, 277 bp, Glycine max
  Clone ID: PAT_MRT3847_123304C.1
ttaaatcaacagagataactctctgaatctttatattataaatctattattgattcattacctacataattcagaaggaaaaaaaaaaaaaaaccttacaaaaaaaaaaggggccccttcagaattgatcgcatttttcctattgcacaaaggctgcgcattttattcaagttttaacagaagcgtaaaattgcacaagtgtcttatataacccccttttaaaatgaaaagggggccccccccccttctttttataaggaaacaataccccccaatt

SEQ ID NO: 25807 - DNA, 422 bp, Glycine max
  Clone ID: PAT_MRT3847_123305C.1
cccattcgtccgttttttggtttttattgcttgaatctgctgtgctttgtcgaacaatgattccttatatgacagttagcgatgtgagttggatggttatgaatggcgggttcggttcatgtgtgattctatggaaacgcgtcgggcgagactttgtgagtgttagagctgagatatccgatattgaattgggaatgcgtctatgaaagaagatttgatcgctgtctttggtagaaaaaacaaaagacggtttgaagtgggaatgtgtctatgaagggagttttgatatccgattgtgaattgagtacacgtcatagaatggaccgtgtagtgggtgagttttaacgtgttatgagtccatggcggatttcggagaagatgagagagctgcctatattgtagatcctactttgtcgtatagc

SEQ ID NO: 25808 - DNA, 575 bp, Glycine max
  Clone ID: PAT_MRT3847_123306C.1
cgccgagcaacagtgaatttggccaccataagagcgcgcgcgcaaaggattagagtttcgaagatagcgattttggagcttccatttcgatttcgacttcgacttgcgcacaatcagttactttcgcttctcttgctgtagttcttaataatgcacaatttcgcaggctttactatttttcttttatctcgtaaattcgtaatcttgcgaaagaaatagaagaaatcatgtgcccttagttttattgatattccatgagattaactaggctattctacgtagcaaatcgttcaattggaaccgtttggtagaggtatggttcttagacagcacattatcgtttgaaatttcgtagtaaaggctctatatttcatagggagcagtaacattgtttttcatatctcaaaagaactgagataatatgacgtatcttagtctccaataaaacctagttaaggagggagagctttggagtagaatgtattgctctttagtttttacttttaatttatctgcctctctatattatctatcttttaatgtatattttggatacagttcagtttcttatatct

SEQ ID NO: 25809 - DNA, 273 bp, Glycine max
  Clone ID: PAT_MRT3847_123307C.1
ctttgggctgatttatgtgcctgcttatgtgcctgtcgtgagaagccgatagacgggcatggtcgtgagaagtgagagaacccgatatcgtgacaggatcatagaagggcatggtcgtcagaagatcatagaagggcatggtcgtgagaagatcatagaagggcatggtcgtgagaagatgatcgaccggcatggtcgtgagaagatcatagacggccatggtcgtgagaagatcatagaagggcatggtcgtcacacgatcatagaagggca

SEQ ID NO: 25810 - DNA, 691 bp, Glycine max
  Clone ID: PAT_MRT3847_123308C.1
cacgcgtccgcccacgcgtccggtttgatttcattcttgtttgattggcaacttgtgttgttcccaatccaagagttatgggattggcctctgttgtccacaacggcgtccgaattccattcaacttggagcacattcacactcctcctttcagatgctctgcacttcaccaccccatctcttccttttgctcagtgtaccattatcgtcctcctcaccgcttcccacttctgtgctccagacgaattggccaccacaattatgcctcagaagtaaagaggattagtgctcaacaaaatgatgacataggcaaagttgagaaatctcccactcaggaatctctgggaaatgaagattacagttcctccgttagaactgtagcattatgggtgtgcactgcagtggcatttggtgttggtttgggttttaaggagggttttgacaaggcatccgaattctttgctgggtatatattggagcaaagtctttctgtagataatctctttgtctttgttctaatattcaattacttcaaagtgccagttgcatatcagaatcgtgtgctttcctatggtattgctggtgcagttgtatttcgcctgacattaatacttattggaacagccaccctgcagacatgtcagaaatttatccctgtaacaacgtattatgatggaaatcgattcataac

SEQ ID NO: 25811 - DNA, 583 bp, Glycine max
  Clone ID: PAT_MRT3847_123309C.1
atgggtgtttactgcagtggcatttggtgttggtttgggttttaaggaaggttttgacaaggcatccgaattctttgctgggtatatattggagcaaagtctttctgtagataatctctttgtatttgttctaatattcaattacttcaaagtgccagttacatatcagaatcgtgtgctttcctatggtattgccggtgcagttgtttttcgcctgacaataatacttattggaacagccaccctgcagaggtttgaggcagtcaaccttctcttggctgcgatattactctactcgtcatctaagctatttgccagtgaagaagatgaatctgacttatctgataactttgtggtgaagacatgtcagaaatttatccctgtaacaacgtattatgatggaaatcgattcataacaaatcttgatggggtgttggaaggccacccctttgcttcttactgtagctgttatcgagctcagtgacattgcatttgcagttgactcaatacctgcagtttttggtgtaacacgggatccatttgtagtttttacgtctaatctttttgccattttgggtttaag

SEQ ID NO: 25812 - DNA, 278 bp, Glycine max
  Clone ID: PAT_MRT3847_12330C.1
ctccagccgaatcagctcgagcgggtctagaaagacatgtcgctgcaacttcagcatcatcttcttcttcttgatcacaggtggttctgttcagtcttccttgcaccttcttctttggagatcgaggttgtgtttttgtgaatatgggaattccacagaaagaccctctttctcaattgagtttacgtcctggcttgcggttttagctcaccgacgatgaactcctcattcagtatctagacatcaatgtcgctggcaaccaattctatcttccaatc

SEQ ID NO: 25813 - DNA, 279 bp, Glycine max
  unsure (1)..(279): unsure at all n locations
  Clone ID: PAT_MRT3847_123310C.1
gtttggggtcctgtggctgcacatatnnaaccttaanttcggccgtngaatctttctggtnattggttgttttgaattctttcaaaaattnaaagacaanccaaaatcncttgggaaannangnaaanaactgcttctccctaggcaggcagattttgggttcttctgacccaattatnnattttnccncaacttggtcttgttgaatttttattggggttgtaaanngccttgttccgtttganagttantgncctntttcccctntctggattnaag

SEQ ID NO: 25814 - DNA, 297 bp, Glycine max
  Clone ID: PAT_MRT3847_123311C.1
cgccagtgtggcgtatgtggcacatcaagatgatgaactggagagggtgaggagatgactttgctgacagtgacacactgttcaataggccttgggccatgctactcgatcgaactggtgactaggtgccccatctttgtgtgaccttcgagtggaccaagatgataactttccatcctccaagtcttggcagacctaaaacgctctattgacctattctgagtgtggagaggattcttgtggaacgtcgaaagcttctaaactatgtgatagagactttcgaagaaagggacattc

SEQ ID NO: 25815 - DNA, 376 bp, Glycine max
  Clone ID: PAT_MRT3847_123312C.1
tacttctaatatatcatgatttgggacttagtactactgcagaagagttgagtttggggcttgtgttttgtgggcttaggctttaagaagcccaaaaggaggaaaacagaatgttggactcaatagtcaaaactgacccacaaaacaaaagtgtacaacacatgatatcacaaatttatgcttttgcgcgacgcttctacagagtttgcaaatttccgattatgggcatggacctacttgcctagctatagtaattgtgtgcttctacgattctgaccatcatgagaattataaattagacatattttgcatttgggttattttgggccttgccatttatattgggcttaagcctctttcattagttttttttgtg

SEQ ID NO: 25816 - DNA, 423 bp, Glycine max
  Clone ID: PAT_MRT3847_123313C.1
ggctcaagaaaacctctccaaaataaagggagagatgccatgatcttgataagatctcagctcaaccctttttttttccaggagaagaaaaaaaaaatcctcccctccccaaaattaacccccaattttttttagtttcgattacaaggcccattttcctaaataattgggacccatcatgggggggtttacctttattgcttaaaccccccaaggaaaacctaaattttccccctgacttaaaacaaggggttggttttatcttcccccttaagcatttttttttagggttttttcttcattttttttcccatgggggccccggggaaaagggtttaaggaccgaagtcccccattagttattgttccacatggggggcaccccccctttaaaaaaaaaacctcttgaacctcctttttcca

SEQ ID NO: 25817 - DNA, 292 bp, Glycine max
  unsure (1)..(292): unsure at all n locations
  Clone ID: PAT_MRT3847_123314C.1
agaggtactattacaaagttaggttcnnttatggtgtaggctggtatcttctgggtttggactgggtattttttgaagtttatcagctcatcnnngtgcaggctggtattgtctgggtttgggctgggtatttccataagtttagttgctcatcctagtgcaatggatggcaaggtcggattattactattgtaagagttccacaacattgcgaattttctgaatcctaagaatcattggaatataaatttcacaacattaatactcctaatagaacattatggtacttgat

SEQ ID NO: 25818 - DNA, 389 bp, Glycine max
  Clone ID: PAT_MRT3847_123315C.1
tacggctgcgagaagacgacagaagggggcagagtggactgtatatacctacaaccactgacggcattgtggacggaacacaacacagagcgagtgaggatcggacattcgattatgatgcggcgcattcgtgagtaacgtgctataccactgttaacgcggataactggctcacctttgcgcatttgccttcttatcctctaccactcattaatacctctccttaaattaatgctttcctgacagaatacaaagactgagttttaatcattcattcatgtgccttttaaaaaccatgtttagcacctcagtcctgaccatcatgtgtaatgctgggtgcgtatgagaggctgagaagtctttggtgattgaagatgtgtaggtcatgc

SEQ ID NO: 25819 - DNA, 360 bp, Glycine max
  Clone ID: PAT_MRT3847_123316C.1
gtttggcacatggttatacagttggatatgctagctaatacaggggatcatggcggtctcatactgctggccaggaactggctgtgtgctacaaacgagcccgtctctatttggcatacacctccgtggaatacttgtcggattcatgcaagccgacaacaggcaggtgatttagtccctctctgccctccttggggattacatgtacaacgtcggagagctactaggccatactataatgaagagccttctggggacaaaggtggaatggctatactatattctgaaggctatcaattctggtgatctgaaacgaactcaacaattatgtaggttgcataatgctgttctaagagccca

SEQ ID NO: 25820 - DNA, 1293 bp, Glycine max
  Clone ID: PAT_MRT3847_123317C.1
gtcatagtaattgtcacattatgttctaagtttgtgttgaattttattttgttgattgaattctagatacatttgttcatgtattcttgtcattcttagcctatcttttgaattttgagtctaattcatgcatgttatttagttcataacatgttctaaatcaattcctagaagtagtcttgttcttgaaccttttttttgctttctaagtttcctacatgatgcctatgatgaagttgagttatggtactgagttgtggctggatttttgaatcaaaataagtcttaagctctctttaattgtgttattcaagataattgagcataagcaaacacaaattgtaactatccaagccttaagcaacataaacactactcttgatttctaggttgaaatcgctggtgctggcagcttgaacatacgaacttgtataaattactgggaattggtcactatgttttttgtgctgaaacttttaatgaattttctagacattttgaccaaaattataaaataagacccaagtgatttggttcaaaggaaaaattagaaaattcacacaagttggccacataatgagtgtccacaaaaaaaaacagtgaaagggaagtgtccttaatgcttctactcaaaatatgttctataattggtgcctatgttataccaatcttagttccgaaatttcaattgaaaattactgtgaaaacaagtgccaaagccagaggtttgttgagtctttttttatagttttttttactctactctagagccattctaagtttctcttcgagtcctagcttgcttctatgtccttttcattgctttaattgttgaataatccttgaaaaattgtcttgttaaaactccattggtttagctttcatttcatttttttttagtctttggttattgcttgtctctttgtttccttgtttgtgagttgccacatagggaattggaaaggaggattggtgtcatcccttgaagaatttgagtcaagaagtaaggggccaaccaccttaagagctattggactaagaagcactccaaattgagtgaatcaccaaagagataacaaccaccaaaattgaggatgttttgtaatttttttcattggaagtgtgttgggagtctccaataagttaccaaacttccatttgtgtgtaataattttaggcaatatttccttaggatagtgagtgttttgttcggaaccttgatgtggtcatccaaacactcttaggattcacttagtttacttttcttgcttactttcatagcttatttccttt

SEQ ID NO: 25821 - DNA, 504 bp, Glycine max
  unsure (1)..(504): unsure at all n locations
  Clone ID: PAT_MRT3847_123318C.1
tcctctagagcggccgcttttttttttttttttttttttttttttttccaaatagcttccttctttttttattataattntgggccagatgtctaaaaaattcagtaaaaatttcagttcaaaattcatagtgaccaattcccagtaatttatacaagtttgtatgttcaagctgcgaacaccagcgatttcaacctagaagcttagatagttacaatttgtgtttgcttatgctcaattatcttgaataaaaaaattcaagagagcttaagacttattttgattcacaaatccagccacaactcagcaccacaactcaacttcatcataggcttcatgtgggaaatttagaaaacaaaaaaaaagttcaacaccaagactacttttaggaattgatttaaaacatgctatgaactaaataacatgcatgaattacactcaaaattcaaatgatgggctaaaaatgacaagaatacttgaacaaatgtttctagaattcaatca

SEQ ID NO: 25822 - DNA, 389 bp, Glycine max
  Clone ID: PAT_MRT3847_123319C.1
ggttattgcttgtctctttgtttccttgtttgtgggttgccatatagggaattggaaggaggattggtgccatcccttgaagaatttgagtcaagaaaaaagggccaaccaccttaagagctattggactaagaagaattctaaattgagtgaatcaccaaagagagaacaaccaccaaaattgaggaccgttttgtaattttgtaatttgcaatttacttaccttcattgctttcaagttttgtaacaaaaaggcctttcattggaagtgtgttgggagcctccaataggttaccaaacttccatttgtgtgtaataattttaggcaatttttccttaggatagtgagtgttttgttgggaaccttgaatgtggtcacggacgcgtgg

SEQ ID NO: 25823 - DNA, 140 bp, Glycine max
  Clone ID: PAT_MRT3847_12331C.1
aggttcccttcttttcgagaaaccactctctatctctttcttaattcactttctctctctatgatcgcggctgcttctagaagatcatgcgggccagacctgatgacattctagacggcgggaaggtttcgcaattcccg

SEQ ID NO: 25824 - DNA, 2973 bp, Glycine max
  Clone ID: PAT_MRT3847_123320C.1
ccacgcgtccgggtgataaagatttatgttctggacgtgtattttaacattaatctttatcaccttttctcactcatttctttttcgtttttttaattctttttccattgtttttttttcaaatatatattttatccagttaaaatttcagctcaaaactcaaagcattcaagccataacagagttaagaagacagtgtgctagaactgacagcaaccagaatttcaacctagaaatcaagagtagtgattatgttacttaaggcttggatagttacaatttgtgtttgcttatgcccaattgtcttggataacacaattctgtagaagcaagcttcatgatgaatcaagattgattcaaagaagttttgatgataacaaatgatgcaatcctccctaggaagggaccaatcactagaaccatgagcaagaggctccaagaagattgggctagagctgctgaagaaggccctagggttctcatgaaccttagggtagatttctgagcccatgggccaaggttgggtccaattatctttgtacatattagactaggatgtcattatatttggtccttgtatatagggctccatattgtaggtagggtaccctagaaatataggatttttcagcccttgtatttttgggcacctagactagtttttgtattaggggtagttttgtaatttcacatgcactaagtggatatttgatgtgtgtggttggaaataaatttaattgaattggtagaagcccaatccaattaaattttagagggggaggtgagcatttgcttactacaccccattgccacatcatatagtcacactttgtgcatgtccttcatgcttttcatgcctcatgacacctaagcacacttagtggagaatcttggaattgatcttggattagtgggctgaaccataactaaaattcactaatcataattagtgaaattttggctccaaagtttggctccacaaattcaatttcaaattcaagtgaaatttgaattgaaattcaaatctccctccaattttgtgtgacacttaggctataaatagaggtcatgtgtgtgcatttttttcaactttgatcatttgaatattaaacttcagatttcaaagctcatttagagcacaaaatttcgtgctcttctctccctctcccctcattcatctccttcttcctccaagctcttatccatggcctcctatggtggtgagcttcttctagactcatcttctccttgaagtggcgtctcctctctctcttcctttccccattccgctgccattcatcttccaagaagcaaaggaatccattgatgaagaagatcctaggcctacaagctccaatggagcttacatcatgtggtatcaagagcatcttcatctaggtgatgttcttttgcttcctctatctttttgttcggtgaattctctttaattccttgtttttcatcttattctccatgtatatcctccattgtcttgtggtttggtgctgtttagagtagattcaaaaaaataaaccgattaaatcttagatctacacttgttcttgcatttctatggttcaaattttgtagatctactcttgaatcttgtttttgtgttgattttaggttctatcaattttcattcataatattcttgtgctgaacctttagatctaaattttcttccaaaatattgattagaaaaaaaaacacaaaaatctaagtgtaaatcacttaatccatgttgtcttagagtcatgtttagtcatagtaattgtcacattatgttctaagtttgtgttgaatttttattttgtttattgaattctagatacatttgttcatgtattcttgtcattcttagcctatcttttgaattttgagtctaattcatgcatgttatttagttcataacatgttctaaatcaattcctagaagtagtcttgttcttgaacttttttttgttttctaagtttcctacatgatgcctatgatgaagttgagttgtggtgctgagatgtggctggatttgtgaatcaaataaatcttaagctctcttgaattgtgttattcaagataattgagcataagcaaacacaaattgtagctatccaagccttaagcaacataaacactactcttgatttctaggttgaaatcgctggtgctggcagcttggacatacaaacttgtaaaaattactgagaattggttacttcgaattttgagctgaaagttttactgaattttctagacatctggaaaaagttagaaaaaaagaaacaagtgatttggataaaagtaaaaaataagaaaaatcacacaagttggcagaaaaatcaatatccagaaaaaaaaaaaaagtgaatgggaagtgtgcttgttgttttggctcaaaatttattctataattggtgcctatgttataccaatcttagctccaaaatttcaattgaaaattactgtgaaaacaagtgccaaagctagaggtttgttgagtcttttttttatatagtttttttactctactctagagtcattctaagtttctctttgagtcctagcttgcttctatgtcctttttcattgctttaattgttgagtaatccttgaaaaaatgtcttgttaaaaccccattggtttagctttcatttcattttttttggtctttttggatagcttggcctccttgttctctagctctaatattggaaaagttgttgttcaagttaataaggcctagtaatgtgcttgatcttgatctcaataatatttcagcaccagatattgaactctcttccatatttctgtcctttattgtaaactcgtctaagaaggaatatgcacgtaataattgttgtattttatatatttaatttaatgttcttctataaaaaataattcattaaatgttatcgagatcatttgatatatatttaatttaattatatgatattaaaaaaaaaaaaaaa

SEQ ID NO: 25825 - DNA, 615 bp, Glycine max
  Clone ID: PAT_MRT3847_123321C.1
tgtactttgcacccttctaatctagttcagatcctctcaacgccacattctgcataaaggtgcaacctttctagtctcttagattttgctcaatggccaaccaaggacttgatctccctctctatgaaaaaatttggttcaagcgcacatttcaaagagtaatagacaccttgattttagtccttctcctcttgaatctcagttatcgtgttttctcatccaataatttcactttcccatggttccttgctttcatatgcgaatcctggttcaccttcatttggattgtgattcttaacaccaagtggagtcctgcagtaaccataacccacccaaatcgtctccttcaacgggtacctgagcttccacctgtagacatgtttgtgacaacagcagatcctgtacttgagccacccatcatcacaatcaatactgtgttgtctctgttggcacttgattatccagctaacaagttagcttgctatgtttctgatgatggctgttccccacttactttctatgcccttgtagaagcctctaaattcgccaagttttgggtacctttctgtaagaagtacaacgtgcaggtcagagcacccttcagatacttctcta

SEQ ID NO: 25826 - DNA, 511 bp, Glycine max
  Clone ID: PAT_MRT3847_123322C.1
ttcccggggctcgacccacgcccgtccgaaaaaaaaaaaaaaaaaaaaaaaaaaaaaaaaaaaaaaaaaaaaaaaaaaaaaaaaaaaaaaaaaaaaaaaaaaaaaaaaaaaaaaaaagaaaaaaaagatggagggaaacctttttttacaaccccatttcttgcgacggcactggcctctttttttgggttttttttgtttcgtttctatgtcttgttttttcccggggggttggcctgggaaccccttggggttccccgggttttttccctttgcaggccgtgcccccgttcctccccctttccgaagggcggttggggcctgaagggggccccctccccttctttttcccaaccttttgtgcgctttggtacgcgctttgacccccccctttacgcgcgctttgggcgggggcttggcgcaggttccccactacttttgcccttcctttagcgcccgtttcttgccctttcttccttttttttcccgccctgttctccgtttttgcccg

SEQ ID NO: 25827 - DNA, 176 bp, Glycine max
  Clone ID: PAT_MRT3847_123323C.1
cacgcttaagatcacccaacatagaacctaatacacacaacacaacacacacacaccgagggggaggagaaatcatcaaggcatcagctgcatccgggtttgtgttgtcacttaaaggtgcagctgccaccacatactcaacggtggtcatgttcaacatcaaaaacaacgctcct

SEQ ID NO: 25828 - DNA, 401 bp, Glycine max
  unsure (1)..(401): unsure at all n locations
  Clone ID: PAT_MRT3847_123324C.1
gagcagagggggtacctctaccactcagagctatctagtgcttcttgacccaccatgcagtgaaaagtgtgctgcaggatcangccggagccaccttcgcaccaaccaccatcgcatngccgncattttttttcgggggggggcanncnccaccccaccncccaaaacccccccnacangcgangcgggcccccccaccacccccccccccccccccacnccccccccccccccccccccccccccccccccccccccccccccccccccccacccccccccccccccccccccccccccccacgcacccccccccccacccccccccccccccccccccccnccaccaccccccccccccacccacccccccccccccccccccaccccccccccccccc

SEQ ID NO: 25829 - DNA, 467 bp, Glycine max
  Clone ID: PAT_MRT3847_123325C.1
aagtattcaaaaaggaaaaatctcaaaaacaaaaaaataaagaaaaacaagagagatgcaaagaaagaaaaaatcaaaaattaaggacataacaaagtatgtatgaaattgaaaatcttgggtgccaaggattggtaggaagtgaatgaaatgaagtgaatagactaatactttccttcctctgagatactttgaaatatctagaaaaaccaatactctttgttagccaagccccattacaagcgaataaagtctttagtgttctctgcatgcctttgatatattgattaacttgagatgaaagccaaagttgaactatggtgttctaagatgtgaattgagggaaatgcatacccaagctaaatcatgagcttaagatcgaaacactttatgagaggacaagttgctatgtgattagatttgtaatgccactcttgcttcatgttttgaactttgcaaaagatttg

SEQ ID NO: 25830 - DNA, 407 bp, Glycine max
  Clone ID: PAT_MRT3847_123326C.1
ggcaacccacccccagcgtgcatcctatacagcggccgaactactcactcactgcaaagcacaatttcatgcctggccaggagctaccgtcacaagcaggggggcccgcccgatcagagaccaaagaggcactccaacaggagaggtggatcaaactagctcccaaggaacgggcgccacacctgctcggccaagcggggaggaactgagagactgaggccgtagaccagagcgatgcacgatccgaccaccagggaaaggcggcatgaaacgcaggcgagcctgtgaacacgcggatgggccgtgcaacgattgccaaggaccaaacccagctaactgccacagacagcgaaccgaggcaagaacatgatggaaccgcaaacaaatggaacaagcgcacgccgaac

SEQ ID NO: 25831 - DNA, 918 bp, Glycine max
  Clone ID: PAT_MRT3847_123327C.1
agcgggggggctgtggtggcggttggcgtcatcggtggggtgcaagcctttggtgcgtaccgtgctctttggttccactgtccggttgcggcggggctcatggattggaagggtgtcttgctggttgtagcgcctgtccgggtggggcggaccacatttattgtaacgatgataagttggacaaacttccggaaggtgactggtgggtctgtgaagactgcaggaagtcaccaggatctcctctgttgaactcagaatttaaaggacagctggcaaaggctcgttattttccaaagcagaatgctgagaaaaatatagctatttatgatactagaaagagaaaaaatcttggtttgctgtccaaatctgggtcatttgataatgctagtagctcagtgaaattaaatggcaaatgctctgaagttgtagcaaatgacttggcaaacacacctgggtcaaattctctaaagcgaaaatatagagacatggttggagctcatgaaattggtgaatttgatgctatggatacaaggtccccaggtgacagaattttgctaggtggagataattacaattctggttgttctgatttgagacaatcccttgatggaaaaaaggaaacaccggaagatgtgaaaggcaagatgccaatgaaagagaataacaatgctgacaatggcaagcttccaatggaccagaaaaacaatgactctctttcagttgcttcacctacaagctatgaggaatatatggagctgctttattggggtgctgtggaaacaatggcgactctactgtggattaagcgaaatttagtttaggctttgaatggcgccgtatcaatatctcttgaatatagttatccctttgtgtacactggctcacagtgatatttatcatttccagtctccatagaaa

SEQ ID NO: 25832 - DNA, 298 bp, Glycine max
  unsure (1)..(298): unsure at all n locations
  Clone ID: PAT_MRT3847_123328C.1
acttttcatttatcccaaacttaaaacaacctcgcaaatttaataaacacatgtcgcctccccaaaaaaaaacctancaatacttatttatcaacttcactactactcaaatctcttcataattacacctccctatactttcatcttttattattcatacttttaaacctacccaatccacttcaccttttatataatatcaatcttatacccaacatcctcactttaataaaaatttattatctcataacacaaattttattatctcttcatcataactcatataatttacatctat

SEQ ID NO: 25833 - DNA, 348 bp, Glycine max
  Clone ID: PAT_MRT3847_123329C.1
ccaagacctccttctcacgtgctgcgaaggcttcggcaccaccgctctcgccgccctcgcctccaactgcagattgctgagagtgcttgaactagtggaatgcgtggtggaggttggcgacgaggaattggattggatatcgtgttttccggagattgacgctcagacatatttggagtctcttgtttttgactgcgtggagtgtccaattaacttggaggctttggagaggctcgtggcccggtccccctctttgaggaagctcaggctgaatcgttatgtttccatgtctcagctgcatcgcttgatgcatcgtgcgccgcagttgacgcatctgggaactggttc

SEQ ID NO: 25834 - DNA, 303 bp, Glycine max
  Clone ID: PAT_MRT3847_12332C.1
gttcttatgttatttttttttaaaaaaaaaaaaaccatgaacgcgttataaaggcagaaaaaattgaatacaaacataaccagggatatcataaaagggggggggaaaacaataagacaaaaaaggtgacacaaacaaatagtgtgataaaaaaaaaaggggtaaagaaaaaaaggtgataattggagagcctcgcaagggtgttctcacacatgccaaggaaccagataccaccacaaaaaaatgtttgcttgggcggactgaaaaaaaaaaatcgacactttcaagggggaaaagcttcaa

SEQ ID NO: 25835 - DNA, 494 bp, Glycine max
  Clone ID: PAT_MRT3847_123330C.1
ggaatatcaaggcaacattaatttgataaataattcaaaatatgcgcttaaatacaagttcacccaaaaaagcattttgtacccaaagatacaagttcacccaagggatttaggcctcggaaaaaacaaaacaatgacttttttcattaagggaaggggtatgattgaaatataggccatcccagggacgtaaaaactacatccaattacattaaaatcaattctacttgcctttaaaacaaatagatctgaagagttacaaaagaaaattgaaaacttaggcaatggaagggttctttttgaaccctaaaaaatgatattgggctttgcagggctaagctttaatggggggagactggaagggtatcttcatcgggagatattaagagctcatcgatgctggcaatagtagagaggttcatctacaagaactttaaagctcaatttagtaaaatacaaagtctacaggcgaagctctaacgaaaatatgtagc

SEQ ID NO: 25836 - DNA, 419 bp, Glycine max
  Clone ID: PAT_MRT3847_123331C.1
agaaaaaaaaaggggattttttttggggaaaaaagggggaggggtggacccacaaaaacggcgggtgggtcagcctactcaacaccctgtaaaggggccaccaaaaaccagctttgggtctcaatctaaagaacccaggcgctggagattaaataaaacagagtgtgtggtataaaaaccatatcatgagaagggctagaaaaacaggactagggggtaggtggagagggtttcccccttaatgggaacgtttacgtatcaacgttaaaaaaaagggggggccccaagtaatgttttccccctgccctcttaaccattactggggcacggcaaatgggggtgttcactttagcccggggactccccccacgaacccgagcatgcgacggcgtggatgccccataaaggggcctaaatag

SEQ ID NO: 25837 - DNA, 388 bp, Glycine max
  Clone ID: PAT_MRT3847_123332C.1
acaataactatttcttttatatttgatttattgcgtgtacacatttgaaaaaaagcccgcccgcggaccataaatttagggggggcacacacctgaaattgtccccccccgcgccccgaaaaatcttagggcatcacaaccgggtcttgcccacaaaccagcggggggggtagcccggggaattccagcccggcccccggagggacacaactgttccctatgggaaattgtaaaagggccgggggtacacacggccaacaagccggacggataaaaagaaaaacccggggcgactaacgagaaaactacctcccagtaatagcaaggggctcaccggggggcccccaggggggaaacaagccccaccaattgggttgagcaaacggcc

SEQ ID NO: 25838 - DNA, 630 bp, Glycine max
  Clone ID: PAT_MRT3847_123333C.1
tttttgttaatcaaatacaagggagagattttcatccttattattataaatagtcgagcacatttatagtattgcactatgaacaattttaaatatttttccctaaatagaaaaaatatcgctccaaaattataaccagaagttggctgaaaaaaattgacctctactaatcaattatgccaaaattttctgacctgtagtcataaattatatctcaacttttccacttctagcagggagcatgtcactaaacaaaacaatgcttatccaaacactataatcaaccattggcttaaaaaaaattctgaccttagtcataaatatatcatatctcaacttctccattgacaaccagctaggagaagtaaattctgctaaacattgaatcgaaacaacatgacatctgcttcttgtacaacgtagtctttaccttcagatctcaacagtcctttctctcgtgctgcagaaagtgaaccagcagcaacaaaatcctcataagacactgtctctgctcgaatgaaacccttctcaaagtcagagtgaataactccagctgcttgaggtgcagtcattcctgcaaagtattgccatgcctttgtctccttctcaccagaagtaaagtaagttctg

SEQ ID NO: 25839 - DNA, 544 bp, Glycine max
  Clone ID: PAT_MRT3847_123334C.1
ttggtctgtacaaaaccagggcactgtttagatagataattgtcaccttcggaagaaatggagcctgatactgagcagcagcaaggtggtgtggctgatgaggcagagccatttatgggatctggccgttttgcacgagcttatttgctgggatacaattgtgctgatgaaaaggagcttgaagctactttgaggttttgctgatccccactttgagctcttctagagtggatgatcctatgtctcatcatttacctattagtatctaacattaaatattttgcagtttctcttggtagaagaatatttccttagtctcagttgaatttcagtagtaacaatttcttttctcgttactgcaattgttggttctttatgttacaaaagtgatcattggtgtgacatttttagattggtatgcaccaaaatgattttgtcaatagtcgtattacttgcttcccactcaaaggcttaattgcgatgtactacctattgtatgaacataggtgactttggcacgtatagttttaaattttaattgctt

SEQ ID NO: 25840 - DNA, 340 bp, Glycine max
  unsure (1)..(340): unsure at all n locations
  Clone ID: PAT_MRT3847_123335C.1
gtcgcngnnaaagtcgcangcaacgcgtacgtaagctcggaattcggctcnagngtacgntangcncacncgnnggtngttgaggttatacagncanacgtanttcgtccnactatnnacctcgtgggcgattcgccaantcggggaacncccnnncntcccantagtgtaagntncaanaancgnacttatcgtncggcnatcggggntaattcaagcnnncgnacaagtcctngancgnaatnagggatnatgactgggaactncttngnaggttgnncaatgttctcatnccanangngtncnaggantggnntgtngaatgnggcaatnnnacanc

SEQ ID NO: 25841 - DNA, 273 bp, Glycine max
  unsure (1)..(273): unsure at all n locations
  Clone ID: PAT_MRT3847_123336C.1
atctcggaattcggtccgagtgcgtatatgtatgtgtgtatactctctcaagtacgcacatatatacacatccattcgtacataaatagttatttctattgttcctgcgatgttaattcacataattgctagctgcgtctggtantggatcggatgagtagataacgagtctcctaggatcaggtagcggtccttcagagcttcgcaagttgaaatatgatggttccagcacaggtcaagctccttgtgagagacagtgaagtaattttatag

SEQ ID NO: 25842 - DNA, 384 bp, Glycine max
  Clone ID: PAT_MRT3847_123337C.1
ggctcgtgcaaaaagaaagaatcttaggcgagtttaaagattgacggcaaggaccctgttgggtccctgggggcgaacattttccccgatagacattcgattgcgactgcggctcatagccatgacgaccttaaggactaccacgagccggagcctgtgccgtttggcggcaccgactgtgttcaagttatggttgttttcagagcaaggatagcatagatttgcggccaattttttgtttgtctacttcaccgttttaaccgataagggagtcgccggcgctaagtcctatctgaatacccgttgggactcaatgaattcgattggaccttcggcggcatgatcttccacctctctttctgcaccgctggcatctcattgggg

SEQ ID NO: 25843 - DNA, 311 bp, Glycine max
  unsure (1)..(311): unsure at all n locations
  Clone ID: PAT_MRT3847_123338C.1
cttttatctcgatggacacagaattccccggtgttttttttttaccacacctggacccaacaggagcgtgcaaccaccgtaacagcaatcgtaacctacacttctaccactaccgnctttttaagttcaacgtagacgctcttaaccttatccaggttggtcttacttttaccgacgcctccggcaacctttccgatctctccggataccgcttcatatgtgaatttaacaaccgtgacttcatcttttctcgtgtcgtctattttcttgactacatttattctttcttcactcgttaattgaattaattt

SEQ ID NO: 25844 - DNA, 378 bp, Glycine max
  Clone ID: PAT_MRT3847_123339C.1
caacggcaagcctttttgggtgggctctaaagttcctttggccaacggcgctccttttcctccttccttaacctttcctccttttttttttttttcctttcttaagcctctgggcttcaagctagggcctttggcatctccctaacaggcttgggcacttttttatcagcggctttttaagccttggaatcattctttttggggtaaataacccaagctttatcttcggggggttaattttcgggaacagtccctgctactgctgctgctgctgctgctgcccccgaaactgccttcttctccttccccttttcctttttcttcttcttcttcttggcagcaggggggtcaacaggctccttttcaccctccttttcc

SEQ ID NO: 25845 - DNA, 223 bp, Glycine max
  Clone ID: PAT_MRT3847_12333C.1
tgcaaactgattttatctattagcttaaaagttctctcttgctattcctgctgcattaaccccatttataataagcaccatcaatttcctaaattggttcatatataggaaaatacaatgaccaagatctttgggctgtaatgtctgctcttcatagcttgttttggttctgaacatggatcctctaagaaggatcatttgaggtaatatgtgctcatgatag

SEQ ID NO: 25846 - DNA, 378 bp, Glycine max
  Clone ID: PAT_MRT3847_123340C.1
caacggcaagcctttttgggtgggctttaaagttccttttgcctacggggctccttttcctccttccttaacctttcctccttttctttttttttcctttcttaagcctttgggcttcgagctagggccttttgcatctccctaacaggcttgggcactttcttatcagcggcttttttagcctttgaatcattcttctttgggtcaataaccccagctttatcttcggcgggttcattttcggggacagttcccgctactgctgctgctgctgctgctgccgccgaaactgccttcttccccttccccttttcctttttcttcttcttcttcttggcagcaggtgggtctacagtctccttttaaccctccttttcc

SEQ ID NO: 25847 - DNA, 313 bp, Glycine max
  Clone ID: PAT_MRT3847_123341C.1
ttttggaaatagtccaaaggaattctttccatatagtacgaacccttgacaccatttagtgctgcacttaaagaaacttcctgaaaggaatcctcctcatcaacacagtcagaaccattccttaacacatgttttgtgcaaccttagaaagaatttcttcatttacgggcatgatgggagtggcatatttttgcactccaccacaaaaaggatcatatacctcatgttctgtgcctaccaatctctgatcagtcgtagtcgagacactacagaattttgccacaaggtagatccagatgccattccttgggag

SEQ ID NO: 25848 - DNA, 400 bp, Glycine max
  Clone ID: PAT_MRT3847_123342C.1
cgagtcagagagagcgagagaaaggcgcgcatgatgtcggacgaatagcatcacttcgattctgaggcggatgcaggagcgtccaagacgtattctcagctggctggtaccatgcgcaagaatggcttgacttgcgatcagatccatgccttgcagggcagtagagtgttgtacgtgaaatacaggcgagcatggacctgcaaagtggcactctgttgcaattgacattattaatgggaaagagatcgaagatgttgagcgatcatccgacaaatgtgatgttacacatgtgaatcgcactgactatgagcttattgatatctatgaagacggctacgtgagtgtgatgactgataatggacataccaaggacgatctgaagctatctactgatgaggca

SEQ ID NO: 25849 - DNA, 332 bp, Glycine max
  unsure (1)..(332): unsure at all n locations
  Clone ID: PAT_MRT3847_123343C.1
acgcgcgggtgcacgcggacgaccggctgcgatacgacatcagcatggaggagttctaatcanagtntggtctgcaatcggacctcgctatacttcgcacctgactgactgctacggcaccggaaaaccggagatcaactgcttaagcatcatcgttatgggcaccgatttcatgctcactcagctatctcacgaactcaacgaccaacatttgcaactcacgcagagcatgccactgtccaagccacatgaccggagcttatgagagtaggctagagcgattttcacggttgaatggccagggcagactgtaaacaggcctgtgagaattt

SEQ ID NO: 25850 - DNA, 209 bp, Glycine max
  Clone ID: PAT_MRT3847_123344C.1
aatggcgaacacactcttcctctttgtcttcatgttactggcgaacaccgcgctctctctatatccgtcagcctcaccagccgagagcaccaccagagaggcccagcatcagaaagtctgatcgtcggaggctggcctggacaagtcgtgaaacttaagaggatcctatcggatggccaaggcaaagaattcagtatagtaggacaggg

SEQ ID NO: 25851 - DNA, 276 bp, Glycine max
  unsure (1)..(276): unsure at all n locations
  Clone ID: PAT_MRT3847_123345C.1
cngaaacggcggcggatatngtggtaacnatggtggatgttatggcggaagangcggctacagtggtaaaccatggcngangctatggaggaataggcggcgggggatngtggtggtcaaggtggccggggaggtngannnnnnnnnnnnnnnnnnnnnnnatttcaatgcggagatcncggtggtcgangtggcggtcgcngcggcggccgtngcgncggtagagatggagactggcntgtcctaaccanagttgtggnaatttgaatttgcaaa

SEQ ID NO: 25852 - DNA, 1908 bp, Glycine max
  Clone ID: PAT_MRT3847_123346C.1
ggctcgagctgtgttgggttccttggccttgtttatcaaccaaatctagagaaacccatttctctgttctcccatttgaaggaaaggaaagcttacacctctctctccctctctaactactgattcgctctaagtgcgtgggttgggttcaatgtgctgttggtttgcttgaccttgtttatcaaccaaatctagagcaacccatttctctgttctcccatttgaaggaaaggaaaacttacacctctctctctcactaactgattcgctccaattccgccgcgcccagattcttctctctcacctacaaacccggtcccaacaaggtctttccttccaactcctatggcgggagaaacatcttggatcagccactatgatgacagacaaagggagactggggcgtttgattcatttttagaacttggtgaggaaggtgaaaaagaagcaactgctgtttctttggatgttttgccagatgacttgttggaacgaatcctagcctatctccccattgcaagcatttttagagctggctgtgtgtctaagaggtggcatgaaattgttaattcagagaggtttgtatggaacctttcacatgttctaccgcagaaaccttggtactttatgtttacgagctctgatgaaccagatggttatgcttttgatcccgtccttcggaaatggtatcggtatcgcattgaacttccatgcattggaacttctaattggttcattgcttcatcatatggcatggtctgcttcatggacaatgacagcagaagtgaaatatgcatctgcaacccaattaccaaaacctacaggaagcttgaggagcctccaggtttgaaagtttctgattacagtgcattagcaatctcagtgaacagggaatctcactgttatactgtggcaattgtaaaatctaaacaagtccctgagaactttgtccagtgggatatctcaattcatctatacaattcagaaaatgcaacctgggtgacctcgttaacggaagttttgatggggtcgagaggtggtaatgagagtgtgatattcaatgagatgcttgtaatggtgggaggaattggtaaaccagatcgacctgacataataaaaggaattggtatctggcttctaaatgataagaagtgggaagagattgctcgaatgccccacattccagtacctttttctctaacatgagatgatgtgtttaccagcagcggtggcttgtaatggtgggaggaattggtaaaccagatcgacctgacataataaaaggaattggtatctggcttctaaaggataagaagtgggaagagattgctcgaatgccccacaaattcttccaaggctttggggagtttgatgatgtgtttgctagcagcggtgcagatgatctgatatatattcagagttatggaggtccggcgcttctcatatttgatgtgaaccataagcaatggaaatggtcgcagaaatgccctgtgggaaaaagattcccgctgcagctttttactggcttttgctttgaggctagacttgaaattgctccatagttctccttacaatcaagagctgctaattgtgtccaaggcttctactcattttccttcattgttcttttaagtaaaaatttaatatgatttcagtgttttcacagtttcatacaaaatgttcttgctgataaaactgcttattcatggatactggaatattattaatagcatttgaaaataccacagctttttttttaccaaaatttgatcaacaccaatcaaaaacaccaacaaataataaaagaaaaaacaaaaaaaaaaaaaaaaaaaaaaaaaaaacctttcggggggggccccggccccaatccccctaaaaagggggtgaaaaacccccccctttgggcgg

SEQ ID NO: 25853 - DNA, 495 bp, Glycine max
  unsure (1)..(495): unsure at all n locations
  Clone ID: PAT_MRT3847_123347C.1
ggacaacgtatataatatcatatgtaaattccagccttaaaactatttgagtctctcgacttaatgctgttcgaatttcatgattgtcacttacaattatatgtaatgtgtgatctttgctaattaaattctcttttgcttcccagcaacatgaaaagctgtatgaaacagagaatttgtagtttctttaaacatgaaaagagcctagtcaaatatgtttattattttttttatttatggtgtgactctctttaattggctccctattctccgacaagccaccaggttgagatcgttgaccactgaaaaatttccaaaactccacaaaaatggagtcatggattcaccaaccaaaccatccatccctagaacattattaatcaattcgatctaaaagaagagtattagtgaaggaaatattcccttctctaatacattntttaaggcaccttttttattattaaagtaatttggtagtaaaattttaaattaaat

SEQ ID NO: 25854 - DNA, 239 bp, Glycine max
  Clone ID: PAT_MRT3847_123348C.1
aaaaaaaaaaaaaaaaaaaaaaaaaaaaaatttaaaaacaacaaaaaaaaaaaaaaacaaagaggcatacacaaacatacaccatacccaactctaaaatacaatcaccttactccacttcacttccctcacattcacaacttcctacctaatctatccatcacattacccatctaaaccttcaaataacacatctctcttcctccatcctacatcatatcaaatactcccttatcaaa

SEQ ID NO: 25855 - DNA, 476 bp, Glycine max
  Clone ID: PAT_MRT3847_123349C.1
ttttcttgcaagtgtgcaaaagaagaagggtttataaaggctgctttcatccatccattggtataataaccggacgagttcaagataggtcgggaagcttcagtttctgtcatgatatcaaaccatctttgaaggaattagtggccagggaactcgttgaacctggttattgcagccgtgtccctgatttcactgttggaagatttggttatggatatgtcaggtatctcaatgaaactgatgttagggggttacgtatagatgaaattgtgaagtttcataggcatgagatagttgtatacagtgatgaaaatgataagcctgctgtaggccagggccttaacaaggcaggtgaagtagttttggtattagacagtgaaatatagaagtctaaggaggggaaggaagatgttatggttagcaaattaaaacaaattaccaagagacagaatgcacaatttaatttcctttgatct

SEQ ID NO: 25856 - DNA, 287 bp, Glycine max
  Clone ID: PAT_MRT3847_12334C.1
gttcgcggggttgttacaaaaccgcgatctccggtcgcctgacgttataagcgggaccaactgctttcggtgctggattttgacaaggtttaactacctacggactagtatggctacggcttcttaagggaaacaatatccctctctgagctgaccacagactcggcgaatcaggagctttgccacgcctagttgatctgctgagcacgcaactatggacatataggacctcgtgatagacagaaacttgttatgtctctaattgagaactatgtgtactcaaacgt

SEQ ID NO: 25857 - DNA, 659 bp, Glycine max
  Clone ID: PAT_MRT3847_123350C.1
ggtccggaattcccgggtcgccccgcgcccggctaaccctccttcctggctcgcttacacggcgttgcttgctgctcttcagtaagtagactactgcagggaattgcgttcaaatttcaatgtgcagaacgcaacgcttctctttgacctatctttgtgatggaatgtgacgttggaggtgtctctgattcatgcattttgcacacttgcaagagaagaagggtttataaaggctgctttcatccatccattgatatcatgacagaaactgaagcttccctacctatcttgaactcgtccggttattataccaaaccatctttgaaggaattagtggccagggaactcgttgaacctggttattgcagccgtgtccctgatttcactgttggaagatttggttatggatatgtcaggtatctcaatgaaactgatgtcatggggttacgtatagatgaaattgtgaagtttcataggcatgagatagttgtatacagtgatgaaaatgataagcctgctgttggccagggccttaacaaggcagctgaagtagtttttggtattacacagtgaaatattgagtctaaggaggggaagggaagatgctatggttagcgaataattaaaacaaattacaaagagacagaaggcacaattta

SEQ ID NO: 25858 - DNA, 1461 bp, Glycine max
  Clone ID: PAT_MRT3847_123351C.1
taaataataatgataataataattcactagttggacaacatggaaatattacagtcataaaacaaaattagctgcactcaattgaatatatcgttattcaaactttgggtgatgaaaacagatacatcaatggtaataatagatgcgggggagggggggaatcatctcatctcaaatcttttgctacaaatctcctgtactatcaacatcattctatttttgctaacatgaaaaagagttcaaaaaaatcaaaagaaagaaagaaaagaatttacagttcatatatgctggaatacatcaaaatttgctcctgttagatcttctgaaagtgacgttaacggaaagctcgtgaaatctatggaattttgagtatgcagctgcccttcttcccatgaacttgtcttaaaatcctctgattttgtggcatttacttggaactgaaacaaagggtcaaacttgttgtcaccctcccacgagaaccctgcattttccatcatgctgctgatatgacaccctcctccatggtaaatggtgctcaagtttgagctgttgctggaactttctttcacctggtcattcatgaacaatgaacttattttggaagctgaattgttgtctgaaaactcagtcaccgacacgttcccgtgatcagaattggttagacttggcattgaagagaatacatagcttgaattgggtccaaaggggttctgatcagatgctttaaggcttgtctgatactgactaacaggtaagttaaaaccagactgtgcaacacccattggaaaatcatagtaggacaaagggtccaatgctggcttggtcatgaaaatttctcttgaggcttctgttagccctccatcatagtaactggaatcacttattagaagtgatgatccctgtgatgaaggaaagattaatggaactgaagggccttgagacaatggtgtttgcattggtgatgtctctatgattttcttttcttccttcacatgagcttctgtgaggggcttgtgtgtacttgggtcaatcccttgcttcagaagcttcttctttaaacatgagttccagaagttcttaatctcattgtctgttctccctggtaactgtgctgctatttgagcccacctgtttccaagaacttcatgaagactgattataagatcctcctcctgctgtgagaacatgcctctctttaaatcaggcctcaaatagtttatccatctcaacctgcaactctttccacatctttgcaatccagctagtttgggaaccgagctccagcatccgactccaaatcttgttatgtaattaaatagcttctcatcttcttcaggggaccataagcctttccttaatttttgcttcacacaacaggaatggcgaccccatttgtgagagaggactgggggggaaagcccatggttccggaagggtggggcggacccgggaatccggacc

SEQ ID NO: 25859 - DNA, 1341 bp, Glycine max
  Clone ID: PAT_MRT3847_123352C.1
gcgtacgcccctaagtggcgcggtcctcacgccccctgcctgccccgtaccaaccccaacagttgcatagtcctcactctttctgggtagcaagtagcaacgcaaactcagatatggtttggtttcaatgcgaagattgcggagacaacctcaaaaagcccaagttgtctagtcacttccgaacttgctctgcctacaaattgtcgtgcattgactgtggggaaatatttgggcgtgataccgttcaggatcacacgcagtgtatcacagaagcggagaaatatggaccaaaaggccaaggaaaaacttttaacgttgcaactgccaagcctaataaggatagcaagcaaaggcctgaagttgatattaatgtggggttatctgatcggcctccttggttctgtagtctctgcaatacgaaagctacaagtaagcaaacacttcttctccatgcggatggaaagaaacacagggcaaaggctagagcattccatgcttcaaagcaaccaccagtcgaggcagacaaatctgccactgatgcaaaggttgctgtggagattgctcctaatgatgaggtgagagatgacaaaattggagagctgccaaaactgcaagaatcttctaaacaaaataactcaaaaccagggaatgaaatttcatcagcaaagaaaaagaggaaacttgaagcattggaggatgaccgtattaagaaaaccaagaatgacacttcagttgacatgggaaatggagaagtaattcagggtgaggaagcaacaggagagagcaatttgaagaaagaacggagtgctgtcaaaaataaaattaaatggaagaagttcattaaatcagccttgaaatctcatcctgatagaattttgaagatgaagaaactgagaaaagttgtcctcagagcactgcaggaatgtggcattgtagtggatgacactgaattgagtgaggcgcttgagcagaagatcaattccagctctagatttgcagttgagaacaagtatgtgcgattgctggccaaagattgaacactagttaaagttcttatgactagtaatccatgcaatttttcgtaattctcttgttgcttggtagacattcattcatacaaaaaaaaaatcctcataaagaaattttttgtaacgaatacttcattgttactttgtgcaaaattattcaattattatcttgtagaaaaaccaaagaaaagatcaaggcagagagattcgtttggttattatgttgaattactagcaatgagttgtagaatctgcagaacatggttcttaaatcttatgtgaccctatgtgaactcttttagacgagtttaat

SEQ ID NO: 25860 - DNA, 415 bp, Glycine max
  Clone ID: PAT_MRT3847_123353C.1
ccccggccgtccaccttacatttcgctcgacctcctttcttctctgactaacgactttttttaaatcacattgtctaatgcaaaaggcggaggcctccattgatctttacgagggaatcaaccatactataaactaacttgattttaagacttgttccaaacctctaatccgtacccattgttggttttaagccgggcctacatggcactgatgaacattccatgaacttctctaccaacttccgctacaaatattttggacattcacctcctactcacctacagatgttttccaacaaaagatatcaattacgatcactgaaaatattgatcttctccatgaaaaaagacattttatgggctcctccgattttacttaaatatgaatatacatttactcgtagcttgaccaaat

SEQ ID NO: 25861 - DNA, 2005 bp, Glycine max
  Clone ID: PAT_MRT3847_123354C.1
gtaggctgtacttcacggatcatatgcacgggggaatgaagatccagttcctgacagtgcggaggacgcaggtgaaggatatagaggctaagcgagagctctggatgactcaactggaggagattgattgtctgcaccacccgatacgcctagggttagaagcgatccactccgagccctgctgaataaaactggactaaaggcgtgtgctgttgacgctccatcggccacggccactaccgtgaccagacgacgacggcaccattccatgaccgagcccagctggatatgggcgctcaattagagacattaatcagacgctatactatggcacgaggttgctttctagtttcgcttcacacttcacacttaacacttaacacttaacgtatccgccaaatattggggcatattttaccaccacttctctgcaatagagacccttttgcttcttatcagataatatgggcttagtctgcagcagaagtcgtcgttttcgtgaaacgcatgctgaagaaattcttcaatatgcataacttgatagtagaaccttgttataatcaataacttaaaagcatatacaaatatttttactacttggctctggagaggctgggctaaaaagctacatacaactcgtaaaactttatgtttaacctgccttaaaagagctggatgataagtggaaaaggttcgtgctgaatgcctttgactcttcaaagttaataataccgcatgatccatgggaattttccacaaagctcccatatctttgaagaaggtacggaatctctcgtttaatgaatgagattggtcaaaagatttagaagctgtgggagtatgcggtaaagcaatgaaaaagtaaacggagtttataaggaaaagttacgaagagtgataattctataatggatgaatttgatggtcttgctcatgcaatctatgtttccgattgagacggctattttgtatacaattgtgagaaacacttttatgcaagttaagttgactttgagaaggatttatctcatggaagcttgcttattatgactattcttcagtatgtatgtttaagagggatatgatatttttacattgagaaattaaaaggtcatctgattttgttgggtatattagaggtcaggtatacaacaatataaaatcgatttgttgattttatgtcaagtaaatcctgggtggatagggaaagcctttctgactttatgaggatgaaaacaagaacagaatgatggagactaaggaactttttgagtgggtcctaaggcaaccatgttttgagaaaacatccttcatgttatttttaaacaagtttgacatatttgaaaagaaggtcctgaatgttccgctcaatgtatgtgagtggttcaaacgattaccagccagtttcaacagggaaacaagagattgaacatgcgtacgagtttgtgaagaaaaagtttgaggaattgtatttccagagcactgctcctgactgtgtagatcgcgtgttcaagatctatcaggcgactgcccttgatcagaagcttgtgaagaagactttcaagcttgttgatgagactttgagacggaggaatctctttgaagctggcttattatgaccatgcaacagtatgtatgtttaagagggatatgatatttttacattgagaaattaaaaggtcatctgattttgttgggtatattagaggtcaggtatacaacaatataaaatcgatttgttgattttatgtcaagtaaatcctgggtggatagggaaagcctttctgaatacctacttgatcaccacatccatctttagaaggaaaattagttgcgctcaaattttcagagatgacattatgctttgtgattatctttttcattgattgaaagtcactaatgatatatttcatatcctttatttatttatgtctattaaatgttgatgaggttttgcccttggttcagcatgtaagttaatttgaggtttttttgtttgcttgct

SEQ ID NO: 25862 - DNA, 580 bp, Glycine max
  Clone ID: PAT_MRT3847_123355C.1
attgacttgttcttttaatatatatgggatgaactcaatgaaaaggatttatacagcttccttttgacaaacttcagttcagaacattattaagacttgtaacatcctggttggtcaacatcttgtatgtggccagctaaggctaatcatcaaaaattgacttgttcttttaatatatatgggatgaactcaatgaaaaggatttatacagcttccttttgacagttgcatcatgctgtttcttgatcaatgtcataggaatgcaagtttctcatcattgaacaacaaacatgataaccttaacttaaaagttgagtatacaccaatactaaaagtgtaccttttcatgacagccagttttacattcaagatgaaatcatgcgtagattttgatgaagtgattccattttattactatttgtgatattgtttgttgtcctgttctgttgtttaattagctgtccaaataataaataaataaatgtctcaattgccgtctgaatcatgtactgttatcacgaaatgacacagatcaaaacaacatgcatagaaacatccgtgatagggattttttttatgg

SEQ ID NO: 25863 - DNA, 375 bp, Glycine max
  Clone ID: PAT_MRT3847_123356C.1
cccacgcgtccgcccacgcgtccgtatagacaagatcgagatagttgataaatgtaaaacataatatactgctccagagcatatatagcgacaaacatacagtgttaaatgtgtctctttatgtgctatggatcagtatcctagttgttacattgatatacaagatcgagatagttgatcatctgtgttcttgggagatatttgcggtcggatcctgtactagcaggctgacgtctcgtgaagtgctttggatgtggaagtacaatacttataggaatgaggtaaacatgtgtaatataataatagttgcttcgttcgatatttgagataggatcgtgtaagattaatcgtgaagagtttcgacgtattcctgaa

SEQ ID NO: 25864 - DNA, 275 bp, Glycine max
  Clone ID: PAT_MRT3847_123357C.1
ctactcccttttttttttttttttttaaacatatttttaactatttttttaattgtatgaataatgcgggcatcaaggccaacatgtgtacattataaggacaaaatataaccatatacgatattatacaatcacaatttcatatcccagcaatccctggcttatacataagaacacagactaaaggacctttggttaacaccactttcaatacctaccaactatttaaattctactgctgattgcaggtcaaatgctctcactaagtaatgtat

SEQ ID NO: 25865 - DNA, 192 bp, Glycine max
  Clone ID: PAT_MRT3847_123358C.1
tactcttaaccttattttgggcagtaaggcttaagctcttgagtagccatggccccccttaagctggcagtttcattccaccaacttgatgaattataacaatgtcaacaggcagaggaaacgcgtgattcagcgctcagcacaggctacacaaaagaatataaaggatgtcattaatggaccaaccagcga

SEQ ID NO: 25866 - DNA, 253 bp, Glycine max
  Clone ID: PAT_MRT3847_123359C.1
tggaatatgcttagaaaactgccaagcccacccatattctctcataacttgcaatcatgaactggataacaataacaacaacaacacggccacccgtatagatccacctctaaagagatcatcattattaccaatttccgatttcacagcgactattctttgtgggcatctcttctcaaatgccaatcttccccatcacggtggctgcatgtcgcaggaccggcaatgcaccggaaacctccatcttttctca

SEQ ID NO: 25867 - DNA, 580 bp, Glycine max
  Clone ID: PAT_MRT3847_12335C.1
aacagatgctggtttatgaatttatgtctaatggcacattgagggatcacctttctgttacagctaaagatcctctgacttttgccatgagattgaagatggcattaggggcagctaaaggtcttttgtatctacactcggaagctgatcctccaatatttcaccgagatgtaaaggccagcaacatattattggactctaagttttctgcaaaagtggctgattttggactttcacggcttgctccagttccagatatggaaggagttgtgcctggtcatgtatctacagtggtaaaggggaccccgggttaccttgatccagagtacttcctaactcgcaaattgactgacaagagtgatgtttatagtcttggtgtcgtatttctggaacttttgacagggatgcatcctatctcacacggcaaaaatattgttagagaggttaacgttgcgtaccaatctggcgtgatattttcaattatcgatggacgaatgggcttttattcatctgagcatgtgggagaaaattttgactttggccttgaagtgttgccgaagatgaacccagaaggctcggc

SEQ ID NO: 25868 - DNA, 258 bp, Glycine max
  Clone ID: PAT_MRT3847_123360C.1
ggctttcgttagagactcctgaaaaccgctagatttgaatcaaagggtcaccaggatacgggcatccatatctcgtatcactccttatctcctctgtagccttagaatgaagaccatgagaagcatcaatctttgtaagcgagcttctgcttttgccctgtctcttgtcttagacacacatacacgacgacccagctgctggagctgcaggatcacaactcatacatgattcgcatggatacaaattaagcgtgttgg

SEQ ID NO: 25869 - DNA, 612 bp, Glycine max
  Clone ID: PAT_MRT3847_123361C.1
ggctcgggggtctagatcgcaatttagaacgaggagtctgtctgccagaggagtgatgaggaagggaattgttcccctcctacacaagaggaattggcagcagaaattcataggttagagttgcatgcctatcattgtacaattgaggcattgcatgcatcaggacccttaagttgggaacaggaagcattaatgacaaacctccgtctttcgctccacatatcaaacgatgaacacttaatggagctaagaaatttgatttcttctgaaaacagcattcctttcagatgacaggaatttttttcctcttcaatttaatactttttccctaggatagagtttcggaatagtttgatctcagcctcattcaactgtaagaagaaagatgaaatatttcggtccttcatttatgttttatgacttagtgatatagtttgatgtgaatgtacatgctaaacttcgtaaataagtgatcatttctgaactctttaaacacatcatctatgatatatcctcttattaaaaaaagcaagtaaaaaaacattctataccggatcttttgaacctttgtacatttagatttgcagacactgtagactgactgatactgga

SEQ ID NO: 25870 - DNA, 385 bp, Glycine max
  Clone ID: PAT_MRT3847_123362C.1
attcggctcgagcatcattcagagagtcttttttaaatgtcacagctgctggagagcgccaagaacttcgcgctggagaaggtaaacgatcaggccaagccggaggccagcggcactgacccgaacgttacgcgcgtgagcagagataatgtcaagctacttgtccatggactctgcacgtaacccttattcaaccttcatacccaactgtgagatcaactacactatgcaaagcggcatccagtgacattgcatcagggaatatacgagacccaggcatcgatgaatgccaaggacgcaacgatgagacgaagcgccagttcaggttccatacagcctatagctgagcttggggaggacattgaggcagactggcacctagact

SEQ ID NO: 25871 - DNA, 202 bp, Glycine max
  Clone ID: PAT_MRT3847_123363C.1
gaagtatgcaacacacctattaccaggcttctgttatacacagactctcactacgctatatgggtgcgtttgaaattagaagctcgagacctgacttttgcaacgcgcatagacatgcatcctcagatctgatcctgaccagacatgttgatctggatgatcagacggagaaagagttagaggctggccatcgcgatgcaga

SEQ ID NO: 25872 - DNA, 508 bp, Glycine max
  Clone ID: PAT_MRT3847_123364C.1
tccggaattcatcattcaatgttttctttttcttcaatcacaaggacgctccatctcctttcccacccactcaacgttcccccttggaccttcctcaatccattctttcttgccccctcaaccactccgcataccgcctccactcattcttcccagtgtcagcggtggaggagatctgcatctctcacagcttgcatgcggtcatccacttctcggaaggccacatcaatgacaaacgaaggtggaggagatttgtccacaaccaccacaacaacaaatgagatccacacccgccgacaagcaacggtaaaggagctatgcgcacgaccacgattgtgaaggacatttggatttttgcgagtgattcttccatatttctcaattattttttttaaaaattatcacttgatttataattttttaaaatttgttattgggatgaaatgttgtgaaaaaattgtttttgattatgggttggaattgtatgatctctcttttcattttctcc

SEQ ID NO: 25873 - DNA, 369 bp, Glycine max
  Clone ID: PAT_MRT3847_123365C.1
ctcgagggaagtgcgagagagagagagagagagagagagagagagagaagcgttaatctgaatgggttacatccaccatggaagaaccggtctcaggcacatggtcagattcagaaccgccaccggcgtggtctcaaactccggcagatcgcaatcgcgcgctgcattcccctcccattcccctatcctcggcaacgtgctttttttctcaacaggcgatgaatacctcaacgaaattaccgcagaggtggaacgcgacaggcgcagggagcgaaacgagcgtttgcgcctcggcctcgacaccgtcgacattgacacggagtcggagcaggactacatgggcgtggggcccctcatcgcgaagctcga

SEQ ID NO: 25874 - DNA, 347 bp, Glycine max
  Clone ID: PAT_MRT3847_123366C.1
caaggaaggagctctccatattgatcattaacagcaaagctgggttatggatacaacatcattgataaaccagcggaaactttcaaacacccccatttttcggcagaaactctattgaggccaaagcactacccgatagggtgctgtataacaccttccccacaaatcctttttgggattctccgtatatacccctggaaaccgggctgccctttttttgtatatggatggctatacaggctatgaacatgatgaggccctccacgggtcccattcagaaatttatgtccggtgacagggagcacatactatgactattggtgagaccaatccttgtcgtagtctta

SEQ ID NO: 25875 - DNA, 326 bp, Glycine max
  unsure (1)..(326): unsure at all n locations
  Clone ID: PAT_MRT3847_123367C.1
attccaaaaatactgtctccaaaattcggtcatggcgcgattaatgtaaaggacagtagtatttnttattctttcggggacgccaccaatgggaaaagccctaaaaaaaaatggaattcctctaagaagtatgataggacttgcacatgcttttaaatcaccttcttctatgacccaattaaatttgatgtttcaaaattgaaaattttagccttttttgactctttttactattctgtgttgctctcttcacaataattttaccgcatccattacttacatgatattctttttcattgtttcaaagaacaacaaaaatttttttt

SEQ ID NO: 25876 - DNA, 150 bp, Glycine max
  Clone ID: PAT_MRT3847_123368C.1
ttagatagaaatgaaggggaataaggatacttttgcctcggtgtgcattcaatccaatctaatcaatataagaagagtatagcgagagtggtttagaataaagaagttgagtggcgccagcagtcattataaggctatcgccgatggtga

SEQ ID NO: 25877 - DNA, 875 bp, Glycine max
  Clone ID: PAT_MRT3847_123369C.1
ttgataacttgatcttgttttgtgaagactgaattcaaatgggtgccaattaattcagtcttcacaaaacaagatcaagttatcaaatttttctaatgtatctcatcaccgaatgatcatttgggtgcaaaggagtttagaggaccctacaatacttgttacaacgtatgaaggagagcataaccatggtcatcaaagagctgaaatatcacttgtctcaaaccaaagtgaagcccttcctcctcttaaagggtcaagtcctgtttcctcacctaatacagcgacaattcgaagtgctgtttgccccaccgtaacgcttgatttggtcaagtcaggattggttgaatttgaaagtgcccaaaagtcctctatccagcaatttttggttcaacaaatggctacttctttgacaagggatcccaatttcacaacagaacttgccactgccatttcaggaaaaattctagaggcccaatggtgaattattaacctaggtgtaacttaattcataatatatactgaatttgtgggagatatccccaaaatacaattttagagaaatgtgataaattttaaatgtaattaaatctcggactaagagattatagttgttgttaataaaaaacacacatcattattatgaacaaattatcaattttaaaaaataatctctctcttttttaattatcagaaagattataaaaaaaattattttcttaaaataagttcaatcatgtatatactcactgcactgaggagaagggattgtattagtttgcttgcttctttttagaggggctgaagagacaaatagttggaatgtatatagaaaattaaagtgccaaaagaaaaatcagatttcctcttatgaaaaa

SEQ ID NO: 25878 - DNA, 711 bp, Glycine max
  Clone ID: PAT_MRT3847_12336C.1
atttccagaagaattaacatattctcctctcattctcactcaaaacacaaaatcctaactaaggtgaaaatgaaggcatcacgcattgctttgttcactttggtggtgcttctttttgtggctgaagttcaagtgtcaaaggcagtgacctgcagcccagtgcagctgagtgcatgtgtgagtgcaataacctcttcaacccctccatcaaacctatgctgctccaagatcaaggaacagaaaccatgcctttgccaatatctcaagaaccccaatctcaagaagtttgttgactctcctaatgcaaggagagttgctaacacttgtggaactcccttcccaaggtgctaaggtgttactaaatttgaagtggttttaatttctctgcctgattatgcatcttgatatctatccatgtgttctggccagagaccagagagtgaaagaaattatatatatatgtgttatcatatatatatatatatatatatacatatatggtgtggtttaacgtctctatatatgttttaatgttagtgagaatactagtcctaatggatatgtgatgctttggtttcatgtcattccatttcagttccatggtgtgctctatctcatcttacgtaacgttaattaattagttgttgcaaaaggctgtatttataattcagagaagtatctgtatctaatcatatgtttcctcttcttatt

SEQ ID NO: 25879 - DNA, 318 bp, Glycine max
  Clone ID: PAT_MRT3847_123370C.1
cttccttcttttagtgaaatttatgtcttattggaatttccccttcactttgcaaagaaagatggagttcaattcccaaaaccctaaccaatctgagataagatggagctcagatgatcaggctggtcctggacaagtaaaatattcttgttccttttgccaaagagggttctcaaatgcacaggccctaggaggccacatgaatatccatagaagagatagggctaaactcaaacaatctgctgaggaaaagttgctttctttggacatctcaatcaaaaccactggcgatccaaatgacccttctgatttggaaga

SEQ ID NO: 25880 - DNA, 573 bp, Glycine max
  Clone ID: PAT_MRT3847_123371C.1
ggctcgagttttgataccgagagaggttcatgcttggtcaaagaacaaaatggagaggtttccacttctttagcattcagtactctagagaatagatatgaagaacattcttaagaagcttcatatcatgtccaatcaatcagaagatgcccaaggggctacttcatcaaagagcaacaagtccagtagtgatggttcatcttcatccactgccccaaagaagctttccaattggttgcattcagtttctaataggcagagtcccagtcctccatctcccaacctggctagaggagaaataatggacccgtctgattcagtgagcagtggtggtttggatgttgtgtctgattcagcgaggcgtgattcggagtctagcacgtcgagggatcctgaagtggaggaagagtatcagatacaactggctttggagctgagtgcaaaggaggatcctgatgctgtacagattgaagctgttaagcagatcagtttgggatcttgtgaccctggtaatacgccagctgaagttgtggcctaccgttactggatgtttctatgatctgtatgggatct

SEQ ID NO: 25881 - DNA, 284 bp, Glycine max
  Clone ID: PAT_MRT3847_123372C.1
aacaaaacaatacaacttaaaaaccaatacaatctacacttctaaataataaaaaaaaacactggataatagaactataaaaatactgaagcacaattaaaattttcccaattatatcaattaaataaactataaacttttattgctattcacggcgctttctcattaataccgatcatattacttcaattttaactttctctatcttttcaattgctaccttataatataatctcattctctgtttcaaatactttccttgtttcataattccttatttatcc

SEQ ID NO: 25882 - DNA, 1164 bp, Glycine max
  unsure (1)..(1164): unsure at all n locations
  Clone ID: PAT_MRT3847_123373C.1
cttttcttctcaaacaaactcttgagattctctaattccgttccttccgtaggcccctagatccggagatgaagaaccccaggaagaagaagaggccgaagccggcgcagaagaaggtacttgaggagaacaacaaaggtgttgttgttgctgggaatgaaaacgaagaagaagagaagagaaaacgcagcgttttggaggcactggttgaggctttctccttgtcttcaatcagggaagcttccatggcctatgagattgcagggggagatcccgacagggctttggagatcctgaggaagggttcttcggacagattcgaggattcgttctcgtgtttttcttatggttcttcttctagcggcggaagcagcggtgggggcggttcttcttcttgttcggggttggaattgggttcgaaaggtgggaggcagcagaagaagaaggtggttgcttcaactggcactgtttcaacggttttggggaaggaatatgtgaggaggaacaatataaggaacaaggggtttagttctaatggagtttttgaaatggaggaggcagagcaattcctctgctctatgctgggggatgattctgatattaacttggctgttgttagagacgttctttgtcagtgtggatatgatattgaaacggcctcagatgtattgcttgatttagctgcttccacaaatgacaaaccgaatactgatagacatcctaactacagagtggacaacattgatgatgagaggttctttgctgaccccaatgacagtttgatagacaggagatcagagtgcacatctctttcatcggaaggttatctttctgataatccatggccttttggaagctaagggagatgaatatcatgtgtttagggaagattcaaagcagcaatgggattcagtgaaatcttattatacgaaagctgcaacagcatataccaaacgggaacgagcttatgctgcatatctttctgaccagggtaaagaacaaactagattagctcagaaagcagacactaaggccagccatgacatatttattgctagaaacanaggtatagaanatatgataactattgacttacatgggcagcacgtgaaacaaagcatgagaatgctgaaactacaccttctgtttggatcatatgttccc

SEQ ID NO: 25883 - DNA, 773 bp, Glycine max
  Clone ID: PAT_MRT3847_123374C.1
cagagcagttcctctgctctatgcttggcgatgattctgatattaacttggctgttgttagagacgttctttgtcagtgtggaaatgatattgaaagggtatgatgacaatctgagattgtacttcaggcctcagatatattgcttgatttagctgcttccacaaatgagaaaccgaatactgctagacatcctaactacggctgcgagaagacgacagaaggggatgatgagaggttctttgctgaccccaatgacagtttgatagacaggagatcagagtgcacatctctttcatcggaaggttatctttctgataatccatggccttttggaaggaaatatgtggaggttctcaatagttctaaagctgattctgctattagcccaggatgtacaaagtctgaaattcctcagaaggtgttggaatctttgtttaatattcccaaaagcactgaacatgacaaagataccatgaattggagaaatgtagtaaagaaaatccagtctttgggacctgggttcaatgtttctccgcatgttgcagaatctcagcaacatacgtgtgctaagggagatgaatatcatgtgtttagggaagattcaaagcagcaatgggattcagtgaaatcttattatacgaaagctgcaacagcatataccaaacgggaacgagcttatgctgcatatctttctgaccagggtaaagaacaaactagattagctcagaaagcagacactaaggccagccatgacatatttattgctagaaac

SEQ ID NO: 25884 - DNA, 285 bp, Glycine max
  Clone ID: PAT_MRT3847_123375C.1
tctcgagccgattcgtctcgacggctcgagcggctcgagcggctcgagacggctgcgagaagacgacagaagggatagggattatggactactactcgggactagaaatgaagcaaatggagaatgacatttttgtttctcaagagagctatggaaaggtgttaaagaaatttcaaaagtttgattacaactttctgaacacaccgatggaaggtaacttgatattgtcaaggcttgatggtggaaataaagaagatcctaattcgttaaagagtcttgcaggta

SEQ ID NO: 25885 - DNA, 663 bp, Glycine max
  unsure (1)..(663): unsure at all n locations
  Clone ID: PAT_MRT3847_123376C.1
aaatattgtactctttactttctactttttacactatgatctgattttgttgtttgttgtgttactgtaatttttgttgaataatgtttggacctgtccagactttctttggatctatttaagcatgggactaatatttccctttcaaatcatcacatttatagtagtgtgaaatctatggaaattatgttgtagttgatttgataaagattttgagctgaagataagtgatgagctacataagacagacatgcagacacacaaatatattattcattaaagatattgtaatttgattaacccttttgggaattctcacatttctatgaaggtcactgctatttttgtccttaatataaataaacaatacttaactgagcttttattacttatatgatttgaagacatattcaattcatgtccttgtgatctcatgaagtttgtcacttcactcatgtatcacctagacagttcttatttcattggntggnnnttcttctaataaaaagttatttntaaataaaaatagagcanaatctagcatgtaaagctggagagcntaccgagacaaaaggagcaaaataacaggttatctatcgagaaagtatgatagattaagttttgggaatgattctagtagctaggtattcattgattctatga

SEQ ID NO: 25886 - DNA, 277 bp, Glycine max
  Clone ID: PAT_MRT3847_123377C.1
ggaattcggcacgaggaaatggcaggatgctagagaaaagggcacagatagtcacatttaatatcattttataatctggctatttttgcacattgtgaagacaagcagcctaaaagagtgattaaaatactcagaaatatttaagattttaacagaaaaaagagaaaattggtcatcctgcctttgttttaggcagctttcacaaaatatagaggttatttccaagattttctttgatttcttactttttacttctgcttgtgtaccaactgattct

SEQ ID NO: 25887 - DNA, 225 bp, Glycine max
  Clone ID: PAT_MRT3847_123378C.1
acacccttccgccaaggcttccggaacttacaaaggttaatgagatttagcggcaaaacaaacggggaagggaactttaaaggtcccccaaaaggtttaaaaggaatcctaaaaacgattgttccagcaaacggaaggaggttggttcacagttccattaattggaaggagttcggttctggtttactttgtttccaaggcttgggaaatggaaaaggcaaagaa

SEQ ID NO: 25888 - DNA, 806 bp, Glycine max
  unsure (1)..(806): unsure at all n locations
  Clone ID: PAT_MRT3847_123379C.1
ggaattcggcacgaggctgatgcagagttcagtgattttgacaagggcaagaataaagaatgttttactgctgggcagatatgggctatttatgatacatcagaaggcatgcctagattctacgctttaatcagaaaagttctgtctcctggattcaggctgcagataatatggtttgaaccacatccagattgcaaggatgaaatcaactgggtaaaccggctcgagtacggctgcgagaagacgacagaagggggtgacactgacatcactgaagatcatctaatgctctctcatctggttttgtgtgaaaaaattagccgtaatacttttaaagtgtatcctagaaagggcgaaacttgggccctttttaaaaattgggatattaaatggtacatggatgtgaaatctcatcagctctatgaatatgagtttgttgaaatcttgacagattatgttgaaggtaagggtgtatatgttgcatacatggctaagttgaaaggttttgtaagtctcttccttcgaaatattaatgaagaaaacaaatcatttcaaattccaccacaggaattatttagattctctcacagggttccgtccttcaaattgactggtcaggaaggagtgggtgtaccagcaggatcttatgaacttgatcctggagctttgccagtgaatcttgaagagattgctgttcctgaaaattcggatgtgaaggttggtcgtagttcatctggtggtgagaatacaaggccttcaaatagatcagaaccccttatgacatctgnaggagatgcatctattcc

SEQ ID NO: 25889 - DNA, 135 bp, Glycine max
  unsure (1)..(135): unsure at all n locations
  Clone ID: PAT_MRT3847_12337C.1
attttgtaataacattaaatgaggcttttttttattgtcgaattgcccaccttaggtgcagtatgtatagagagatgaagatgtacaccatanagcacataacggtggaagtgaacggcataaagattcatgttt

SEQ ID NO: 25890 - DNA, 481 bp, Glycine max
  unsure (1)..(481): unsure at all n locations
  Clone ID: PAT_MRT3847_123380C.1
tacggctgcgagaagacgacagaagggatcctttgtgacgggcgcgcggggtgctaataccttccctatgtgtaaacaactctcgaatcattctttaaaaattcgcagacctctttttggtttttctaacgttttcccttaaatgaacattgatggtgactctgctcgttttctccctaggagacgaatgcactttggcttatttatcttgcttttgtcgtcccgtcgtgaggtaggttgcgacagatgtcgactccattggggacttgttggagagttaagtcattcgatcagtgtgcaattttttatcgngacttctttgttatttatgttcccttttctctttcattttgtccatatttgtatataacctttgctatgttattgtgtttggtgtgtgtcttcttatctattacattcgtagttagaaatattttttctctatgcacacatggcacttacacttttggcacacacgttg

SEQ ID NO: 25891 - DNA, 751 bp, Glycine max
  unsure (1)..(751): unsure at all n locations
  Clone ID: PAT_MRT3847_123381C.1
aatcttcctgcctgctaaagcaacagtttttgatttattgttgtttgttatctttcaaaacaattcatggccccacattagtcagagtttctctctctttacggctgcgagaagacgacagaagggggcttcaaaatggtcaccaaaaaccagaaccggcctccattatcactcacatccacaccaccacctccttcaaattcaaagaattttgagggtgatgtgctcctcctagacaataaagagcaaagagttggagcagaaaaaatggtggggactccaattaatggaagaacaaggcaagctttcacagttgtcaatggcggtgtccacgatcttggccccagtagtgcccctccaagcaatgctggatcggactatggtgtcatagagttcacaagagaggatgtggaagcattgctaagtgagaaagccaagagaaaggacagatttaattataaggaacgatgtgaaaatatgatggattatataaaaaggcttaaggtttgcatcagatggttccaagaccttgagatgtactactctctagagcaggaaaagttaaagaattcactggaactgacccagcaaaaatgcatagaaattgagttgctgcttaaaatcaaggaagaagaattaaattcaattatctcggaaatgagaaggaattgccttncttacaggaaaaattgnttaanggaggaacccgaaaagtcggttgagccggaatctcttgttaaagagagagaac

SEQ ID NO: 25892 - DNA, 170 bp, Glycine max
  Clone ID: PAT_MRT3847_123382C.1
cgataaatatatcatatttactttcaaacaacaaacatactaactcacgatacatccttaaaatgagcccccggattaaatattacttacattacattcaattcaccgaacccaattccattcaaccttctaaattctaaacttatttaactatatgttcacatcataca

SEQ ID NO: 25893 - DNA, 286 bp, Glycine max
  unsure (1)..(286): unsure at all n locations
  Clone ID: PAT_MRT3847_123383C.1
cacncgtacgtaagctcggaattnggctcgagnnanatgcntnannnctcntcgtngcagtctacntaggcnnaaannggcnnanagcngacacgtcaacncngcagnnaccttnggngccttcgngggcggnaacatcacnttactccgcggnatcgtctaagtcatcgcccagaacctcggctccaacgtggctccctcntcctcgcattcgtnactgcatccntgttcnagnattngggtttnagntggatnggattggaaangtttggtgttggaaangana

SEQ ID NO: 25894 - DNA, 178 bp, Glycine max
  Clone ID: PAT_MRT3847_123384C.1
ctgatgtgtttgtgctatgaccaaatggggccaaggagcagtcaccactgccataaatgttaagatgaggacggatcgattgggtcgagaacgcaacgctatagacgaacatagcaaggcttagacagtgcatgttttggacgtgaacacctaccacatacacagattgaactgcaat

SEQ ID NO: 25895 - DNA, 373 bp, Glycine max
  Clone ID: PAT_MRT3847_123385C.1
aaaaaccaatcttatcattctcaggccctgggggatacactttatggcataacaacgctattcagagcctgagacttacaccaaacttgaggctcattatggaagcataatccatacttataaatttaccaaacaccaaataaaatgaaagccacccaaactaaatccacaagtatatctcatttggaaactcattaaaattaaaaatcgaagattgaaaaaccgccccgtggaaagcaattctcccacaccacacctttgggaaaaccatatatcattgaatgaagacattcatccttcattatgccaaggtctctgggcatatatcacgtctctcttgggagctagtggatggccctataaaccccatctt

SEQ ID NO: 25896 - DNA, 307 bp, Glycine max
  Clone ID: PAT_MRT3847_123386C.1
ataaatatgtttaattgaaattcaattttatatactgcactgcaatgtcttccacatcgctaggagttgcaatgacatcggccatgacatctgcactatccataccaatatactatgcattactcgatcataatctaccatcaatgcactaacttgtggactacaatctaacaaattccatatcttcaatgcgtatatactatccagattaacaaacactttacgcccttatagattcactcttccattatattctcaacgtttctaacgaaacccattcatcaatgacagacccctttgctgctac

SEQ ID NO: 25897 - DNA, 361 bp, Glycine max
  unsure (1)..(361): unsure at all n locations
  Clone ID: PAT_MRT3847_123387C.1
cacttaaataaagcgcataactatgtgcaatgagtgtgtttaagggtgaaaaaaaaaaaaaaaaaaaanaaaaaaaaaaaaaaaaaaaaaaaaaaaaaaaaaaaaaaaaaaaaaaaaaaaaaaaaaaannanggggaaaaggggcggccgccgacaaaggaacctcgaaaacccggaaaaaaaaaccgaaccgagccctaaaagcaacccaactttccataaagtaaaacggataaaaacacgaacaaataaaggcaaaagctgggccacggggaaaatgggaatccgccaaaaaatccacacaccaaacaagccggaagcaaaaagggtaaagcctagggggccaaagaagtaagctaac

SEQ ID NO: 25898 - DNA, 274 bp, Glycine max
  Clone ID: PAT_MRT3847_123388C.1
aacgcgccgaaactatacgggctttctgagcatttgctgcttgctacctctccaacggtcttatgcatgtggcaagtgcggcgaggcaattcaatcctattttttgtattcttttggcactctggtgatttagttagcacttccatataattcagcaagagtgattttagttgtttctttttttcccttttatgaaaaggaaattcataggtcgcgtcgctactgcatttcttttgacatatttcacactgattggtgtgcatgattaacttga

SEQ ID NO: 25899 - DNA, 444 bp, Glycine max
  Clone ID: PAT_MRT3847_123389C.1
gagaataaaatttttttttcatatatagaacaatttgaaaaagattgttctcacatccaaccccaaattggggggtgagaaatataaaacccgaatatcaaaatgaacccagttcctcatccgaaaggactataatagtttttcactataccctttagagtattaacaacctctgacaagttgggggaaaaaaagaacgctacgtgtaaacacttctgattgaaaaaactttctcacgggttctaaaaatcccccgagctttttttgctccaaccgcctgaacactctttgcgctccccgcgtttttttttgttctgggaaatgttcccatctttatacatgcaagacttgatagttgattgctcttcaaacactgcagggtttggtggcgctgtattaatatctgacagggggataagaacaggattcggactttcttcccct

SEQ ID NO: 25900 - DNA, 598 bp, Glycine max
  Clone ID: PAT_MRT3847_12338C.1
gcggggtaatgactctaaggatatacatgcaattacaaagtacgacaagaaaaaaaggaatcaaaacataattacttaagctaaaatagaatataattaattaacagtataaaaataaatcatattcttttgctgatacgggtttccttaaaatttaatgagtcagatttgagaaagttgacataagcttaagaagcacggccaagatattagggacagtttgttgcgtggctggagccttaaccatggcattggtcaaaggacagaagctgttacacacggagttccttccttctatacatctcaccggcagtcaaggtgatgattggctgctgggttgcctattgctcttagcaagcagtgttttttggtcatgttggatgatcctgcaggtaaataaaagccgatttattttctcatccttcctttgatacaatcgatgaatagaaaatttattatgtcatatgaaattatcacataattataattcaaacaaatatctaatgaccaacaacaagtggttgatctgaatggatctaatttaatttttaagtaaaatattaattcaaattttataaatcaaaaaattatgattgaa

SEQ ID NO: 25901 - DNA, 1148 bp, Glycine max
  Clone ID: PAT_MRT3847_123390C.1
ggcaccaaaaaacgaatcgattgttatcttgaactgttttacaattggtacacaagaagtaatcaccaacccgaaatgtatgggaaatatgtacaacaggagctgggaatcactaaccatcacaagaaaatgatggatatatctatcaacgaacactactaatcaaaaaagttccaacaagaaagttagtaaaaacaaaactagagaataatatgttgcaacttcaagccgaagacgcaagcaaagcgaaccggaaaaacactgtcccgctgaatcaactcagtccagagtaaaatgactctaatacccctgctctgctgcctatggctctgtggatgaaaaaaaaatcaaaatctcaattcgtttacctcatggacatcaatgtgcgaacccgcttttccctctctgttttcttcgcgctcggagttctcttcagcttgttcagttcttcgcgcaccgcttcctcaacctgatcgatgttgtcgagaagcttcttctgcggcgtcagagcctccgattcgtcgtgttccggtaactcgggtctgtcgctgaacatcttcgggtccctgctcccgaacggcgttcggagtttaagtccatctgatttcgtcgatttctaatcaatccgaagagggaaggggcagtccgagtttcggaaggtcgggttctcctgacctcgctcgcagcctctagtgtgcctgaaccgcaacagtaagaccactccttgcctcgcacttctcctctcgatcgcctgaacgacagcagtaatgtcacggagtggtgtcctagggaaccacgccggaagcacggagcgtaacggaacgcgtcctctaccacgtcgcgcagttgatggcggtatgttctgggagcggggagaagcgcgagctcttccgcgaccgaaggcggcggttcttggaggggtacggagagtcggagcttcgttgaagataaatgagacgcggcggcgggctaaggaggcggcgaggtcgacgacggttacgcgacggtgacgtgattggggcatggctgaagggagggggaagcgagagaatgtggtggtgccgtggttagggtttgtgagagtgggaactgctgggtttcgcgagagcgaaaggaaaaaggggtttggagaagcggacgcgggggcc

SEQ ID NO: 25902 - DNA, 255 bp, Glycine max
  unsure (1)..(255): unsure at all n locations
  Clone ID: PAT_MRT3847_123391C.1
aaaanaataanttagaaatttatcctttactaaaattagccataatactaccgtgaatttcacttatgactgaccttctaaacctttatcaatgccacataacatcactttctctcttgaactcatatttgcgatctttaggtcaattatcaatcccacacctaaaattatcacaatcactcacatgaaatacagtatgtattctttcttttgcaaattatatttcaaaatacattttatcttactacaaaactt

SEQ ID NO: 25903 - DNA, 347 bp, Glycine max
  Clone ID: PAT_MRT3847_123392C.1
tgactaactctttggagcacagatatccggaacgaagcgtggggtattagatgtgtctatatacagttatactactgaaccggcctataaagcggataaagaggaaccgtgctataaaactaacaactatttacactggttttagggatactatttttgagaaattgattcatttcattttttaatcgttcctttcttataaaatggatcattttggagaaaaaaaactcgagttatttttcatttacttgcgtgcgaaaaaaaactatagctccttttagataaaatatagcacattttaaaaaaggaacaacatattcttgtttcttttgaaaaaataccgactg

SEQ ID NO: 25904 - DNA, 360 bp, Glycine max
  unsure (1)..(360): unsure at all n locations
  Clone ID: PAT_MRT3847_123393C.1
ctgtttccttnttntnttttattttttttttttgtggtttttttttttttttttttttttttttttttttttttttttgtttttttttttttttttttttttccagcgcgcattattaagggggaccaaaaaaaaatccccataagaggccataaaaggcgggggagcattctcctatctctttagaggggtcccccccaaggtggccccccccgccccaaaaaaggggaaccccccaaacggggttccttaccatagccataccntaccagaaaaaaccgaaaaaaaggggcgcccaacttnttacttaaaccctattggcggggggggcgggggagggggtaaattcccaaccccagg

SEQ ID NO: 25905 - DNA, 564 bp, Glycine max
  unsure (1)..(564): unsure at all n locations
  Clone ID: PAT_MRT3847_123394C.1
tcgtacgtatgcttgaatcctctagagccgccgctttttttttttttttttttntattttnnnnccnttttctannttcagcagtaaaaactgcgggcttttttcctaaaaatgcaggtgccctattattcctaatactcaccacccctgttctaaaactctccttcatcttacacttccaatttcacctaacttttctacatacttcccaacattaatacactttaccttcttccacattttttataaattttactctttcaccatattaatttttttattatttttctaccatatttaaacttttcttttcttctttcatattttatcactttttcgtttgttgctattattcatatttatatacttttttttaccattttcccttataatctttttactctattcttttctttatatatatacactttatttatttatccttcttattactatactatttacttatttaatttttcttttatacctactttctatttttaatttttatatcattttaattttatttttttctatttctaaaatatttttcttacttattat

SEQ ID NO: 25906 - DNA, 520 bp, Glycine max
  Clone ID: PAT_MRT3847_123395C.1
agggaaacttcaaaaatattttggtttgacgggggggaaattcaaatgttggtgcaaattatattttgaaaattcaccttccacttatattgattgatatcccggggaagaacaaattataattttatcaaagggtggtgcaaattttttttaaaaataaaatttttagggaaaaaatgcccttaaagggagcccattaccctcaacaattttgacgggggggatttttccaaaaatttggatagcattccctgccacccagggattatttatggctgttttgcctaacaattgtaaaaccaaacaaaaattgaaggtaatggcaaaaagcctgccctgaaatagggaaaaaggtatttatatatgcttctggctatatggcccctgaccctcatccattaaaacttttatttctcctatttatttctcccataaaaaggcatatcttgttgaaaatgtatttaagcggtttcccccgttaaaaaggaatatcttctattttcggcttttcttttttttt

SEQ ID NO: 25907 - DNA, 350 bp, Glycine max
  Clone ID: PAT_MRT3847_123396C.1
ctgtgtacacaccattacggtgggcctggcttgcacctgtgtcgctccgcctccgtctccaacctgtgtggagaagatataacacccgctttactcgacgtgaagaattcgcgatacctaaatagcctctgcggaacttcctagttgtgaccagcctggataaatcaaatactggacttgcagtgggcgatacaaacactggattcttgatcattactactgctggggcctaaccagaggttgcctactcggacctttattgacctactaaaacgtggatgatgacactgagctattcattatatgttttgcactattaacttgccaggaaaactgaaaaaggggggggg

SEQ ID NO: 25908 - DNA, 224 bp, Glycine max
  Clone ID: PAT_MRT3847_123397C.1
actatcaattaatcattcatttgaatcatgcatttgcaaacatcaaaaagttcatcggcctgttttcgataggttctagtaatataaagagactacaaggaaaatgacttttacctacagttaaaatctatcactagaagtccaaaatctgtagatagatgtataaaggactttgtcctacagacgttttttatgtcaactttgagggggtatatagtgacaac

SEQ ID NO: 25909 - DNA, 463 bp, Glycine max
  unsure (1)..(463): unsure at all n locations
  Clone ID: PAT_MRT3847_123398C.1
ggcgaatcatgggtccatgtgagataaatctgacaattgcaatttaatactggaaaccacttggccccatcacagatcatgcgatctcattgctaatctggatgttgatatatatgaagcattaaagctgcatagtttggcggtttgctgttctggtatacctaacagccaactgtagtagctgggctgggcttgccaaaaagaggggtgaaagaaccccattntaaaaataaaaaacaatttggtatttaaatttgaccaaggctcttttagttatttaaaattggtggaagaaatatatatttttacttttaaaaaggttgtccaaaggaaaaaagttacttccgacccgaaaggtaaaaaaaaaatggggattcttaaaaaggctttttgggataaaagtaaggtttggatcttcattttattttctaacttggctggggttttcttttttttttttgca

SEQ ID NO: 25910 - DNA, 301 bp, Glycine max
  unsure (1)..(301): unsure at all n locations
  Clone ID: PAT_MRT3847_123399C.1
tgttaataacaacagaatgtaacagaaaccatgactacagctactttataacctcancaacaatattattataatctagagtccgcctagacttcattatcctcacaataactacttcaatctatgagtgtctgtctggttgcactctgtgccggagtgctaagttttctaagtcagactgcctctatgcaacaacagtccctatctttaccttaaagaacttnctagtgaattggtgattaaagaagaatacgtcatcctcagctatgggcttgctcatcgggtgtggtcgaagaacatg

SEQ ID NO: 25911 - DNA, 384 bp, Glycine max
  Clone ID: PAT_MRT3847_12339C.1
tcttacgtccacgcgtacgcttctttaaaaattgtacaatccttgattctgcttcgggactactttaagagtttacgagaagtatcaaacccataaaagacttttcttcaacatcattgaccttcttttaatataattccttcaaaacgtcattgtctttcctacaataccactacatactgcccatagtccccctttataaagtaaaaaagctcattgactaataagcgctttttatcatatcaaagtttaaaaagtttatcgatgacgacgataaccttcacaagttcatcactacttacgttctcagactcttgaatatcgacattatcgctgatctcactgaacttgaactccaataacaattttctctctctctcatta

SEQ ID NO: 25912 - DNA, 751 bp, Glycine max
  unsure (1)..(751): unsure at all n locations
  Clone ID: PAT_MRT3847_1233C.1
gattcattccgcgtccgctccgagcgaagaagaagaaacaataaccattatggccacacttcaagcctcacttctctgcagaacttctctcccatttagctctcaccatcctcaactctacaaactccatcctcactctttcaacttcctatctccatgcaaaatgtttcagccgcgccttcactcttccgtctctcgcagcgtcgcttcccgctcccaatccaatccctccggcgccgattctagtgtaattgaaaacgaagcgactccgagtgtcgtcgacgctgagagttccgatccttcgatcggagaggaaaagagcgagagtgcaaaagaggaagagaggttgccgattgtggcgttgtacgagggagcgagagagagtgttgaaaaggctttcgccgatttcatgacctggttgcctctctggcagcaggagaggcgtttggctaggttaattgttgacgccgaggcgaatcccaatgatgtcgccaaacaaaccacactacttattgaacttaataaacacaggtttgaattgaattgaatcgaatcgcattgcaccgtgaaatcgagataacttatacacagttccttgaatgcttttgatgctcatcttcaatcaaatattagactcttatattccccactaatttatgcaataaaagtttgcgttaaaggttaacaaatattattaaagtaaaaaaacttcaattctgattgacaaataataacactaanaatacgtaag

SEQ ID NO: 25913 - DNA, 382 bp, Glycine max
  Clone ID: PAT_MRT3847_123400C.1
accggtgggaaaagaccaccgaagggtgcacgctgtacatgatacttaagggtacggttgcgacattaaacagaaggggactgactactgcacaatactcatcactcacagcacatagcaaagccattcttgacttatagaatggcactatcttctttcatggatatctgatgaccatccttgtctgacactgtcgggaaactagacccatcacacgcaaaacagcaaacggcgagcatgatgaagaccgactccaagcctgtgtgctcagaaagcctatggtaccgaccataccgactcaagttcttgggcacattctctgaagatcccacatcctacctaaccagagacttgccaggcgactacagctgggacactgctg

SEQ ID NO: 25914 - DNA, 143 bp, Glycine max
  unsure (1)..(143): unsure at all n locations
  Clone ID: PAT_MRT3847_123401C.1
attcctcgaccacagggngccgcaccggaaaactggaaacaaaagcaagcggnactcgaacccaagaancncnncaagncgnccaacgcgcgggagcacgaacccnnaagggaaagaaaancacncncagngcnggccacaga

SEQ ID NO: 25915 - DNA, 647 bp, Glycine max
  unsure (1)..(647): unsure at all n locations
  Clone ID: PAT_MRT3847_123402C.1
gaggtgaagaaagcgttatcactatttgatgaaatgaaaggcttaagcttgaaacctgactcgtttacgtattgtactgcgattctgtgccttgttgaccttggggaaattaaagaggcatgtgcatgtcataataggatcattgagatgtcttgcattccttcagttgcagcttatagtagcctcactaaagggctttgccaaattggagagattgacgaagccatgttgcttgttcgcgattgcttgggcaatgttagtgatggaccattggagtttaagtatagtcttaccatcattcatgcatgtaaatcaaatgttgctgagaaggtgattgatgtattaaatgagatgatagaacaaggttgctctctagataatgtcatttattgttcaatcatctctggcatgtgtaagcatggaacaattgaagaggccaggaaggttttctcaaacttgagggagcgcaacttcttgacagaatccaacacaattgtgtatgatgaattactaattgatcatatgaagaaaaagacagctgacttggtgctatcaagtttgaaggtctttggtctagaatctanattaaaaagcaaagggctgttaagctgttgccaagtttgaaaaattatttggggaaggagggg

SEQ ID NO: 25916 - DNA, 436 bp, Glycine max
  unsure (1)..(436): unsure at all n locations
  Clone ID: PAT_MRT3847_123403C.1
aaaacggccgacccacgcgtcgcggggcgtggnataacattcaaagcacgtcttggttgcagatcagacataacaaaagggtctctttccataccaattagcaacaacaccacaatacatctatctctcgtgcacatagcaaatgacaatgtcgtccggctcagaatggcgtcagcgcacagcgtcacggcctataccataatctccagcgtccaccgatataactcctgctccggcacgggcaggtcgacggacacgaggccggtgtcggcatcgtagctgaactccacttccgccgagtccaatagacacctcgccggctcccgcgagcagtaagcgccgaaccgaccgcacccgcgaaccctgagagccatggccttgccgccgacattgctgatcacgtcgcactcctcaacgggcccccagcgttaacata

SEQ ID NO: 25917 - DNA, 340 bp, Glycine max
  Clone ID: PAT_MRT3847_123404C.1
gggaaagttgatgctgtgttgtaaaattttcatgcactaatcgtagaaatgaaatggtggaggttcaattactggttcaagatcaaattatggtgaattaataatatgaatcaatgtaattggacaaaaatttcacaaatacactatttccttcattctttatttcttttgaattgttcaattttgcgattgcatgctgccatgatgtatcttctttttagcaacgaaaatctacatgaaggtagatttttttttctttttcttttttaattttaaatttagactttatatttgagtttagtatgttagctattaactagtatgaactgatggagtggtg

SEQ ID NO: 25918 - DNA, 429 bp, Glycine max
  unsure (1)..(429): unsure at all n locations
  Clone ID: PAT_MRT3847_123405C.1
ggaccggccggaancctgggcgaccgggagcgcgccacgcgccgccacgcgccgaacacagaaccaagccangcccagcnccgcaccgaagcagccacggcgaacggctagggaaccgaaaaggacgcnggcggaaagaacaagaagggcgccggaggaagtccctgcgagaacgggggaagaagccggnnnnaagggncgngaaggaaggaccccccnnccggngggaagaaggggcccccaccngaagaaaggaaggcacgcccagcgagncggcaccggagcncccggagacgaggccgnagngcccgaggaccgagcgggcgaggcgcgcgagccggcggggaacgcngcacgggacaacaagaagaacaggacgaccccgagacaggggccaccgggggggaggaacgacgagggaggggggaa

SEQ ID NO: 25919 - DNA, 215 bp, Glycine max
  Clone ID: PAT_MRT3847_123406C.1
ttcacagctatctgtttggaatcaaatggcaatggtgttctcactgttggcatttgattccaaacagtttggggtgaactctacccgattattgtgcccaaattcccattccttcaacgtatttgcactctaacaagctctcctttatccatttctctatccaactttttacaggatataatttagtgtacatatttttttgaactgcattttat

SEQ ID NO: 25920 - DNA, 651 bp, Glycine max
  Clone ID: PAT_MRT3847_123407C.1
ccacgcgtccgtcacgattcacgagctgtaagagcttctggggttggaggacatttaaagcattcactatgcagataatgaagggaactcatttgaactttttgccatagtctgcaaactctttttgatccaattttgcagataatgataatccaaggcaaaagcaagagggcatgcagctaaatttgtaccatgttaaaggtcttgactcctctcaaacttccacatcaccattttcattctctgacatgatcacaaaagatgaggaacgtgtcaggtttcttcattccagattaacaaacaaggagagtgccagcaattctgccaccactgacaaattggggggaccaagcctagtgagcacaccattgaaatcaggtttgtcaattggttcaggcaactactatgtgaaaataggagttggtacccctgccaagtatttcagcatgattgtagacacaggtagctccctctcatggctccagtgccaaccttgtgtcatatactgccacgtccaagttgaccctatattcaccccttcagtatccaagacctacaaggcctttgtcctgcgtcatcctcttcagtgttcctctcttaaaagctccacactgaatgctccaggttgcttcaaagcaactggggcttggg

SEQ ID NO: 25921 - DNA, 2218 bp, Glycine max
  Clone ID: PAT_MRT3847_123408C.1
cgattcacgagctgtaagagcttctggggttggaggacatttaaagcattcactatgcagataatgaagggaactcatttgaactttttgccatagtctgcaaactctttttgagtaattctaaatcttctcacaacatctttttctttattaatcctcctgtttttgttttttctttttttgggtaagcattaattataagtatgattagtttttgttagaaggagatttgaacctgtctttctttctccctttaccactatatcaattttatatttccttcctacttgttttttaggataaatactgaacgcattttattttttcaagatattaaatattttactttttttatttgatactttctatatacaactgcgagaagatttcagaaggggataacattactcgcgtatgttttatgcttatttttttccccctttctcttatgagtggggaaaagtgtcggtttggctacgagtagaatccaagtgtaccatatatctgcttagggaagagtacgaaattgttccaaaaccaaatgttgcagagcctgccaagtggggtgtacaagatgagcctcttttggtttctagttttctctgcacatcttgcactagcatcctctcttgttgaatttcaagataatgataatccaaggcaaaagcaagagggcatgcagctaaatttgtaccatgttaaaggtcttgactcctctcaaacttccacatcaccattttcattctctgacatgatcacaaaagatgaggaacgtgtcaggtttcttcattccagattaacaaacaaggagagtgccagcaattctgccaccactgacaaattggggggaccaagcctagtgagcacaccattgaaatcaggtttgtcaattggttcaggcaactactatgtgaaaataggagttggtacccctgccaagtatttcagcatgattgtagacacaggtagctccctctcatggctccagtgccaaccttgtgtcatatactgccacgtccaagttgaccctatattcaccccttcagtatccaagacctacaaggccttgtcctgctcatcctctcagtgttcctctctcaagagctccacactgaatgctccaggttgctcaaatgcaactggtgcttgtgtctacaaagcaagctatggtgacacttccttctcaattggctatttgagtcaagatgtgctaaccttaaccccttcagcggcaccatcatcaggttttgtatatggctgtggtcaagacaatcaaggcttgtttggaaggtcagcaggtatcataggtctagccaacgacaaactctccatgcttggtcaattgtccaacaaatatggcaatgccttctcctattgtctcccctcatctttttcagcacaaccaaactcttctgtatcaggtttcttgtccattggagcctcatcattgtcatcatcaccatacaagttcactcccttggtcaagaatccaaagattccaagcttgtactttcttggtttgacaactatcactgtggcaggaaagccactaggagtttctgcctcaagctacaatgttcctaccataattgactctggcacagtaatcacaaggcttcctgtggctatttacaatgcattgaaaaaatcttttgtgatgatcatgtccaaaaagtatgcacaggcaccaggattctccatattggatacttgcttcaaggggagtgttaaggaaatgtcaacagtgcctgagattcgaatcatatttcgtgggggtgctggcctagaacttaaggttcataactcccttgtggaaattgagaagggtactacttgtttggccattgctgctagctccaaccccatttccattattgggaattatcaacagcagacattcacagtggcttatgatgttgccaattccaagattggatttgcacctggcggctgccagtgatcacaaagctagccagccaaggattcaatttgttaaatattacttgcttgcaaaaatatatttgctttaataaagattgatgaacaactgatgtggcatgtgatgtatcttagtgagcaaataagacaaatgacaattaaatgctcacatgaaagttgcaattgtattagatttattggaaaattttactttggaagtaaatagtataaatcgcatagcggcatgtatagctgcatataaaaaacaaaaaaaggaaaa

SEQ ID NO: 25922 - DNA, 506 bp, Glycine max
  Clone ID: PAT_MRT3847_123409C.1
attctgcagtcctgtaagtcatagaatctgctggacaaaatacaatacttgtattttatgcagatagttgaaataaatgtaagtcattggaaactttaaaatctttaccataagaaaagttgattcgatgaacaattaaatgcacatgcattacaaagagaactttacagcatgcgcgttttgcggtgagcctgatgcgttgaagaaaaccctggggcatgaaaggctcacaccagtcatagttgccattctctgattcttctctgctcttgggttctgcttctgtttctgtagaggggggtttatgatgagatctaaggagtagctgtggctggggaggatttctgtacacatatttcttatccgtttgcaaccaattgttgtctaccaagtacagtataagatatatttttctcagaaattatctttttaataataataataataaaaaacacagagagataaattattggtgtactattggaggaatcaaggttatttatatt

SEQ ID NO: 25923 - DNA, 360 bp, Glycine max
  Clone ID: PAT_MRT3847_12340C.1
ctaatattaccatatattttatatttttttttttggggtctttttgtgtttatatccgtaaataaacttcttaacccagtgataacaggataatacttacagtctacattaatattagccgaacgcaaaagacaataatctgaagataaaaaacggggcgaaacaagcagaccaaggggggacaacaaggggggaaaagaaaaaaaaaaaaacccgggggcccccaaaaaaaaaaaaaacgggggggagacagagaagtcctcccacaaaaaaaagagggggggggggcaagccttccaaaaaaaaaaaaaacccgcgacgggggaaaaaccacggggaaaaaggatcaagggggagagg

SEQ ID NO: 25924 - DNA, 313 bp, Glycine max
  Clone ID: PAT_MRT3847_123410C.1
gagaggtgccctagttctctaggccaataaatttgacagaaggacaggctccaatgcttctgccaatgctgcgatcattgatgatgacctcgacaggagctatgctaacactgagatgattgacgagaacatggtaacgactactgcagccaacgaatcgagagcatacaccatggaatctagtactggagcgtactctgagagatcctatgcctggcaagatcttgccagacagaagacagagaacttcattagtgacgatgagcagctcgaatgcgaaagagaggacttatacaagtgcgattctaatgtt

SEQ ID NO: 25925 - DNA, 382 bp, Glycine max
  Clone ID: PAT_MRT3847_123411C.1
ttcgggctggtgaaataattgatgattatgttatgcgattcttagtccagcattgaacaaactttattgtgaactggttgtgatttagtccgcattgttggctaccttaaatagggttcaactcaactgggttagacaagctaataaagtggagaagactaaccagaggaccaaaatgcaagttttttttcgacaagttgctcaatattcatctttaggtggaatatcgttttcaacaactatgttttggaggactgaaaagctcgtgtgtggactctggcatctcaaatagacccttggtttatgattatattttatatgttattaatttattttaatgttttattatttaaactatattatatattttaaatattatttg

SEQ ID NO: 25926 - DNA, 376 bp, Glycine max
  Clone ID: PAT_MRT3847_123412C.1
cggacgcgtaggcacgcacttgagttctaagaagaaggaactggcttcgtgaatggtctccctcgcagctgtacaccaccgtagacgcttcctagtgccgtcatggttgcatccattaaccgtgctcaaatccaaggctggctcgcccacgtggatgacctacaatgacatgaccttcatcgctcgacgccgtcgtagagagcaaagcatgcatgtgtgtgaaccaaaccacacgaagaagatcaagactcatgactacttgccggaccgacctgatgcgcaagcggcgcaggaagtcgactacctagcttggattggttgaatacctcgcttgcaattccattcaaaacactgttatgccgaccatgagcacaac

SEQ ID NO: 25927 - DNA, 121 bp, Glycine max
  Clone ID: PAT_MRT3847_123413C.1
aacactcgtgcgactacgagaacacgacataacgttataaaacttttatctcccaaatattccactgaggacccctagaacaaagcagctgtcaccaactattaacacgaacttctatact

SEQ ID NO: 25928 - DNA, 357 bp, Glycine max
  unsure (1)..(357): unsure at all n locations
  Clone ID: PAT_MRT3847_123414C.1
gatggctcgcagcacttaatagcggtaggtgaaatacagttccagcgcactgaacgtctggtcatcgccaaacacctgtttggcggcggccagtggcttgacccagttgtacgacagcgacgtatagaacgacggtgtgggtgtccagtcgaggaaaaccacactttcgtcggcaaagcgccgatcgctgaccggtgcgcccaggtagtttttctcgtccaaccagaactggtagtgaatcgcgccgagggtcagggtttcgttgaggtgggtcttgagggagaactgctggacattttcgttgctgttgaacagcaggtagttgccgaccacgtncccgaccagccacgtgctcca

SEQ ID NO: 25929 - DNA, 217 bp, Glycine max
  unsure (1)..(217): unsure at all n locations
  Clone ID: PAT_MRT3847_123415C.1
tgaanccaatgnaacctcagcaccatcctggcnttggatgctattaccacatgaagacacncaataagtctatgnanctngnatgctagtgtcattatgtcccttttntattattgtaattgtgatttaatttcgtattcctcaatatctaattggggcaattagaaagttaaagggaggnncaaacttcccttnttgcataaaatnanaacgaaga

SEQ ID NO: 25930 - DNA, 132 bp, Glycine max
  Clone ID: PAT_MRT3847_123416C.1
cttggggccgagcctcgtcctagctatctttttctctgtctgcttcacacatatttagactgagagaaagagaatcacctactatactcctagacaaccagcacgacactgtgttctgtctgctcgtgtgtc

SEQ ID NO: 25931 - DNA, 321 bp, Glycine max
  Clone ID: PAT_MRT3847_123417C.1
ggaattcggcacgaggttagcagtgggagcttagatttgaataatttccattgcttaagggagggaatgcttgtgctttgcagattcttgaggttgcccagacatctttagcgttggggttggacgctgatacagctctctgagacgatagatgatcacaaggcccctatgggaagaatcatggaaaaaccaagccaagatctttttcagcagcagcaacaagccctaaagtgccctcgctgcgactcttcaaacaccaagttctgctactataacaactatagtttgtcacaccctaggcatttttgcaaagcttgcaag

SEQ ID NO: 25932 - DNA, 168 bp, Glycine max
  Clone ID: PAT_MRT3847_123418C.1
gttcttagtgtgacacagaatcatacccaagcttacgaatacgcggagtactgtgaatgagcgggggactctcccctcttgctgttgaacggcgagggaacgcaacaaaggaaataaagcgtgaccttcttggcggggatgctcctgctatatgaaaatatccacacc

SEQ ID NO: 25933 - DNA, 357 bp, Glycine max
  Clone ID: PAT_MRT3847_123419C.1
ttcggttgattaaaattttcggcctctctttaaacatatgaaggacaagatctgcacctcggaatatgtttgactggtttacaataggctatgggcacctaggcacatacagagtgttacgtttgcggggagagacaacgaatatttggtctctctttattcttcatatgtggttgctattgggaaaacttatggttcggtgtttgtaaagttttcttgacaggttaatatatcctggagggatggagttatagcactagttggacagaaattgaatgtttgacatcaacgatgtggagttcatgtgcaccgggtgggattgtttgaagaccgaactggttcacagcgggtaagtga

SEQ ID NO: 25934 - DNA, 433 bp, Glycine max
  unsure (1)..(433): unsure at all n locations
  Clone ID: PAT_MRT3847_12341C.1
cataggcacttgttggtaacatgaaaccnnnaaatgagagttacaatnnnttttttgagtgtgtgtgtgttttatgtgtgaaattgtttttgttgctctgcaatgggttttgtatgtgaaagattcaatttcattattttgctttttaagatatgaatcaaaaagaagagaaaaaaaggagacaaaaattcaataattggattgattaattgtttgggaacaatttaagttacactttaaggtcatttaatcatttgaggtgggcanagagagaaaaaaagagagagagatagagagagagggaataaatttataaattgtcaatgctctttgcaaaagcaccagaaatggacggaatgtttatgtatggatattttggtgtttttcgttggatattatgttggttaaattaattataatatttgatcatcat

SEQ ID NO: 25935 - DNA, 247 bp, Glycine max
  Clone ID: PAT_MRT3847_123420C.1
gatattagcaacaattccctcagtggtaaaatccctcctagtttagcaagatcttctaggatattcaggatcaatttgagcttcaactcactttccggatccattcctagtagtctcactatgtcccttctctaaccattcttgcacttcaacacaacaatctctctggttttatcccagattcttggggtggaactggaaagaagaaagcttcccagcttcaagttttgacgcttgatcacaatct

SEQ ID NO: 25936 - DNA, 232 bp, Glycine max
  Clone ID: PAT_MRT3847_123421C.1
ggctgccgacctaatattctactgtctgagagcggggaccggcacggccaacaccaccactggtggtgggaggatggccgcgatgagaccgcagctgacgatcacacgcatacgcccggttgttatggccggagcgacgggaatgtacgggttgatcaagaacgagctgatggagacggtgattaaccgttagggcaaagagtataacctatccgaaggctacgatgacctc

SEQ ID NO: 25937 - DNA, 375 bp, Glycine max
  Clone ID: PAT_MRT3847_123422C.1
agattatccacgcgttcggtttagttttatcttccggttgcttaatctttagacatgagtatcaagcagcaatctttatggatggtgactaggatgtaaattgttgacgaatttgcctctaaggattgctaggtgtgttcgtatagatgtataaaaaaaatgtttaaatgttgatatttgcatttctgacaagtggctagagtgtaaaagccatataattagttcaaattgatactttgacaattattgtttgcgattaaaacagttgcattcttcataactattcatcctgattgggacttttccttactcattactcaagactatcaaaattgattatgtattaacttcagataaatatacatatttctttaa

SEQ ID NO: 25938 - DNA, 122 bp, Glycine max
  Clone ID: PAT_MRT3847_123423C.1
gtgacacgtgggcttacttgccatgtaactggcgagaggtggtactgatgcctcaacgcagtgacggaggtgaatcagatcattggttgccttgacaatgactcacctggcctgtgtcaacc

SEQ ID NO: 25939 - DNA, 1837 bp, Glycine max
  Clone ID: PAT_MRT3847_123424C.1
gccacagggagcatggtttcaagatggtgggtttgagactgctggagaaggagttgttatagggttcgttgacaccggcatagatccaacacatcctagttttgatgataacaaatatgaaaagccgtatcccgttcctgctcatttttctggcatctgtgaggttactcgcgactttccatctggttcttgcaataggaagcttgttggggcccgtcattttgcagcttctgccataaccagaggaatatttaattcgactcaggactatgcttctccctttgatggtgatggccatggaacgcacacagcatctgttgcagcaggaaaccatgggattccagtgattgttgctggacatcactttgggaatgctagcgggatggctcctcgttcacacattgctgtttacaaggcactatacaaaagctttggaggatttgctgcagatgttgttgcagctattgaccaggcagctcaggatggggttgacataataagcttgtctattactcccaatagacgtcctcctggtgttgcaaccttcttcaacccaatagacatggctttgctgtcagctgtgaagcaaggtatttttgtagttcaagcagcaggaaatactggaccatcaccaacaagcatgttctccttcagtccatggatctatactgttggtgctgcctctcatgaccgggtttatagcaactccatatttcttggaaataatgtgaccatacctggagttggtcttgcacctggcacagatgaaagcaaactttataaactgattcatgcacatcatgctttgagcaatgacaccacagttgctgatgatatgtatgttggtgagtgccaagatgcatataagttcaataagagtttgatcaagggaaacctcttgatgtgcagctattcaattcgatttgtgctgggactctccaccatcaaacaggcctcagaaacagccaaaaacctgagtgcagctggtgttgtcttctatatggatccctttgtgattggttttcagcttaaccccgttccaatgaaaatgcctggcataataattgctttcacaaatgattccaaggttttaatgcactcgagccgattcggctcgagaatagatgcagtttcaaagaaaattgttaaatttggggctgttgccactatctgcggtggactgaaaccaaactacagcaatgttgccccaaaggttatgtattactctgccagaggaccagatccagaggacagtcttcctcacgaagctgacattttgaaacctaacctgttagctccgggaaattttatatgggctgcttggagttctgttggcactgattcagttgaattcctaggtgagaattttgcattgatgtctggcacaagcatggctgcaccacatgttgctggtcttgctgcactaattaggcaaaagttccccaatttcagtcctgcagctattggatctgctctttctactacagcctctctgtatgacaagagtggtgggccaataatggctcagcgatcatatgcctctccagatcaaaaccagcctccggcaactccttttgacatgggaagtggttttgtgaatgcaagtggagcactgaatccgggtttggtttttgattctggttatgatgattacatgtcatttctatgtggaatcaacggttcagctcccgtggtgctaaactacacgggccaaaattgcgcgctctataactagactgtctatggtcctgatctgaacctgccctcaatcactatatcaaagctgaaccgatccagaatagtgcagaggacaatgcaaaacattgctcaggatgaa

SEQ ID NO: 25940 - DNA, 311 bp, Glycine max
  Clone ID: PAT_MRT3847_123425C.1
attttaattgcgaccccacaaccatagcccctcaaaggctgatatagagccagtggagccggctggtacagggccgcccgcgaatgcattagatagcatgtcttccccagaccaagggataagaagattatgctacggcactcttgataaattaaaagaatgccacggagtgccaaaagaagaaggatgtactgggacctcggctactaataaaccctgcccaaaaaagcctagaagagccatggcaaagaatcccgccagaaattgctttatttgccggagaggcatccggcgaatagccagatccggca

SEQ ID NO: 25941 - DNA, 395 bp, Glycine max
  Clone ID: PAT_MRT3847_123426C.1
gaatatcactattctctaattttttatttgttccttgttctttcttttggccttcaacaaggaacctccgaaaaaaagaggaagacaaaaaacggtttggttccccaccctcgcgcgagtggcgacaatgttgtacacggaaaaaacacgggaataaaaccccggggggggctcagtaacccggtgaaaaaaccccgctccaaaaaaaggggggggatttgctaaatagggcaggcacaataatcaattctttgaaaaaatatgccccccaacaaaaaaaaagggtgcacataaaacacggagaccttaaacccatcccccttgaaaaaaaaaagtgccccaaacaaatgctgcttcaaaaaattaggtctaagggaaaaaacctttttggggaa

SEQ ID NO: 25942 - DNA, 479 bp, Glycine max
  Clone ID: PAT_MRT3847_123427C.1
cctcagcataagcaacttaggtcattgtcccagctaattattctctcttagcacacattagtaccacagaaataccagaattggttttttgccaaggggttgggaggagacaaactggaactctcacaagcatgacctaagatgactatttaggtaccgaatgagtactcccattttttcaactacatacatcttgggggactgccttccaccttattagatcccacttctttccaataagctgatagcgctggtgcatgtgactacaacaaagacttgctaattgttctcataatgataccatgtgcatgtgggctagtatcagggaacaatctatgcatagctgcctcaccgtgaggctttgcttatctcaccgcttttttcacttgagctgacaccttatgccaaactgtcgcccttggttttggtgatggggataaagccctttcatattgaaccatcgggctatttattattgg

SEQ ID NO: 25943 - DNA, 242 bp, Glycine max
  unsure (1)..(242): unsure at all n locations
  Clone ID: PAT_MRT3847_123428C.1
ggcnggnncaacngaggnganggcnnngaannngccnncncccgcccaagngaagcccnnagggnncncnncaaanaaccccacaaaacnnccagggagcnnnncnnngaagagaaaaganagngacacaacagnagagagacgagggganngcncngccgcngcncaancaccaccaccagcanggccaggaacagcnanncccgagccccccgannncaagacangggangggcaaaaac

SEQ ID NO: 25944 - DNA, 464 bp, Glycine max
  unsure (1)..(464): unsure at all n locations
  Clone ID: PAT_MRT3847_123429C.1
ctnnnnnnnnnnnnnnnttttggggtttgataaatattttatttcactttgtatgagggctcaaagtttaacctcaggcaacagatctctaactactgataccctttaattactttttggtacttttatttattgacccaagtactaactaattattaaagccaatcccgtaattatcccacttcccacaagtatttacatatacactcgcacatactcactcataaggactgagaaactaattcacactcacataagctagcactattgtagtattatctaataccactagagtttcaatttcgctacatgaattaatgcacacatagtttataacaatttaatagggtcgctctccgacataattgcccacgggatcataattacaagtcatgaacacatcttcatcgtcacatgcaacccgagcacatccaattcttcaggtgctcttccacactatctga

SEQ ID NO: 25945 - DNA, 424 bp, Glycine max
  Clone ID: PAT_MRT3847_12342C.1
gactatttattgcgtaactactcactgtatctatggaacaacagttcatgaattgattataggcctgtgaggctgcaagaccactgctggactcgaccctgacgattgggtggagcatctcatgtactactggatccatgcaccatcaatgtcatggtctgtgcctggcactctcatcatagagccaactgtgactgatagcaatgctgaactcgacaggtactgagatgcttttatatgcattagactagaaattgctgtgattgagagacgtaatgctgacatcaacagcactgtgcttaacagcgccccttatacaccatcactgttcatggctgatgcgtggacaaaaccatactccagggaatgtgcagactttccagctacttggctccgtgcttcaaagttctggcctaccacaggt

SEQ ID NO: 25946 - DNA, 378 bp, Glycine max
  Clone ID: PAT_MRT3847_123430C.1
aaagaaaactactaagtgaataaaaatggccggatttatgaaaaatccagattcattgactgcctgcggtctaaagcgtatgaacagacaggtggcgacccaattgtcctgggctgacgtctggaggcatagaacaaccaattttttggcgaagagcatgggactgctctttctagggattattgggaattgtgaaggagcatatcacggtagggtcgtttatagctcatggcacctggaagaactctacacttttggccggctcaggaagaataaccttcaacatagggaatcgttacttccatttgagacgaatgaaacgaaggagcactacccaaatatggtcggggtttaaaactcggtgggcaagaatgccca

SEQ ID NO: 25947 - DNA, 452 bp, Glycine max
  Clone ID: PAT_MRT3847_123431C.1
ccgggggggcccaaattttttttttcaatccttttattcaaaacctacaaaaaaggcccttttttaatttttgccccttcaaggacaaaaaaaagggccctaagggggcacccccttttttaggcctccctcccttttttttgaaaaaaaaaaaccccctttgaattcaagttcatgtttttccaaaacaagcctggttgaaagacccaagctttagggggggggggggggcccccttttaatagcggggggaggaaccttacccccctgacaacacttggaattaaacaaagggacccccctcacccccccccaaaaaggatttgggccttttttgggtggtagggccccccaagggtgaaattcccctgggtgaggagcaggaaaaaccccttggggggcataaaattcttggaaaggagggaaaagcctttttttaaaaaccttttttt

SEQ ID NO: 25948 - DNA, 226 bp, Glycine max
  unsure (1)..(226): unsure at all n locations
  Clone ID: PAT_MRT3847_123432C.1
gtcatcacggncactncatgananatctgctgcaagatcatgacggggaactgcgacgatcctgncagcaccacaagtggtcaacattcgcaaaggaggcaggccaagaattcaactggcggagnngcggcgaaagtcgcagganngtgaccaagggatcaagggtggctttgtcggaatgagatcgggcagggccagtacacatggatgcatgcaccacgcnaaa

SEQ ID NO: 25949 - DNA, 296 bp, Glycine max
  Clone ID: PAT_MRT3847_123433C.1
acgaggaagcaaccctggactgacttgataaacatctataataataataataaaaagcatagcattatgtaatttttttgaatataagaaatgaagaatatggcttgatgagaagcaaaaggtggttggttgtaaagtgtccattgtcattgtcttttccttttatgaaaagaaaagcaaaatctataggcatgaaaaatttgttgtatatataaatagttactgatgaatcttctagttttgcagagcctgaagaaattagatattagacgtgcaattcacaccaagtatcgcat

SEQ ID NO: 25950 - DNA, 184 bp, Glycine max
  Clone ID: PAT_MRT3847_123434C.1
tatgatctttcataatattcgttggatcttctgcatattcatattcaatatgagtacctgaggaggggacaccgctatgtgtgccatatcgttgcttattggaatattatcttccactggcgtagaatatacagcggcacaatctgatggtgtgagttagggatgaaatggcatcactctacct

SEQ ID NO: 25951 - DNA, 1213 bp, Glycine max
  Clone ID: PAT_MRT3847_123435C.1
tactattgaacaacctttcaacaatacaacaagttctgatctcaatgttgtctcagtttctcaagcagcacagccttctgatgcttctttgcagcctcgagccgctttcctttcttctgctagtgtttcaaacgggaaaaatgagggtttggattttggaatctcacatgaggatgagatggaggaagaagctcctgagacaagtaacaacacaactgaacttagtttgggaagctttggcgggtttgggattagctcaagccccaacccatcaatgcctaagacaaatccttttgggggttcatttaataatgtaggaacaagtttatcatgctctacagttacattctctgttcctagtggagagttgtttaaaccagcatcttttaatttctcaagcccccagtcatcttcaccaacccagacaacaaattcaggtgcattctctggtggcttcaatgctgtggcagctgttcccgcacaagctccaggtgggtttgggcagccagcacaaattggatcagggcaacaggttcttgggtcagttctcggtggttttggacaatcaagacagcttggtagtggttttgctgctcccagtggtttcggtggtggatttgctggcagtagttctcctagtggcttttcaaatactgcaattggtggagggtttgctggcattgcgtctacaggtcgaggctttggtagtgttgcatccaccggtagtggtggattttctggaattgcttctgggggtggatttggtggtggtgcagcccctggcggtggttttggtggggcggctgcccctggcagtggttttggtgctgctgccgcccctggtggtggttttggtgctgctgccacccctggtggtggttttgctggtgctgctgcccctggtgttggttttggtgctgcttcttctactggtggatttgcaggagctggttcaggtggtggttttggagcatttagcagccaaggaagtggtggttttggtgcttttggttcaggtggaggcagtaaaccacctgagctgttcacacagatgagaaagtagtacagttaaaatgattggaaagctcaagttgagtttatattgtgaaactccacaaagaaattacgcacgtactacgactactatatcttgaacaattgtgttctagctttttgccgagaaatgaatgaaatttatagtcatggttatgtt

SEQ ID NO: 25952 - DNA, 1726 bp, Glycine max
  Clone ID: PAT_MRT3847_123436C.1
acggctgcgagaagacgacagaaggggattatcaatggatgctagaattgaaaatgtccatgctggaagctcagcagatggtatgacaaggggtcttggttctgagaaaaaacgacatagtgtgtctggttttactcctcaacatgctaattcacaagccactgaaaagattaggatgagcgagaggcagattttgggtataaaccgtacaaaaattgaagagatatggttagaggtgcttgagaggatacaaattactggtctgaaagagtttttgtttaaagaaggcaagctgatctctgttagttttggggcagctccaactgtgcagctaatgttcagttctcaattgaccaaatctactgccgagaagttcagaggtcacatcttacaagcatttgaatctgtccttggatcttctataacaatagaaattagatgtgagttaaataaagatgcagcctcggctgttcaacaacctcttacattgccctctaccaatgatagttcgtcccagattagagactttaatggtgttggcactctagctcatccatcagtaactgattctgttgaaaagagaaggggtgaaattgtagaagaagcagcttctcaagtggagcacatgaatagcgagcagcaggttgatgctcatggaacatcttataaaagtttagaaggtacaagtataggacaatcatcagcttcccaaaaaatgccaattgttaagtcgcatttagacgaaagaaagcttatggagcaaggtcaaagtcggagtcttgtaagaagcaaagtatctcttgctcatgtgatccaacaggcagaaggtcagagaagtgggtggtcaaaacgtaaagcggtttctattgctgagaagcttgaacaagagaatctgagactggaaccaagatcaaggagcttgatatgctggaaagcatcaagagtaacccggcgaaagctgtcacgcttgaaaattcgaagccgaaagccacgtgcactgctgaatcttgtctcatgtgggaaatgtctgtctacaaaatctccaaggtagttttgggtatgtcgtgggttcattcaatagcaatttgtaatgcctctatttaggctttttcctgacgtgttatagggtccgattttacagggtcaagccttttttttttttcagttaattaaataaaagcatgtagttatatatcagatgaagaaaatgtaggaaagtaattaaactagtaaggtccgttttagtgggaagatattatgtatgttggtttcgtagcatgagaagcttgaacaagtgaatctgacactggagccaagatctaggagcttgctatgctggaaagcatcaagagtaacccggcgaaagctgtcacgcttgaaaattcgaagccgaaaaccacgtgcactgctgaatcttgtctcatgtggaaaatgtctgtctacaaaatctccaaggtagttttgggaatgtcgtgagttcattcaatagccagttgtaatgcctctatttaggctttttcctgacgtgttatagggtccaattttacagggtcaagccttttttttttcttctttccatttaattaaataaaatcatgtagctatattatatcagatgaagaaaatgtaggaaagtaattaaactagtaaattccattttagtgataagatattgtatatttttccttcgtagcataaatttgatggaaattttatttgagattca

SEQ ID NO: 25953 - DNA, 292 bp, Glycine max
  Clone ID: PAT_MRT3847_123437C.1
aggtcaagcatatcaagttataagtgatcctgagaagaaagaactgtatgaccagcatggtgaagatgtccttaaataagggatgtggggaggaggctcgcttcatactccatttgatatatttgaatcattttttggaggagcaagctcttgctgtaggcggtatttcctcgacgtagaacacagaaccatggtgaacacgtggcgcactctttacatgttctccttgctggacgctcataacggcacaactactaaactgtctctctttaccaccatactatgccccaac

SEQ ID NO: 25954 - DNA, 402 bp, Glycine max
  Clone ID: PAT_MRT3847_123438C.1
gaaggtttcccgtcatcactgtatgacgtcctccttctttgggggggggggggggggggggggggggggggggggggggggcccccgacaagaaggggcttccctataggcctaaggagaaaacggtggttataataagcggccaatcccccgaattaagaaagagggcacatagtgatggtgaggctcaaaagactcatgataaagtacggataaagcataataagtaaagggccaatagatagggaaatggtaacaaatatgcgagagaggtgttgtgcgtaaagagcgaaatcccgcgatagtgacgtgtaacctagcgaaacggagggtggcgttaaatgcgagcgttaagcgatagtgggtactcggagaatgtttaccgtttaatgattcaaagtt

SEQ ID NO: 25955 - DNA, 372 bp, Glycine max
  unsure (1)..(372): unsure at all n locations
  Clone ID: PAT_MRT3847_123439C.1
gcctcgatgccgacagcctctccaccaccggcgacctcgtcacgcttgacaacgcgtgcggcatgggcattctgaccgttaacctgtacgacgcgctgccgagccacgccaaagaccgcatccagcacacgtgcggtgacatctcgccgagcatgatcgacgcggtgcgaagccgcatcgacgagaacgggtggaagggcgcgagcgcgaaagtcatcgatgcgcagaacatggacgtcccctccaacaccttcacgcacgtnctcaccaacttcggcttcgtcggcatcgcggatccacggcgcgtcctgagcgaatggcgccgcgtgctccgccccgccggtgtctgcggcttcaccatctgggagtcgg

SEQ ID NO: 25956 - DNA, 264 bp, Glycine max
  Clone ID: PAT_MRT3847_12343C.1
ctttaattggttctctcttcagtgtacttgtggtaagcaaacacctaagtatacttacaattactctcacatacacatagaggaacacacatattttcttgtcaacatctttgatgctaaattacaaaagcttcattttcatgaaggaaattaagaactcatgattttgtcttgatttttttaatgaaaagacctaattcttgattgtatgtaacttaaaggttatgttgtaaggcattgagtttaatgcattgttaattaaga

SEQ ID NO: 25957 - DNA, 272 bp, Glycine max
  Clone ID: PAT_MRT3847_123440C.1
agtcctcagttgctagaagcagcagagcagaccctgattgtcttaatcaatcaatacgtcaccaaatttcactttgtagtgtagaaaataaattgaatgaatgctcctttgcttcctctacacccatccttttctttaggctgttcctcattgatcgtatttacaccaaactgacctaccaagcaaagttaacaaaacatgcttcttctgtttaattggaattgtggtgcgtggcatgaatgctatcttgcttgcatgccaaccttcttctg

SEQ ID NO: 25958 - DNA, 272 bp, Glycine max
  unsure (1)..(272): unsure at all n locations
  Clone ID: PAT_MRT3847_123441C.1
ggaatctatagtaccatgtaaagaaattatgtggacttgttaaagcncaactnccntaagtngaaaataaacatctcaaatttcaaagatccattttccccatgcttttgttatgctttgaaatttgagatgtttattttccacttaagcaggtgtgctgtatacttcaatttttgtggttatgcttttgctgataaccaaatgangngtnttcanccatcatttaaccangcagggnccgctacccnattgcaactaaatcagacaagatt

SEQ ID NO: 25959 - DNA, 422 bp, Glycine max
  Clone ID: PAT_MRT3847_123442C.1
gcgaggggaccttacagcttagaacattccagtgccccttataccattggatgtgccagacaagtacatccagtaaaccagggggatcttatccaacatgacttcatgggatcattacattttgtgctggactttggtggtcctggcatttggcttacaggtgctttgaagtgcaagcttacaggttagcccttattattgcgaccaagaggaacatgcatataaaacattaggagtgctcagccagagtagggacataagactgaactattctgctggctcgccccctggaatagcgcacacttgttcatagtcaggaatatatcggtttgtccaggtgaggtatcacatcataggacttttttcttgatccataacccatatgggtagagatgaaatgttgaactgatgccatgatgggg

SEQ ID NO: 25960 - DNA, 1695 bp, Glycine max
  Clone ID: PAT_MRT3847_123443C.1
aaaaatggtgtctataaatttgttccggacatttatttctcctccgcgagagaataaagttctagaagcatttgacgtggatgaggaagagccttccatggatcctgcctggccttacttgcaaattgtgtatgaactgcttctaaggttcgtcatgtcaaccgagactgatgcgaagttggcaaaaaggtatattgatcattcatttgttctgagactgttagacctttttgattcagaggatcccagggagcgggattacttgaagacagttcttcatcgtgtttatgggaaatttatggtgcaccgaccattcatcagaaaagcaatcaacaatatattctaccgcttcatttttgaaactgagaaacacaatgggattgcagaactcttggaaattttgggaagtataattaatggatttgctttgccactgaaagaagagcacaagctatttcttgtgcgagctcttattcctcttcataaaccaaaatgcataccaatgtaccatcagcagttatcttactgcatcacacagtttgtggaaaaagattgcaagcttgcagatactgttatacggggactattaaaatactggcccattacaaatagttctaaggagattatgttcataggggagctagatgaagtcttggaagcaactcaacctgcagagttccaaagatgcatggtacccttgttccgccaaaattgacgtggctcccccagttcacatttccaggtagctgagagggctttgttcttatggaataatgatcacattgagaacttaatcaagcagaactacaaaattatacttcccattgtcttacctgctctggagaataacgcccgaaaccactggaaccaggctgtccagagcttgacaataaatgtccgcaagatattcgcggacactgaccctgaattctatgaagagtacatgatcaaagttcgggaaaatgaagcgcaagagaaggatatgaagtcaaagcgtgaggccagatggaagcgtttggaagatatgggaggcatgaaagctacaaccaacgaagcagttctagtttctcccagaactgcttctcataccccttctggcaaggcaagtagagctcagttggagtgataattgatttttggcattgcagagttgaaaagccataacttatgctgcattgcattatgctgcataagaatacaagggatggtgataatgtgttgctttttgttggttccattggccacatgataaaatttcaaggccaaaaaatgtggggtacaaaatagccccaatttggttttacaagcatggaatggatgtatatattgattgcatggacaagaatggttgcctcaagccacagtttatttgggaattttccttctaaaggtgacctttgcagtttgttgttgtgaaaaaatctcaatggcctgagttcaacggtttatctgctttcatactttaactttgatggaagcatgcttcatttttttgttgccaatgtttagtgttaatcttggttcctttgtgtaggtgagttggttgtttaaggaaattgggcaattagagcttatcttatatgaattgcggtggacactgtattttatatatgatatgatgaaagcaaattattttagtgaatgtattatcactgaattttaaaagtatggctatcaatgaatctttttttttcc

SEQ ID NO: 25961 - DNA, 376 bp, Glycine max
  Clone ID: PAT_MRT3847_123444C.1
ggaggggattccaccaatgcgaagcggggtttttaacccacccgggaaaatccaatgcaggctaatttccaaaacctccatttttaacgacgttgggcttttccgtttggccttcccctccgacgccctattaaggggttggccggtggggaggcacatattcttatgggccaccgttgccgggaaactatgcttgcgggcttccactccaccaggcagggtttacgaagtgggttccttggccctggtcgttaaggtttacttaaagggggggccccctaagttccccaccggggggatcatgtttaaccacttggactttttccccattggtttctgccttggacgtgaaaggcccacttggccccattgaatc

SEQ ID NO: 25962 - DNA, 475 bp, Glycine max
  unsure (1)..(475): unsure at all n locations
  Clone ID: PAT_MRT3847_123445C.1
cgctctccggcaaggaaacacacgccctccgactcataagcttcgtcttcacctcaaccaacctcaccggtgtcctgtccccttccattggaagcctcaaggagctcaaagaaccctctctctccgccacaaaccactttgggccgaacccctccccaaatctttgactgcaagaaagctcacaatactcgccctcgccaaccaccttctttcttccggcccaatcccccccaagttcttccttcacacaaacgcctccgcgtagctggcacattcttcaccacaggctcttccgcaanctcaatttcctcaaatcctttcccaatttggaaactctttccgtcgccgacaacctcttccccggaagaagtccctccctccgtccgctgcttccgtaaccctccacaattcaacttctccggtaaccgcttcctcgagccctctctacaatcatcctcaccaaaaccaattctct

SEQ ID NO: 25963 - DNA, 130 bp, Glycine max
  Clone ID: PAT_MRT3847_123446C.1
atgatttcatatggtgtttccgaacattatcttctcccaacattccagccttccatgcacctgtggtgcctctctactgtagctgctgtcatgtccttcacctactcattcattggacttggccttggta

SEQ ID NO: 25964 - DNA, 273 bp, Glycine max
  Clone ID: PAT_MRT3847_123447C.1
ccagggtacgagcatccacactgctttccacacttacgctcatttcaagactatcgcatgattatgcaaacactgggggtacgatcatcccagctaatttataatggcaacaggctactgtcagatcttctcaaaacgcggaatcctctgcgtgatctggaatgcgtgttcccttccgctggttctatcgttcaatacaagaaaggaaattaggcatgaccctctcggggagtatgctctgcctatctgaaaatttccacacctcttttaatt

SEQ ID NO: 25965 - DNA, 380 bp, Glycine max
  Clone ID: PAT_MRT3847_123448C.1
attattttcatatattttgatatttcttcttccgttagggttggtttttgcgtgcgtttttgtttatattgtattgaattgcattgtatcccttggacgctaagattggattgggattgggtgttgttgagtcaaaatctgttaacctcacccagacggtgacgcagatgcagactctgggtttgttggtcgctcctgttctcggtttctaccagaggttccttcgtttctctctccgcttccttcttctcatgttcatggatttcccttccacgttcaagttcatcacccaagccagtgaactcggttgcggcttcctcctcctcggttacttctcgcgtctcttcaacctcctcggcctcctcttgatcttcttcttc

SEQ ID NO: 25966 - DNA, 427 bp, Glycine max
  Clone ID: PAT_MRT3847_123449C.1
aacaaaataacatcttctatagtgacacctaaaattcaattaactgggcggccgttttacagggtccagatctgggaaccccctggtgcaacccaaattattttttattggggcacctacttcttttgccagggggcgtattaaccaagaggcccccggggaaagccctggccaaccccagctcagcctgattggcgaatggccccctccctgcagcggggcaataagcgaagaggccgtggcggttaccctttccaaaacctggtcacttgtgagtggcatagggccccccccttgtactggcttattttcctttgtggctgggttggtcccctcccccggtcaagctctatttgcggggctccttttacgcggcctatttagtgctttccggtactttttccccaaataacttgattttgccgat

SEQ ID NO: 25967 - DNA, 393 bp, Glycine max
  unsure (1)..(393): unsure at all n locations
  Clone ID: PAT_MRT3847_12344C.1
ccgcccttttttttttttggttttttttttttttttttcccttttttctccccctngtttttttttatgtgaacatgggacaattttttttcatgaagttttcccaatttcttatcaacattttcaagagaccctgcagcacttaaattccgagggggtgggggttttaaatgctgcaaaatcctataaacccttatttctttctcttttttttttcccacaaacaatttgggattggaattacccccccaaattttgacttccccggttttgcaaatcccatacggggattggcctattcaaaccctgggggataagcccccaagaaaagatctccaagaacccaaaggggaccttggggagctgggcccttttggggaaccaaacccccct

SEQ ID NO: 25968 - DNA, 1176 bp, Glycine max
  Clone ID: PAT_MRT3847_123450C.1
aagaggtgtagcgttcaatggagacccatcatcaccaccaccactttcagtgctgccacggttccaaatttctcagccaccctcttcctcttccaccttcttcatggcgaccccttcttctagccagacccttttccccttctctcgtctcttgctcctccaacaagcgttgggactccaacgccgaaacctttcgcccccgaaatttcacccccaacgatgtcagaaagggacaagaacaagaacaagaactaaaagaagggttcgggaagaagagaaggtggtggtctgatgaagatagagaatttgaggataaagaagaagaagtagtagaagaaacttctagtgggattttggaagatgccattgacagtgtctggtttctccagattttcaaatcctatggttggacgctgcctgtcatcctcatgtcatggttgatatctagtggcccaaaagctttcctcatggcattaattcttccccttggtcagtcagcacttgcactagcatttgagaaattatggggaccgtccgaacgcaaaccaaaacgcaagtacaggatgaggaggaaaccccgtgttagaaattacaccagagttgaggaagaaccagaagaaaaacagaaaaccaaaaaggggtaccaatcatgggtagttgaggataaaggttcagttgatacaggcagccgagaagcagcaccgagttttggtggatgggatgacttggagaggtcaagaccagcgacaaagtcttcccgtggcatggatggatcacgaaggacgccgatggaaggtggtaggttgagtaggagacaaagaaaaagtgacacaccactgctgttgcgagtgctttttgctattttcccatttttgggcacatggacaaagatgctgtaatagtctttaccaaataacttgagcttggatgagttggaagtgattctttacatcttcctctgatgaaaagaaaccaagcagttattttatgttgtttgtcaacatacatgagtagtattgataaaattagatgatgaattaagttcatcaacatcagcaaatttgcattcttttatctgtctcatttttggcacaagggaattttgcagacccccattttggctgttggatttgctgtgattgaattttcaccaaataatactttttagatctcact

SEQ ID NO: 25969 - DNA, 327 bp, Glycine max
  Clone ID: PAT_MRT3847_123451C.1
attatcattgtttcagggcttggaaacccccaaaaaaatgtgtgttaaaacagggtaaagaatttttcatgattaaataaatttttgggcccctccaaggggcaaataaaattaggtcttggttttttttggagggcgaaacattattttttgggttccaagtttcaacaggggccccccctttttaaaattctaaaacggcaaattaaaacccattgatatccgccgttgtgcccttgaagattcacaagaagttggaaagagggtggttttttttgaaaaatgaggggtttccctcccaaaaaaatttccacccccacaattttt

SEQ ID NO: 25970 - DNA, 247 bp, Glycine max
  Clone ID: PAT_MRT3847_123452C.1
ccggggaacctaaaacggggtttacagaaaaattaccggattttaaacctggataccagccaggtttttggtcaaactttaaagacccttcttacacttgaaatttggaacctttaaagaaaaaatggtaaccgagggttaaccctggtgctttccaaaccttgctgttgggcttacttttattggagttggcaccaccaacggagcttctggagaggcacttacagcaaatttggcgggcataaat

SEQ ID NO: 25971 - DNA, 137 bp, Glycine max
  Clone ID: PAT_MRT3847_123453C.1
ggagatgagtcctaactgaatctaagccatatatgcatgatatgagctgacaagtagactagaaaagctgttgacccatatgcccaagatacaatcatgggcggactaataaaaagagcataacaaaaatgcgggaa

SEQ ID NO: 25972 - DNA, 514 bp, Glycine max
  Clone ID: PAT_MRT3847_123454C.1
aaaaaaccaaaaacggggccggttttaacaattttaaaaaacagcccccttaaaaaaaacctttttctggggtttggcaaaaggggtaaaaaaaaacaagggccccccccaaaaggaaaaaaaaaaaaggggggaaaaaaaaccctggtttaccctcccttaaaccaaaacgggggggggcccccccaaaaaaatcggccccaagggccccgggggctgggaaaaaaagggaaaaacccggggcaaaaaaccccccccccaaggggaaattttaaaaagggcccattccgggtttggggccccccctccttttaaaaggggcccttttttgggccgaaaaagggcccccaaggggtctggcaaattggggtttccgggaaaaaaataccccgggccaaatggggcccaaaaggggcccacaaaaaccaaagcccccaggggttcaaccaaagggcccggttgggggacaacccaggggtcaggggccccccgggctaaaaacgcggtttttttt

SEQ ID NO: 25973 - DNA, 431 bp, Glycine max
  Clone ID: PAT_MRT3847_123455C.1
aaatgtacgcttaagagtaacgaacacgacttttcatcctcttatctcatctatattgcgagctcaagtgagactactactcagcgatgctcaactgagagtatatcttcatccacacggtacctcatatacatatcttacattctataaagaaataatgaaacatcatgtgatcttaggagactatcaacatcgttgttagtactcaaatactagatcttgataatcgtattactctccgcttatactacataattagccataatattcttaaacatgctcatatctttcgtgcatagacaaatattgctgatctgtatatcatgctcctaaaattctccagtttggtcttctatacaataccttgtcaccgagattatatatcatattcacacttcataaaagaaacttttataaataaactgatatat

SEQ ID NO: 25974 - DNA, 1833 bp, Glycine max
  Clone ID: PAT_MRT3847_123456C.1
ctcttgttggttttttcactaccagctctgacttttaattaacatgcagatcaacgcctcaatgatgttgttggcagtgcttactatgttgcacctgaagtgctccatagatcttatagtgttgaaggagacttatggaagtattggggttatatcatacatattgttatgtggaagtagaccattttgggcacgcacggaatcaggaattttccgatctgtcttaagagcaaatcctaactttgatgattcaccttggccatcaatatcacccgaagctaaagactttgtgaagagacttctgaacaaggaccacaggaaaaggatgactgctgctcaagctttagctcacccatggttgagaaacgaaaaaaatgctattcctttagatattttgatatacaagttagtaaagtcatatgtgcgtgcctcacctttgagacgtgcagcattgaagtctctcgcaaaagcattgaatgaagacgagctaatataccttagagcgcagtttaacctcttggagcctaaagatggctgcatctcacttgagaattttagagttgctctcatgaaaaatacaactgatgccatgaaggagtcaagggtccctgaaattttaaatttgatggagccactctcctataaaaaaatggacttcgaagagttttgcgctgctgcaatcagtgtatatcagcttgaagttcatcaagaatgggatagaatcgctaccacagcttttgagtattttgaggaaacaggaaaccgggtcatttcagttgaggagttggctcaggagatgaatttggttccatcagcctactctttaatgggtgattggatcagaaaatctgatggaaaactcagcttggtcggatatacaaagtttttgcatggtgtcacaatgcgtagttcaaatacaagacaccgacagctagtataactaaaagggagattttattattattattatatttgttgaaattagtttgtgtcttttttctttctttaatttgaattgaaaggaaaaatggtacggagggtcttagcaattttttcggggggttttcgggagtggatcatggaaaaacagagctaacatattgttttgttttgttcctcatgtgatttgcggtgcaaagcaaaaatctcctattttacttgtgagccaaaatgccacttgctttcttgtaacatttcgtgtgaatattaaagacgcatctgtatgggtctaacttcatcgtattgtaacaatgccgcagtatttttaagaaggtttaggtagtgcaatgcggcggtgaacttggatcaatttcttccatgccttgtgaatattatctatttggtctaaaaaaaccgagtcatttcagttgaggagttggctcaggagatgaatttgggtccatcagcctactcttcaatgggtgattggatcagaaaatctgatggaaaactcagcttggtcggatatacaatagtttttgcatggtgtcacaatgcgtagttcaaatacaagacaccgacagctagtataacaaagggagatttttttattattattgttattattattattattattatcgttattattattattatagtaatatttgttgaaattagtttgtgtctttttttctttctttaatttgaattgaaaggaaaaatggtacggagggtcttagcaattttttcggggggttttggggagtggatcatggaaaaacagagctaacatattgttttgttttgttcctcctatgatttgcggtgcaaagcaaaaatctcctattttacttgtgagccaaattgccactgctttcttgtaacatttcg

SEQ ID NO: 25975 - DNA, 1184 bp, Glycine max
  unsure (1)..(1184): unsure at all n locations
  Clone ID: PAT_MRT3847_123457C.1
tggtcgcctgcggtaccggtccgnattcccggtcgaccccgcgtccggtgggttatccttggattgttaccattcatgatacatattctggggttcaattctccaatgatctgtatcttcacatttaaacaaagatttggtggcacatgggcattgaaaggaaacaacatcaccttattacttcattgtttcaggtgggcatccatagttctaacaactctcttgattcggagtgcaacagttccactcttaataaatcaacttaaggccacttctaagcttacagtatgttgtgcgacttgtatcttcatcactttttctttctaaactaatgtatttgcaataattttttcttgttcctttttccttcacatgacttggttggagtgtggacaaatgttaaacatttggagagggaactgtttcctctctttgaattaagatattctaaacatggggttggtggatagttcccttgttcccagctctgctctttctctctctccctgtttctccttgaaggtcctcaaccttgttgtagttattatatcaatgatgaactttttcaatattccaatctaccttgttacctaactgtttcatgtgtgttgcagataatgaggccgcacatggaaaaaataaagcaagagatagaggataaggctatggatcctgtagctgttgctgaaggtcagaaaaggatgaagaagctatttaaggagtaagtggtttttcaattggcttgtaaaggatttaaggaaatccttgacattatttttgtggccgttttaagctataaccgctgctagtcatgtttgattctcccaatctgatttaattactttgtttggtgatataatgtattagtgagcaatctttgaattgacatgtgatagccttaacagaaatcagtaaacaatcagtgcctggtgttaactaatatggaatggtattgtaagacaactcaaatgctgctgggcctgaatatggaaaggaggacagaataaatagcgtggaaataagtcaacccattgatgagttaggccaatttgagacttccccaattatattaaaggacagtggattgaaggaactaattgactgggaagagcagagtagtgaaaggttggactcggggggttcaacaaaaaataaaagcccaacaacattggaggttatgtgct

SEQ ID NO: 25976 - DNA, 409 bp, Glycine max
  Clone ID: PAT_MRT3847_123458C.1
tttggctaatttcttcagccacacacgaggttttgttacatgcatgcttgttgtgttttagaacgaaagttgtttcaatttggtcagctggaatattgtttcatttcctgcatgttgattgcttatggaagtttttctgtggtgttgtttattttcacaacgatagtgcctaaggtgaccctgctttgcccattcaagggtagcaacaataggattcatagggtggtgttgaagaataaaggtgtcatttttattttcacatatgttgccaccttgctcaattttaattgtatttattttttgtttaattaaagggatttatgaggcccttgaattgagagatggagcagtttcttgccattcacgacgtttcatgacgtttcttatctcaaccggagcagtttcctgc

SEQ ID NO: 25977 - DNA, 247 bp, Glycine max
  Clone ID: PAT_MRT3847_123459C.1
aataatgctaaaaatatctgttgctgcttttgtccttctatataattttcttaagagaaaagttaaaagacaactatacccttttgttgctgattcatctttgatataacaccgctattctatcataaaattacctccaaacttgtccaaaacaaggtcaagtcacagaaacacataaacatgaagacaccaatattttctttttctcttttcttttcctgcttataactgccttttgttttggttt

SEQ ID NO: 25978 - DNA, 236 bp, Glycine max
  Clone ID: PAT_MRT3847_12345C.1
atatccaatatatactaatatatgcgaatatatgctaatcgaatatctatctatatctatctacccatatctattttaattttgggtggttgaatttaatggtttcctaagtgaattttttggggccgcatttatgtgccgcaagcttaacgaaaaggactattttgtaaaaaactggtcaatgatggccttccatggattcacctacataagccgcagcttaagtagcaaaaatg

SEQ ID NO: 25979 - DNA, 412 bp, Glycine max
  Clone ID: PAT_MRT3847_123460C.1
cttacgcgttcgtgaaattttgataaaccgtgaacacaggttgccgtaccttaaaactggaaacaaaagcaatcgtttcttgatttcaagaatctctcaatttcttcctacttgtttcgggcacgattttattaggggaaagaaaatcactctctgtgctggccacagacttcgagaatcattttcttttacactcttggattatctgctgaacactctcctatttgatataagacttcgtgtcagacttaaacttttcctgtctctttctcagttctttgtttaattataagttcaagctggtgaaattttggattagtgctcccactctcctatctggtataggacttcatgggtagagtatactatttctctactttctgttactcttattatctgactgatccgcatt

SEQ ID NO: 25980 - DNA, 172 bp, Glycine max
  Clone ID: PAT_MRT3847_123461C.1
ctcgagccggttggcggagacagggtggagaaaaaaatattactctcggtcctcaactgagagggaggggtatattctttgccggggacagggtggggaaaatattactctcgatcagatcaagaaccagatggttgccgacgtgaaaaaaatagggcgcgtttttttgatt

SEQ ID NO: 25981 - DNA, 245 bp, Glycine max
  Clone ID: PAT_MRT3847_123462C.1
aattcggctcgaggttatactttctttgcaccacctgggacatgaagacactgcttcactacatgagagatcatgctgattcggatgggtcttctgcggccacaggtgagggggatatcacttctcgctaaactcagccagaagcgatgctcgtggctgattctcagtatcgacaaatacttggctattttctcaagaggagaatgtgatctgacaacatgcatctttcgcaatagaaggaacaa

SEQ ID NO: 25982 - DNA, 333 bp, Glycine max
  Clone ID: PAT_MRT3847_123463C.1
gtgaatcccttatcattggcttcccaacgacatttctcaaaatgggttgataaaccagaatttatttttactcttgtatataaaatcacaagggattatgttgattctatggatgaattgttgcagccattggttgatgaagcaaagttgcttggttacagttgtagagaagaatggatctcagcaatggtaacctctttaaccacatacttggcaaaagaaattttccctagttacattagtcaactagatgaagagagtgttataggaattcagtcatctgctagaatatcatggctacatctcattgatttgacgatagcttttgacaaa

SEQ ID NO: 25983 - DNA, 1366 bp, Glycine max
  unsure (1)..(1366): unsure at all n locations
  Clone ID: PAT_MRT3847_123464C.1
ctcaatttgcttaattattagaggtgtgaattgttgttcgaatttcacccgtcatggtgaaggacactgctttttatgatttcttcgaattgttatctgatttatagtttcaagttagcaactttttcgattttcgctttctggagatgtgaattgttgtttgaaattcacaagatctggtgaaggacacaacgtattatgacatattaggtgtcaattatgatgcatctgctaaagattttaagaaagcttattatgtcaagacttgaattgttcatcgcgctgaatatcttagcatttctaagaattgagaaaaactcacaggatcctgaagtttttaggcagagaaatcaaaaaatgctaaaagtttggcaataggaaaaggagcaaaagctttcaacatttctgaaatatagcctgcaaccatttattgtttgtcgagaagatgaatttacagcatgggcaaaatcagaagcacgtagtctttctaaagctgcttttggataaaccatgctacataaaattggttacaactacacaagaaaagctgcaaaagaacttggaaaggatatacggtatatgaacgttccctttttgacagagtgggtgcgaggcaaaggacactgtataaaatcacaagtaacagcagcctcaggagctgtctccctaattcaaatacaagaagaactcaagaagctaaatcaaggagaaaacaaagaagaaagcatagtcaaagctattgaagataagaaggatgccatgattaattctctatggcaaatcaatgtgattgatattgaatcaactctgtcacatgtttgccaaactgttcttaaagatcctagtgcctccaaagatgttctgaagtctcgggccaaagcattgaaaaagttaggaactatctttcaaggtgctaagattgcttataacagagaaaacagcctacgcagagaaagtggcaaaacaccagatgctgcttcctcatcatagtcatctgttcagtttgtctgatatggttatgtattgagtagtattcttatgaccttctggctctcagtggattctgaacattgtttcttacagtgctgttagtaggcattgtatgtaatttcacttggactaacctgccataattacacgcgtttgtacttaattattatcatctagtgataattgatctcattttactctttttaccattgaacattgtttcttacagtgctgttaataggcatggtatgtaatttcacttggacttatggattggattaagctgccataattacacacacttgtatttaattattatcatctattgataattgatttcgtttcattttttttannnnnnaaaaaaaaaaaaaaa

SEQ ID NO: 25984 - DNA, 522 bp, Glycine max
  unsure (1)..(522): unsure at all n locations
  Clone ID: PAT_MRT3847_123465C.1
gaaatgaaatcaatatgccttccttgatttttattaaggacaagagagtgcaattatggcagcttaatccaatccataagtccaagtgaaattacataccatgcctattaacagcactgtaagaaacaatgttcaaaatccactgagtcagaaggccataagaataccgctcatgacaaactgaacaagatgactatgatgaggaagcagcatctgatgttttgtcactttccttgcgtaggctgttttctctgttataagcagacttagcaccttgaaagatagttcctaactttttcaatgctttggctcgagacttcagaacatctttggaggcacttggatctttaagaacagcttggcaaacacgtgacagagttgattcaatatcaataacattgatctgccatagagaattaatcatggcatccttcttatcttcaatagctttgactatgctntcttctttggtttctcctggtttagcttcttgagttcttcttgtatttgaatgagggacac

SEQ ID NO: 25985 - DNA, 992 bp, Glycine max
  unsure (1)..(992): unsure at all n locations
  Clone ID: PAT_MRT3847_123466C.1
ttcttccatttttctcttcttccatgtgttcaattgtcagcacagatcttcttctccccccttttgttctaccgttctcgctctgagaaaaacagaagaagaaaaaaagggggtttctttcaagtttgaacaacgacccttttctcattgggttctctaattctctttttctccctaaatctttgatctttcgcggtttttgttttctggggttcgttcttccttcgtttttatgctggatatggatgggtttggaggtgggggtggtgttggtggcgctcccaacgcagagaatcttagggaattggggaatgtttcctcagaaggtgctgtttttgacgcatcgcaatatgcattcttcggtaaagaagctgtccaggaagttgagttgggagggttagaagatgatggctgggtgcctattgtggagtctaatgaggaggagtgctctgggcatagacggctcgaggtggatgtaagatctctttccgatattgatgatctcactaccacttttttaaagttgaacaaggctgttagtggaccaagaagtccaggagttattggtgaacggggatcaagagaaaattctctgcttctgaatggtcacaaagggatgacattccctactggtttgatcagcatgcttacgaccctgaagggcaaggctttcaggatggaaaaagatggtcatcacatccccattcttctctaactcagctacatgactcaaggcccttgtacagaacatcttcatatcctgagcagcaacgacagctgcaacaccaacttcaacattgctctagtgaacctgtttcaaactggtttgatcagcattttaatgatagtgaaactactgaggatggaaagagatggtcatcacagccacattcctccattgcccacttacaagaatcaaagcccttgtatagaacatcatcatatcctgacaagcgacaggagcttactcgttnttctagtgaacctatttt

SEQ ID NO: 25986 - DNA, 305 bp, Glycine max
  Clone ID: PAT_MRT3847_123467C.1
ctcatagcttcttcttttttttttttttactaaagatgggcaagttagtggaattgaaatatatggcctatcatacaacctatcgtaaagctattcatgctataattcttttttctcatagcttcttctttttttttttttttactaaagatgggcaagttagtggaattgaaatctatatggcctatcatacaacctagtaaagctattcatggaattgaaagggactgtgctatctatcatgaaaaaagaaacattgaaatgccacaaatttacactggatcaaatcttattttctgttttta

SEQ ID NO: 25987 - DNA, 591 bp, Glycine max
  Clone ID: PAT_MRT3847_123468C.1
acaaaccttgcagctgcagcagagtgtaaccgagcatggtggggaggtttgtgacacgtcacgaccttcttcttccacttccactaactactctttccccaaaccctaatcctccaaccatgcgctcttcctccaccctcctccactctctcgctctctctctctcccatctccaccaccccttcctctccgctcctccgctcttcccgcgcctcgccgtgacggtgccggaaagggaggttctcaggtcggcggaggcggaggcgagggggctgcgggggccggaggtggaggtgggggagctgagcgcggttccggaagagtggcggagggcgagggtggcgtggctctgcaaggagctgcccgcgcacaaggcggggactctggtgaggatactgaacgcgcagaagaagtggatgtggcaggaggacgccacctacgtccttgtccactgcctccgcgttcgcgaaaacgaaaccgcattcaaggtatacaagtggatgatgcaacgtaattggtatcgatttgattttgctcttgctaccaagctagcagattacatgggtaaagagggaaagttttcaaagtgcc

SEQ ID NO: 25988 - DNA, 199 bp, Glycine max
  Clone ID: PAT_MRT3847_123469C.1
ttttatattggacagacttgtgcaaaatgctcttgatggttatctggttagcatttttgcctatggacaaacagggtcagggtaaacttacaccaccatgggcatgcctgcacatgctaaaaaatcaggctagatccctcggtcactaaatcaaatattatatacacatcattctcagcctccctagagctggaaatat

SEQ ID NO: 25989 - DNA, 591 bp, Glycine max
  unsure (1)..(591): unsure at all n locations
  Clone ID: PAT_MRT3847_12346C.1
aggagcataagattaatcatctcttagttttgttgcctggaagaaaaaaattacatagaatgaaacccttgtaactcttttagctaggcttgaatacaacattcaaatatgtatttacaggtaccgcagacgcacaaagcctaagaaaaaggtgcccggggatcgttttgggggcagagactggattggataaagggagaaaattttaaacccaatttaggaaaattatacaacactgaacttgcgttcaagcttgaagcaaaacaatatatattaccataatgttttgcatggcaaccctattccttttgtaagaaagaaagaacaaggtctgtatgtacagaaaaaagctgtgtatccacgaaaagcttcataaaaggctgatcacgatatgggaacgactcaatgaaactctccttcagaagcaatgataccttatcatcattggattgtacattggtgattgtgtgagaacggntgttatagcaaagagaatccaagtaagatcttaacactgaaaggaaccccttcgcagctttaatctgcacttctgtgcattcatatactgggcttctcctacccaagtaactt

SEQ ID NO: 25990 - DNA, 935 bp, Glycine max
  Clone ID: PAT_MRT3847_123470C.1
ataaggtgaagcaggggttgctgcacatggagtttttgaaattgggctcgagggaaggggcatctctattaattcacatcacactatttccaaaggaaaaatgtcagcagatttggagaggtcgacttctaggattcctcaacttgatggaccaattccatatgatgatgatgatgtgctctctactccaaatatatacaactatggagaagtgttcagtgaagactacaacatttctaatacaccagctcctcctgaagtaccagcaagcacccctgctctcttggttcagaatgaagtgggtaatgattttgatgatgatgatgatgatgaacctccattaaatgaagaggatgatgatgatttagatgacatggaacaaggagaggatcaaaatacacatcatcttgttttggcccagtttgataaggtgacacgtaccaagagcaggtggaaatgcacattaaaggatggcatcatgcacataaataataaggacattctcttcaataaggcgacaggagagtttgaattctgattttgttggggctggcgctttcgtgaaatatgattcggaggtgtcattgtgtgtttcatgatccctttctttgattataattattaagtgaaagattgatgaagataggaatatttttaccctttcgagactattgtgatgttggcctcttgtacatagagaatgagcaattttttgcctttaactgatggttagagactcgggcatttcctttaagcccaccatttgtcaagtatgtggtttctttagttctgtatacttgaacattttagtgaatttaagaatcccttgtatgataataatgatagataggcttgttaggcctcgcgtaactttttgacattaaaaaacaggatgatgtttttttttcttattaaattaaaagaaacagtttgat

SEQ ID NO: 25991 - DNA, 372 bp, Glycine max
  Clone ID: PAT_MRT3847_123471C.1
ctcgattgtagagcaccaagtcgaagagatgctataatcctctgagcattcttggttacctctatacatcataaattagtgtgctgttaccattagagtgtgatggttactaaacgaggtgaccgatcgttatcgcgttcattcgcaccctctttagcttaatggaacaacaccactgcccctgtactgttttggattgctaatatcacgttcatgtcaatggagccaccaaggctgatgctgatctgatccgctcattctgtcaggatctatacatccaaggtcaattcgaccactccaaattctgatctgacccagatgcatacggtgacccttattcatgatacagatactgcttactgtgccgaatcc

SEQ ID NO: 25992 - DNA, 301 bp, Glycine max
  Clone ID: PAT_MRT3847_123472C.1
cccaaacaagaatcctcaatatgagagatgccgaattgttggctgccaaagaagagatcagctctcttgagaaggaattttcttcatacaaagttcgtgcacatgcacttcttcaaaagaaggatgctgaacttgctgctgcttaagattctgaacaacttaaagctctaaaagaaactcttaaaggatatttgatcaatattttggaaaaaaacttggtttgataatggatattaaattattcaccattggcatccttaatttcttccagaaggtggaaattgaagtataatcattacca

SEQ ID NO: 25993 - DNA, 1827 bp, Glycine max
  Clone ID: PAT_MRT3847_123473C.1
acttctgctcctactcgtcccgccgtgtcgtcctcgcgtgcgtagcagtcagaaaaacactgcgagaaagagaagaagaatcagagagagaaaatagagagagaaacgaaaaccccttttgaccattgcgcctcgattccatttgccccattgattattctcccaccaaaacctcttctgtattttttttccttcttcttgtgatcattcctctcatttgggggcacggttctgtttgtgatcaacctcaaaattctgatctttttcccttcctgattcggattcggataccctgttgcgtttttctttctgggtgtgttttatttcggccaaagtttctgttttgcatagtgggaagtttaaaaagggattaattctatgtgggcatcgttcatattggcaaatcaatgttaactctatcatcagtgtggttatgaagtaatatggaagtgctccttgcgcgcatagctcatcaacgacaacatcaaggacaatagcatgtcgttttacattggtcgtgaggcttcaaagctatggaagagaatttgtgcagagacgactacagaggtcaacctccttgctgagaattggaagtaccttctggctggtcttgtttgtcagtatatacatggtttggctgcccgaggagttcattatttacataggcctgtccctactctacaagatgttggattcttccttcttccggagcttgggcaagacaaagcttacataagtgaaacactgtttgccatgatttttatatcgtttgtcttgtggacatttcatccattcatattgaataacagaaagatctacacagctctaatatggtgcagggttctagctttcttagttgcttcccaagctcttcgcatagtgacattttatgctacgcagcttcctggtccaaactaccattgccgggaggggtctaaacttgctacactgcctcgtccggatagtgcctttgaagtgctcttgattaattttccacgtggcgtgatatatggatgtggtgatttgatattttcatcacacatgatctttactctagtctttgttaatacatatcatagatacggcacacgaagatgaataaagcagctagggtggacacttgctgtgggtcagtctcttttgataatagcatctcgcaaacattacacggttgatgtagttgttgcctggtatacggttaatttggtggtatttttcgttgagaagaaattaaaagaattgccagaccggacaaatgctgctgcagccttgctaccattaagcaccaaggacaacaaaaataggaccaaagaagagaaccacaagttgttgaatgggaattctggtgaccctgcggattggaggcagagaactcaagcaaatggcaagattctggaagatggccatgcacaccatgttgacactgcaatgaatggtgcatagatacatgagcttattattatgctgcacaatgttgatctgctgcaacatggcctttggaaagttacaacaacctacatacaattagatttttgttagcctgatttgtgattattgtaactgggttgtgtgctttttaacatattgcagcccttgatccatttgtcattgtgaaatgatctagcatcagtagtgctatagaaaattttccaattcactttgccttgtttttcaataccatgtgcatagtccttagagtgtatattttttgttgctctttacatggaggaaatcaccactgaaatgtaacaagtttctaaatttctaaatatataagagttaattcaagaatgttggacaaaaacaaaaaaaaccccctataaatag

SEQ ID NO: 25994 - DNA, 299 bp, Glycine max
  Clone ID: PAT_MRT3847_123474C.1
acacccacgcgtccaaatctctttaccattccaattctcaaaatctctctaaagttaacattctaagactccttctctacacgggctaaatactccaatgattccacaatccccacattacatccatgctccctattcactgtactagtcacctaaacaatatatctcacccgcacctaaataaacatataccctaccatcatcatcactcttatgacaccaatcctagcaccagcatcaaaaacctcactactcttacatctatataaccacacttgacttaacatcttttcactcac

SEQ ID NO: 25995 - DNA, 666 bp, Glycine max
  Clone ID: PAT_MRT3847_123475C.1
ggaagtgctccttgcgcgcatagctcatcaacgacaacatcaaggacaatagcatgtcgttttacattggtcgtgaggcttcaaagctatggaagagaatttgtgcagagacgactacagaggtcaacctccttgctgagaattggaagtaccttctggctggtcttgtttgtcagtatatacatggtttggctgcccgaggagttcattatttacataggcctggccctactctacaagatgttggattcttccttcttccggtttgtaattgtcattcccgtttctctctcttggaaaaaccagtacatagaatgataagaatgcccttgaaatttttaatcttggtgctgttattacaggagcttgggcaagacaaagcttacataagtgaaacactgtttgccatgatttttatatcgtttgtcttgtggacatttcatccattcatattgaagaacagaaagatctacacagttctaatatggtgcagggttttagcattcttagttgcttctcaagttcttcgcataatcacattttattctacacaactttcgggtccaaactaccattgccgtgagggttctaaacttgccacattaccccgtccagatactgtcctttgaagtgctcttgattaattttccgcgtggcgtgggctat

SEQ ID NO: 25996 - DNA, 1282 bp, Glycine max
  Clone ID: PAT_MRT3847_123476C.1
gtttgaggcggagaatagctccaacagttcccaaattggaaccctagcattcgccattgccgccacctttccccacgcagcttttgttgtagcaaaagattgatattttcttcttcgtctataaaacccacacgtcaagtcacttctttttaactcaattttgggtcccgtagctctatattttctcattcgcagacaagaaaaatccaagcctgtggattagaaaggggttcattttgctgattctctagctatggctgctaagattctcgcaaacttgattgtgatgggtggaggaatcttggcaagagcagttgttcaggcatatcgtcaagcgcttactaatgcctcaaaaaatggtgttgcacaagagacaattcaaaatactatccgcagagctagcaaggtgatgacggagcaagaggctcgacagattcttggtgttacagaggaaactccctgggaggagattatcaagaaatatgacaatttatttgagaataatgctaagaatgggagtttctacctccagtccaaagttcatcgggccaaggaatgtctagaggcagttcaacaaggcaagagtcagggtacccctagttgagaacttagattttctccattttataaccattgtgtaatcatttttgcctccaagtttgtgttgtactatttgcgtaatcaaaagtttctgaagtaaaaattttattatcaaaaaaaaaaaaaaaaaactcgagactagttctctctctcgcagcttaggctagggttcagaaacgaaaaagggttcggtgttcagttcgcgatgagagccaagtggaagaagaagcgtatgaggaggttgaagaggaagcgccgaaagatgagacagagatccaagtagtgcgttaatccaagtagttgatttccgcactacttggatctctgttacctctcagcagcttaggctagggttcagaaacgaaaaagggttcggtgttcagttcgcgatgagagccaagtggaagaagaagcgtatgaggaggttgaagaggaagcgccgaaagatgagacagagatccaagtagtgcgttaatccaagtagttgatttccgttgcttttataattatgttgtcaaattgggcacccagttgttagaggcactggtttctcctttttgatgttttgatacatttttgtttggtttaattcgtcttatgttattagctgaaaacaatgctgttactgcgtttgcgaatcaacatgatctcttatatgcatttctgattctctctttgctat

SEQ ID NO: 25997 - DNA, 698 bp, Glycine max
  unsure (1)..(698): unsure at all n locations
  Clone ID: PAT_MRT3847_123477C.1
gcggagaatactccaacagttcccaaattgaaaccctagcatcctccattgccgccatctttcaccacgcagcttttgttatagcaaaagattgatcttctcttcttcgtctttacccacacgtcaagtcacttctttttaaactcaattttcggtcccctcccctagctctatattttctcattcgcagagaagaaaaatcgaagcgtgtggattagaaaggggttcattttgctgattctctagctatggccgctaagattcttgcaaacttgattgtaatgggtggaggaatcttggcaagagcagttgttcaggcatatcgtcaagcgcttactaatgcctcaaaaaatggtgttgcacaagagacaattcaaaatactatgcgcagagctagcaaggtgatgacagagcaagaggctaggcagattcttggtgttaccgaggaaactccctgggaggagattatcaagaaatatgacaatttgtttgagaataatgccaaaaatgggagtttctacctccagtccaaagttcatcgggccaaggaatgtctagaggcagttcaacaaggcaagagccagggtacccctagttgagaacttgcattttcaccattttataacccttgtgtaatcatttttgcctccaagttgttgtatacnatttgcataatcagaagttnntgannnaaattt

SEQ ID NO: 25998 - DNA, 273 bp, Glycine max
  Clone ID: PAT_MRT3847_123478C.1
aaaataacacacacaaacaccctcgttgcacctagtaatgcagcgtgtatttaagttgaataaagtgctacatacttgaacacgaaggcaaagcgacactcattaaccagattttagcgactctaacagctatcaagaagacacgtcagcattcgtgcagtggcgttcgaactcacagattaattgtcaacggccagaggaacagccagtgcagccactggagaaggaccagctctagtaagaaatacagtgatcttaccttgactatgagct

SEQ ID NO: 25999 - DNA, 1366 bp, Glycine max
  unsure (1)..(1366): unsure at all n locations
  Clone ID: PAT_MRT3847_123479C.1
tgattcttccattgagagcatttagttngctcttccttgcttctttgtatttaaacactaggttgtaaaacatttgatgtttatctgtattgcttgtgccaaggacgagaagatatttttaaattagaatgattattttggcacaagcaatacagataaacatcaaatgttttacaacctagtgtttaaatacaaagaagcaaggaagaagcaactttatgctctcaatggaagaatcatagaactctagtgttgtaggaaccacaactagggcatttgtggtagagccagtggaagggggtctctcctttcttttcacaatcattacataataaaacctgagtttgactagaaatctcatcagaaattctctcttcagccaacaacgcatctaacatcctaaaatatacctgcatgtctccaagtgacttgctacatattgggcaggtataattaaagcaggtatattcctgaaaacatgttgagtgcattacatgaccacatgggagggcttttaccggagagcaggatgtgaagatatattcatgacaaattggacagttgtcctctaaatgtttctccctttcatcatcaaataatttgcaacgagacaaataatattttgccatcgataaattacatgaaattgttgagcatgtggcactgattggttgaatcactaagcacttcatacacatcatctacgtaatagattttctgtcaactgaatgatctgattactcattagccatatgtatataggtatgaagttggttgcatcaaggagcaaaaagtttacagtttctcttgtagtgattacaactctagattagtttgtgagggtccctgtaagatggatgtttcccaggaaattccagttcatcattttttatattggcttctgtagaagagatctgctgcctaataatccaacgactcattagtaggttctgtattatgtatgactttttctgaggatccaagcaagagtcacgagacacccttcttatcaccgtctccaaatcatcttgactcaatttcaaaagtcggtcataacgcccagacttgtcacaaagttgagaatacttaccttcattgtttacaggatttatgatatttgttacttcattgcaagcatgtttgttatgatcatgaaattgatttgtgctcgagccaaagttgagaatacttaccttcattgtttacaggatttatgatatttgttacttcattgcaagcatgtttgttatgatcatgaaattgatttgtgagtttcgaacattgattattattttgttctgcattatgaaccttaactttatcatcaaagttgtagttagacagcacaacattatcaccattatgc

SEQ ID NO: 26000 - DNA, 277 bp, Glycine max
  Clone ID: PAT_MRT3847_12347C.1
tcccgggtacgaccccagccgttccgcgtaagtaccagggaggctataagtctccttggggagtcaaaaacaaaattgattttctgtcatagtcctatactcgacacgccgaagatgtccgccaggctcgtgaatttctttcaaagataggtgagcgcagccaaactcatatttctgcagagattgaacacgttccggcatcgacccattttgatgagattctacaacaagccgacggcatcatcctttcccgaggacatttgggctattgatcttc

SEQ ID NO: 26001 - DNA, 786 bp, Glycine max
  Clone ID: PAT_MRT3847_123480C.1
ggtgattcggctcgagaatgaattaaggtttaagactaaggaaacaagggggaagaattgaggaagaggaggagtaacaaaacaagtatgtcagaatcaaacgcaattgcaaatggtttggctggtgcaggtggtggaattattgctcaaatcataacttatcctcttcaaacggtaaacacgcgccagcaaactgagagaacactcaagaggaacaagcaaagtttgccctccaactcaaccactgctcctggcactcttcttcagatctttcaggtcattggaactgagggttggggtggactctatagtggcctcaagccttctcttcttggaactgctgcttctcaggatttactactatttctatcaagtttttaagacacataccccataatagcttttgctcattattcagtattcacctgttttggatgcaaaattcaaggtttaagacataacagatgatactaatagcagtttggtctaccagaaggggctagtctcctctaacgttatgaacaaggataaaattaaaatcccattgagaaggatatccacatttagtgttcgactgcgtcccagacagtatttcctctgaaagagaattcttgtggaaaaccaaaagcaaaaaaggcatgatacattatgtgcttttcaatgggttgtggagtggttatctaaacacttatatttcaatgctttcagggaatttactactatttctatcaagtttttaagaacaaggcagttgccattgcagctgcaccgatggtgaaagggcgt

SEQ ID NO: 26002 - DNA, 497 bp, Glycine max
  unsure (1)..(497): unsure at all n locations
  Clone ID: PAT_MRT3847_123481C.1
acaaaacgtgaaacttccgatgcaattaacgttttacaagctctattatgtatagttccaactgtcgtaggttttttgttctccagagtaaatttacaataatccaaccatatttgatgatcattttctccgaaataactaattaaatcttcataaatattaactattcttttataatcaattggattttgatttcgttcaatttgaatcatctctttgaaaaaagatgcaaccgcaggaggatgatgtttatatttatcgtaataatttcgagctagttctagcccattctttttgagttcaatcgattttctcaataattcaggtttcagcaatgaagaaattttacgttgagtcactaaacaactgcctcctccaagtaattcggaaaaatatttctcaattcttttgatgacttcagtagggtgtaagtgtttagatnnccattcgatgaagagattccagacatcgtcaatagttttctttttcatatttct

SEQ ID NO: 26003 - DNA, 326 bp, Glycine max
  Clone ID: PAT_MRT3847_123482C.1
gtccttacagcacatatattcttatatggaggagcatatctgacgattcctcgtctcgatgaacctgactcagagaaggcaaaatggcacggtaacacagcactcgatgcatctttaaatgctcaatgtatggaccacatgggcgttctcactgcagatgctatgataatggtttttatacttgaattaggattgctgacggctggactcaattccatcacaatgcaactacaagaggggttctgtcttctccactttctcattgggcactataactcattattgtgggcgttccattctgcatgggggggcgctaaatcgggcca

SEQ ID NO: 26004 - DNA, 844 bp, Glycine max
  Clone ID: PAT_MRT3847_123483C.1
ccacgcgtccggagaaattgaagtgtggaggtgcgtgcttttgtgggggcaaatagtagatagtagatctgtcgcagagcaaagaatcgtcggcgacggcgaggctgcactataaccgcgattaactatgattagccttcgccggagcgtaaacaagatcccggcgaaatcgaagcgattcaaatgccgattggtgaagttcgaggagctgccggagtacttaaaggacagcgagttcatattggactattaccgctctgaatggcccgtgaaggaagccttgtggagcatcttcgcgtggcacaacgaaaccctaaacatttggacgcatataggaggatttctcatattcgccgtgttggcggcgatgagcaccacctcggaactctggaatttgctcagatcgtccacggcgctcgggttgtcgacgaccacggcggcggagatgaacgggtctaacagtgacgccttcccggtaatgttttataaaatttattttaaattcatttttaaatttttatttaagcgtactgtcatagtaatagttaataaactgccattattagtgttcatagaggggctggttcgtttgcttagcggcaggtctgtcgcataataatagtgatagtgatattacactgccaaaaataaaagtgatagtagtaggtgattattatgcatatggcaaaatcaattcaaatttattgtttgatacaattaatacaatagtgatataaattaaattattaaattggtgtctattattacttctctgactaaaaaaactaaaataaaataagccagtaagcatggggatacttttacatagcaaaatagtgtatca

SEQ ID NO: 26005 - DNA, 350 bp, Glycine max
  Clone ID: PAT_MRT3847_123484C.1
aaaaaatcaccagtatcaaagagaaatatttatgcagccgaggcatgactgattgagaaagaatgactccctccgaacagaaagagagtcccttgatgtaagagtcttgaagaatacattcgaccgacttcaggacgctagctgaccaagaccgacattccttgtacttttcggcattgcttctattacaacatgtatagttggacgaaaatagctctactaaacgaaagcctctgttttatatacgaaaccgacactggacagcgaacatagacgccattactagactcaatctatacgagcgatctaaggcatatcgcgagcgaagcttcatatacaatgctaggact

SEQ ID NO: 26006 - DNA, 287 bp, Glycine max
  Clone ID: PAT_MRT3847_123485C.1
gtttttttttttttttttttatttgcacaagagatgagaaagaagacgaattggaaacaactaaattgaaaccagagaccactaaaaaaacacgtgaaaacaaaggaggaagcaacggcaaaaccaaactagaacacatcccaaaataattacctaacaggggggaacaaactattcctcctttcatgatacagattaaattcgttgaaataaaactacggaacacaagactgggcccccacataaggaacagacttggaaacacaagaaaaacgggcaatgggagg

SEQ ID NO: 26007 - DNA, 285 bp, Glycine max
  Clone ID: PAT_MRT3847_123486C.1
ggctcgagagccaatccttgattttctgagcatccatacacacatagtctggatttggaaaactctaagggtgcagataaaatgtgaaccaggacgggacgagcgcacgtgaacaaacaccttctgtcttacataaccggaaaccaccttaaacacgcagatgtcatgggccttgactgactcgtttgggatcataggaccctcttccctccaaacaaacgtggtgagccaactgcgatgattaatgactgtaaggaccctgtatcgctcgcttcaagaggattg

SEQ ID NO: 26008 - DNA, 193 bp, Glycine max
  Clone ID: PAT_MRT3847_123487C.1
tttggaaaacatgttcaattgcacatgtggttgatattcggtaagggaagggattaatggattctaatatgctccgacttatgaaaaccaggatggggataatatgctggttggatatgttccgtggtacctgtttgtgtcaatcggcaatacgctcatgatgactattggtataaagcctaaggggtatggt

SEQ ID NO: 26009 - DNA, 276 bp, Glycine max
  Clone ID: PAT_MRT3847_123488C.1
gggcaaaaaaggaggtaatatggagcatgatgggaaggcagaccccttgaccaaggggatgttcaaaatttaagggaggcattccacattggtgtaagaaagatcccaccggtggagatttgctacctggaacaccttaccatcaaccaattgcaaattggttcaaaagtggggtgcttaagttaatggtgccaggatcaacccaaggcagttctcacatttaaagacagtgttgatagactctggacccacatatagctctgtaaaagtcccaaa

SEQ ID NO: 26010 - DNA, 381 bp, Glycine max
  unsure (1)..(381): unsure at all n locations
  Clone ID: PAT_MRT3847_123489C.1
agggatgggggtaacagataacgagctnaaaacaaaacaatctcttcttttggcccagcacccccaacaaaaaagaaggccctttttaataatcaaaaagccccccatccggtaaaatctctgaaattgtttggcttaaccaaaaaaatatgagggtctctcccaaaaacacccttttagacccactttttgtaaaggcttttttcccccccaaattaaaaaccccgttttgggaaacaaatgttgcaaaggaagggggggacttaaaaattttttccaaaaaacaatttccctaaaaaaaaaaccccagggttcccaaaaaaaacccatcttttttttgacccaactttcctttttaacccaccccccactatttttttt

SEQ ID NO: 26011 - DNA, 498 bp, Glycine max
  Clone ID: PAT_MRT3847_12348C.1
ctatggtttacagaaaatccattaggcgcaaccgcagccgtaactccagggactgctagcagtggcaaggctcatcgattgcgatctgaggcggaaaacaaaagctgatctgttcaatcacctgaaagacctgaaggccgatctagccttgctccgtgttgctaatgacaccggcggtgcacctaacatgctttctactaacaaggcgaagatggtgaacattggccatgttcatacagtgatttctgacaagcataatgccgcttcagagggatgcctacaataacaataagtacttgactctcgatatccgacctaataagaccaaagaccatttcgtaacgaagcttactaagcatccatcatcattgaacaagagagggaaatgatgaaagaatatatttcccactgaggaaatatgctatcaaggtgtacctttaaagcaatctcatctaggaattggacatttacctccttcatactagcacaaaccagata

SEQ ID NO: 26012 - DNA, 543 bp, Glycine max
  Clone ID: PAT_MRT3847_123490C.1
ggctcgagggaatagaaaaaccattatttggatgtgatcctcatatacacggacggaagagtaaaaaacatggaagatgtaccttgttagttcgcagttctaacaaaggatcaaattcagaatctgatggctttgttccatatatgggcaagcggacagttcttgcctggttaattgactctggaacagtagagttaagccaaaaggttcagtaccgcagacggaagaaagtcatgctggaggggtggatcacaagagacggcattcactgtggctgctgtagtaagatcctcacagtttcaaagtttgagcttcatgccggtagcaaattgcctcagccatatcaaaatatatatttggaatctggagtttctcttctacagtgccagatagatgcatggaatagacaagagcatgctgaaaaaattggtttccattcagtggatattgatggaaatgatcctaatgatgatacttgtggtatatgtggagatggaagggattttaatctgttgtgatggctgtccatcaacatttcatcag

SEQ ID NO: 26013 - DNA, 141 bp, Glycine max
  Clone ID: PAT_MRT3847_123491C.1
gggccggaattacccgcgtcgaccacgcgtccgcttattgctagcataaagtttggtaggtgatatattgatattaataagccactctcattaaaggcaaacaaggcccaaggagtgatacaccaaacttattgctagcat

SEQ ID NO: 26014 - DNA, 304 bp, Glycine max
  Clone ID: PAT_MRT3847_123492C.1
ccccaaaagcaacatttttcttttcaaatttaaaggttaaacaataggctactttccaacctgaaaaaaataaaaaaaatatggggggccccctcaagttttatggttataggaaaaaaaaaaaaaaaaaggggaaaaggatatttttgggcttttccttggccctctttaaagccccatgttaaaaaaattaattttgccggaccttgggacaaggcttaaaattttcccccaaatgggttaagttaatcccaagcttaaatccatgggaccataacatttgccggacccgggggcggcccct

SEQ ID NO: 26015 - DNA, 299 bp, Glycine max
  Clone ID: PAT_MRT3847_123493C.1
tgtcaaaaaaaggaccactatttgattccccgggaaatgtgaggatgctggaccagcttaaccccattttcatggtattaattctacactacagtgtctaatacatatgactctaattctttttaagacggctcttattttggaccgtcttagaaagcgtacattgtaatacggatattagataacgacccacttataaaaacacttcctcttatttgagaaacatggatcatgtttgaaaatacatcatctatgacagagtgcagataatacctgtttctataagtccaattttttaa

SEQ ID NO: 26016 - DNA, 221 bp, Glycine max
  Clone ID: PAT_MRT3847_123494C.1
attaggggtgggtaacttaatttattgggccggggactgaacccccttacacaattatacttttgtaaccctttaatttttttatactaaaaaaaacagtagagcctaatttcagtgattagggcctttaatgcacttttcactttttactttcttttttaaatgtacatgtttttggaggggaattgtcactgcttttttttcaagggaaatttgttttt

SEQ ID NO: 26017 - DNA, 311 bp, Glycine max
  Clone ID: PAT_MRT3847_123495C.1
aaaataaactaaaattacagttaaaaaacactgtactagctagctatgaattttactaaaaaaaaacattttaagccaggacctattattgcaacaacagcggctattttctttttgggggatggcagacagagagttaactgttcttagatcaatactgataacttgtcaaacactgttaacaatgttatgaataagatccttactggtgcaaaaatattatcatctaattagactggtttgacttattttcatacagactcactttgacgtttcataaattaaaactacagctgaaaggagcgcagact

SEQ ID NO: 26018 - DNA, 336 bp, Glycine max
  Clone ID: PAT_MRT3847_123496C.1
acccttccgtttccccggggcaaacaaattattggttaccaagtttatggccgtaatggacgactacatggtgctgcatcgttacgatatgttgagccaaccctgcaagcacaatgacctgccgcctactctatctctttctttgatgtggagcccatccaataaggagctgcttatatctgtgaaaacccacacctttcctatgttctacataaacaccaataaaaccccggagttagagctcaagacacgacaacagctccaagtggggaccctaaaaattcaatctttcggcttcggcttattgcaagtgaaaaaaaaaaaaggcagggagtg

SEQ ID NO: 26019 - DNA, 277 bp, Glycine max
  Clone ID: PAT_MRT3847_123497C.1
ggctcttctttgcttggtgttgtccctttgtgttctctttactcttggtgttgctagagatagccatgcttgatacgaatatttttggcttgctgtttggcctagcactcttattccatgttcattgtgagatcttttaatgcctgtctctgcaagtgttgatatttatgatctccttatgctgattgatgtaactctgttcctcgataccttcttctatatagaagactttcatctatgtctatcaatgtatgtactattctgtaatgctcctttt

SEQ ID NO: 26020 - DNA, 153 bp, Glycine max
  Clone ID: PAT_MRT3847_123498C.1
agtgatgtcgcttctgaataaattttcacaagtggaagtttaactaattaataagaatagtgatgcctcttctgaataacttttctgcgtgttaatgcattcgttgttgcttatgatttcttaactaatacaataacgccatctcaaaactat

SEQ ID NO: 26021 - DNA, 288 bp, Glycine max
  unsure (1)..(288): unsure at all n locations
  Clone ID: PAT_MRT3847_123499C.1
caagatgtnagcattgaatatgatgcatgtacaattccaaatgantgtggttnncntggttgtngccaaggttggaaatcacaaacaaattgttggtttncatgttgctggaagcacnggaagactgggatatgcttcattgataccatatgtngagncagttgtgcaagctcaangtgccgaagtttactttgacttcgnccctgtggaggntgatagtcangagggantngctcacattggngaattnanatctggtgtctatgtgcnantgcctacaaaaancat

SEQ ID NO: 26022 - DNA, 222 bp, Glycine max
  Clone ID: PAT_MRT3847_12349C.1
aaaactaatcacataaatctgggatttcttatattttacaggatcaatttttcttacaataacatcaaggggtatgactatgggccagctcttactaagtttcttatataacagtaataacttcttgaacgggttagaacgatctaaaattattaccctccaaaattgaaataaatacgatgggcccccccaaaagggcccatcttgatttttcactgcaaa

SEQ ID NO: 26023 - DNA, 217 bp, Glycine max
  Clone ID: PAT_MRT3847_1234C.1
aacaaataaactggcctccatactggtctttacatccgcacctagtatctagcttcaatttataatcataaaccatattctgattcccgaacctaacgaatattcatttgctggcctaggacacagccatgacggttatcaggaaggagatgctactggtgatcacgcatgcgaagctccatgactaaacaaaggcggaggcttgtcgtgcctgtta

SEQ ID NO: 26024 - DNA, 278 bp, Glycine max
  unsure (1)..(278): unsure at all n locations
  Clone ID: PAT_MRT3847_123500C.1
caatttccttcgtttggggaaacatgcatcactcaggataaagagaagagtttgangctccgcttagcagncatactcgaatcagggcacataaatttncaatttgaggnacatttnttttgtttagatcanaaacagaagagcttgctcaagtgaaggaaaaaaaaggttctactaggngagagttaatgtagttatctttctgagctttgtcggctcttgtcanggacccccgcaaagngagaataaagaatgggtgcctgaagattttggaagga

SEQ ID NO: 26025 - DNA, 396 bp, Glycine max
  Clone ID: PAT_MRT3847_123501C.1
gttgtatattaccttctgaatcggtaatcttttctcaagtaattccttgctctctgatactttgatgaacactacttgggaaagatgtggtgcttaagttatctttccctaaaggacatcactgttttttattttttgcactgcaaaggacagcactgttatgttctttcttttgcattttttaggggaagctagcattcatcagaacacaatagataaactgaattttctcaaccaccctcctcttggatttcctttcataggaattttgtctatttccatttctccttggcaaaaaggcttatagctaccgtataatctggtagtttagtagcttcttcgtccttctggaaattataaatcaatcatatgtagtatgattgtgggagtaatggt

SEQ ID NO: 26026 - DNA, 761 bp, Glycine max
  Clone ID: PAT_MRT3847_123502C.1
atgaaatcatcatcttctgtcattgtgatttttccaactactctcttttccacataaactcttccaagtgttgctttcctagaacttcacaactaaaacagatggtagatttctgataatcttcatggaaagttacaagtaaagggtaaacaaacatatacaccagactccagaaatgaaatttgtataaaaggaatgcctttccttacacacactcaataattcttatttaaagggtaatgcttgatttaatgcttaaggcataatttacaagtattatcaataaaaacgtaaaatcaaaagtatgaaaattaaaaaaaaatgaaaaagcaggagatcaaatgaggactcactgaaaacaaacatgtaactatgtaagtatcccaaaatacaaaatactgagttgcttcatgcaccttgagctctatgcatccatggcaaagctgcagtgacattagaaccacccaaatggttttcttgtgaaattgaaaccttgtccttcttagaccattgccagatcttggaaacagaaaaactttcacctttccttgcaatgttgattttttttccctcaacatcatcagtggaggaatttccataattgaccaatctccctttcaattgtctcatactgtcaccattaacacctccaccatcacctctattggggcacaaagccacttgcaaatctgaatcagcaaccacatactggaaggaccccattgagtagcatctcctaacatccaaattacttgtactac

SEQ ID NO: 26027 - DNA, 292 bp, Glycine max
  Clone ID: PAT_MRT3847_123503C.1
gatgtttgcttactcagacataccccttgctagcaacactgagcttaatcgagcttcgcacacatgaatcaggaaaagttaatgaatatggacggttcggtcagaactggctgaaagggtagtgtgagaagaaagaagaaagctggccatacaacaacaaccacacatgacagacagcttgataccaacctgactagaataagggtgagtgccatccatgctagtgaataagtcggtatctttaatgatggcgtacttatccagttactaactcacacacttcatgcatcca

SEQ ID NO: 26028 - DNA, 1177 bp, Glycine max
  Clone ID: PAT_MRT3847_123504C.1
cccacgcgtccgaacggcggctagaagacaacacaagggagcgagcaagccgctcaacgccagggggacagggaggtgttgacatacggcgacccaagaaaaggcgagggtgtgagacatcggacacatcagcactagggtggattccgactgtgctaacaacgcatgaaactttgtgcaccaaaagaaacaaccccaaggggaatttccctgacgaccctttatgcgctgcttcctcaaaacgtctcaaggcgaatccagaggctcagccaatgaagaaaaatccgaactctgtgaagccgaaaataaaccagatgtgcaattttggtgacaatcttgagggctactacagccctatagatcaggtggaacagaaaccactggttaaccagtatgttaaccgtgccccgtttgctggaaatggagttcaagtctcacctgttactccatctgctgatgttactgcttacttcagctctgagcattcgagcagctcgtttgattattctgacctcggatggggtgaacaagtccccaagacacccgagatctcatccatgctttctgctgctcctttggacggtgaatctcagtttgtgcagggtgctgctgatcagaatcagaagaagaacaacctgctggatatggcatctgtgcaagatgattctgcaaaaactctttttgaggagcttgcagacattgaatcccagctgaagttctttgagaccccttcttttcttgatgaagcctgggctgatgctgcattggcgtctttgctcagtgaagatgcatctcaggatgctgctggaaaccctatgaacctttggagcttcgacgacctgccttccatggcaggagtcttctgaacaccttcatatccctttttatgaattgtgatcgtgatgttggtgatggaatccacagcaagaaaaccaacctgcttaaagcatatgtggagtttatttatcttgtagctaatgcagtataggactatatataggtttttatagggtatcctttgtgtgaaactcaagagacctcgttttcaggggattttctgtttgatgtccataaggattatcaattatgttatatatggtctgggatacagtcttgacttacagtttttaacttggttgttttcattgttatggcaatttgattatgatttgagacc

SEQ ID NO: 26029 - DNA, 805 bp, Glycine max
  Clone ID: PAT_MRT3847_123505C.1
gaaaccactggttaaccagtatgttaaccctgccccgttccctggaaacggagttcaagtctcacctgttactccatctgctgatgttactgcttacttcagctctgagcattcgagcaactcgtttgattattctgaccttggatggggtgaacaagtccccaagacccccgagatctcatccttgctttctgctgctcctttggagggtgctgctgatcaggttcagaagaccaacaactcgcaggatgtggtggctgcacaagatgattctgcaaaaaccctttccgaagagcttgcagacattgaatcccagctcaagttctttgagaccccttcttttcttgatgaagcctgggctgatgctacattggcgtctttgctcggcggagacgcaactcatgacgccgccggaaaccctatgaacctttggagcttcgacgacctgccttccatggcaggagtcttctgaacaccctttatctccccttttatgaattgtgatcgtgatgttggtgatggagtccacagcaagaaacctgcttaaagcttatgtggagtttattttatcttgtagctaatgcagtagtataggactatatataggtttttattatagggtatccttttgtgaactcaaagacctcgttttcaggggattttctgtttgatgtccttaaggattatcaattatgttatatatggtcttggatacagtcttgactgctgatacagtttttttttaacttggttgttttcattttcattattattattatggcaatttgattatgactttgagacc

SEQ ID NO: 26030 - DNA, 793 bp, Glycine max
  Clone ID: PAT_MRT3847_123506C.1
aaggtaattaagtagggtaacgccatgggttccccagccacttcggtgtaaagattcggcctaatgacatgtgtttgggtcgcagtaatggcgatgtataaggtaggcaggaggggttcgatgttgggaacgttcataagtgttgtccttatttttttttttttttttttattttttttttttttttttttttttttttttttttttttttttttttgtttttttttttttgccataacaatgaaaacaaccaagttaaaaactgtaagtcaagactgtatcccagaccatatataacataattgataatccttatggacatcaaacagaaaatcccctgaaaacgaggtctcttgagtttcacacaaaggataccctataaaaacctatatatagtcctatactgcattagctacaagataaataaactccacatatgctttaagcaggttggttttcttgctgtggattccatcaccaacatcacgatcacaattcctgaaagcaatacacaaatgaaaattataatgataaataatatacattcagaaacatgcagggatgcttccactaagaagagaacagaagcaaaaattaaagaaactagaggcagaatgaaaaatcactaacttgtagctttatttacataaaaagggatatgaaggtgttcagaagactcctgccatggaaggcaggtcgtcgaagctccaaaggttcatagggtttccagcagcatcctgagatgcatcttcactgaacaaagacgccaatgcaacatcagcccaggctttat

SEQ ID NO: 26031 - DNA, 1889 bp, Glycine max
  Clone ID: PAT_MRT3847_123507C.1
gaaactcaattatacaaaaccctgaagaaagacacagccattgtttgtttactttccattgattgagcgaaagctttgttttttctgcgatcattttccattgggtggaagaaagtctcaacctttagtcgaaagagcaaggatctgagtgagtgagcgatcatgtgtggtggtgcgattatctccgacttcattccagcgggtcccgccggcggggcgcagcgcgtgaccgccgacatcctgtggccgaatttgaggaagcggttctcgaagtcgctgctggacgatgatttcgaggcagggttcagagaattcgaggatgactcggaaatcgaggatgtcgatgatgaggacgatgaagaggaggaggagttgaagaagaagaagccctttgggttctctcgctccaacaacaaggctgcttctaagcctctctctcgtggagcaacaactgtgaaatctgtggaatcaaaggggcaagctgagaagtgtgccaagagaaagaggaagaaccagtatcgcggaatccgccagcgtccatggggaaagtgggctgctgagattcgcgacccaagaaagggggttcgtgtttggcttggaactttcagcactgctgaagaagctgcaagagcttacgatgctgaagcaaggaggatccgtggcaagaaagccaaggtgaatttccctgatgagccttcaggcgctgcttcctcaaaacgtctcaaggcgaatccagaggctcagccaatgaagaaaaatctgaactctgtgaagccgaaaataaaccagatgttcaattttggtgacaatcttgagggctactacagccctatagatcaggtggaacagaaaccactggttaaccagtatgttaaccgtgccccgtttgctggaaatggagttcaagtctcacctgttactccatctgctgatgttactgcttacttcagctctgagcattcgagcagctcgtttgattattctgacctcggatggggtgaacaagtccccaagacacccgagatctcatccatgctttctgctgctcctttggacggtgaatctcagtttgtgcagggtgctgctgatcagaatcagaagaagaacaacctgctggatatggcatctgtgcaagatgattctgcaaaaactctttctgaggagcttgcagacattgaatcccagctgaagttctttgagaccccttcttttcttgatgaagcctgggctgatgctgcattggcgtctttgctcagtgaagatgcatctcaggatgctgctggaaaccctatgaacctttggagcttcgacgacctgccttccatggcaggagtcttctgaacaccttcatatccctttttatgtaaataaagctacaagaattgtgatcgtgatgttggtgatggaatccacagcaagaaaaccaacctgcttaaagcatatgtggagtttatttatcttgtagctaatgcagtataggactatatataggtttttatagggtatcctttgtgtgaaactcaagagacctcgttttcaggggattttctgtttgatgtccataaggattatcaattatgttatatatggtctgggatacagtcttgacttacagtttttaacttggttgttttcattgttatggcaatttgattatgatttgagaccagccatttttcaatgctttgtgtggtggatgattgcatatcgcctctattattttgcttactggttactcaggccatctttaatagatcgtccttggtgtaaagttttagctattaatggatgtggaaaagcttttttttttttctaaaccaatgttctgcaataattggctttgttgcagagattttaagtgttggaaatctagttgagagggaagtttt

SEQ ID NO: 26032 - DNA, 1619 bp, Glycine max
  Clone ID: PAT_MRT3847_123508C.1
gtaacataaaaaccaccgaagaaaacatcactgcgccgcgctgccacaccaaataaacacaaacatggacgcatcaaaactcaatcaattgaagcatttcatcgaacagtgcaagtccaacccttccctcctcgctgatccttcactctccttcttccgcgactatcttcaaagtctcggcgcgaaacttcctgagtctgcttattccgaatcgacgggcgtggagagggatgaggacatagaggatcttacggaggagcacgagaaggtagaagaagaagaagaagaagaggacgatgtaattattgaatccgatgttgagcttgagggtgaaacctgtgagcctgatgatgatcctccacagaagatgggagacccctctgtcgaggttactgaagagaatcgtgatgcatcgcagatggccaaaattaaagccatggatgctatttctgaaggtaagttggaggaggcgattgagaacttaacagaagctatttcactcaatcctacctctgccataatgtatggaactagagccagtgtttacatcaaaatgaagaaacccaatgctgcgatccgtgatgcaaatgctgctttggagattaatcctgattctgctaaaggatacaaatcacgtggcatagcacgagcaatgcttggtcaatgggaagaagctgcaaaggatcttcatgtggcttcaaagttagactatgacgaggaaataaatgctgtactaaaaaaggtggaaccaaatgctcacaagatagaggaacaccgtcggaaatatgaaaggctgcacaaagaaagagaggataaaaaaaaggagcgtgagaggcagcggcgccgtgctgaagctcaggctgcctatgagaaggctaagaagcaagagcaatcatcttccagtagaaatcctggaggcatgcctggtgggtttcctgggggcttcccaggggccgggggcatgccagggggcttcccaggggccgggggcatgcctgggggcttcccaggggctgggggcatgcctgggggattcccaggggctggtggcatgcctgggggattcccaggggctggtggcatgcctggaaacattgattttagcaaaatcttgagtgaccctgaactgatggcgtcatttggtgatccagagattatggctgctcttcaagatgttatgaagaaccctgctaattttgccaagcaccaatcaaatccaaaggtagctcctgtaattgcgaaaatgatgaccaaacttggaggtggtcccaagtgaatacttttagatgcttgtaagttatttgagacttcaactttccagccctctggcatcgggtatttaatgtttattgcatttttaatcttaccgaaattattaaactttttaccgtttgttagtcctgtttcttaggtgcccctatatagctcgtgttggtagtatgtttatttgtcaacaatgcaatgttattttcccgagtgaatttgaacgtttgaagtttatatttttgcgtttcaggaaaaatgaaataatagtttcttagctttgtccaaaaaaaaaaaaaaaaaaaaaaaaaaaaaaaaaaaaaaaaaaaaaaaaaaaaaaaaaaaaaaaaaaaaaa

SEQ ID NO: 26033 - DNA, 181 bp, Glycine max
  Clone ID: PAT_MRT3847_123509C.1
tcgtccacgcgttcgggcaccaaccttgaatggttttccttcttcttctctaagactaagagtcgaattggcctctcttcttcactcgaagcttaaacaagcacgcttttcggtttcggcggtctcgctttaaaaccctacctttcggcctggtatctggagagccttcgagtcacccaac

SEQ ID NO: 26034 - DNA, 850 bp, Glycine max
  unsure (1)..(850): unsure at all n locations
  Clone ID: PAT_MRT3847_12350C.1
aactgcgtccgtattttttggtcgtgattcatcacattcatggggtatgggaggcgttgcatttcttaatcctgagaaaagttttcagcacaacaccttatatgtgcctgtacaaaatttcgctagagcagttcaatgatattttgtttcaggaaaatggtttaagccttgatgcgggctctcctttatttgatataactactctgaatgctatctcttacaaggagttccactctctggaggttgtcaagggtgcttggtatggcaatgttgtctacttaggaaaggagctggatattccagtaattaccatgacgtgttctcttcttgatattgaacgtttcaaatctgggaagctaccattgcgtgcccctaataaagcgtatgcaaacaccttaataaaagggttggtagatggagaacagctttcagaggtggaagccatcgcttacatagaaggtgctgctaaatcattgtagtttgcataggcgtgccatttactttaggtgtaaaaatcttctagaacaacttactcgtacagaaaaagatttcccttgtagatattgagtaactaaaccttggagtattgcttatttctcgtagttttgtgtgccttgcgcagctacactttcatttgctacaatgctggtgcagcactgcatgtatattttgagtggtaacatttagttgtaactagaatatttaaggaacttgcctaaatgattgaattgctgctttatctaaaaaatttgcataggcgtgccaccccgtttaggtcctctagcccgctagaattccgtccggactgagggttccagtttcccannggancgntagactgggaancagg

SEQ ID NO: 26035 - DNA, 1914 bp, Glycine max
  Clone ID: PAT_MRT3847_123510C.1
gaaactcaattatacaaaaccctgaagaaagacacagccattgtttacttttcattgattgagccaaagctttgtattttctgcgataattttccattgggtggaagaaagtctcaacctttattcgaaagagcaaggatctgagttgagttgagtgatcatgtgtggtggtgcgattatctccgacttcataccggcaggtcccgccagcggggcgcggcgcgtgaccgccgacatcctgtggccgagtttgaggaagcgcttctcgaagccgctgctggacgatgatttcgaggctgggttcagagaattcaaggatgattcggaaatcgaggatgttgatgacgaggacgatgaagacgaggaggagttgaagaagaagccctttgggttctctcgctccagcaacaaggctgcttctaagcctctctctcgtggatcagcaactgtggaatcaaaggggcaagctgagaagtgtgccaagagaaagaggaagaaccagtatcgtggaatccgtcagcgtccatggggaaagtgggctgctgagatccgtgacccaagaaagggggttcgtgtttggcttggaactttcagcactgctgaagaagctgcaagagcttatgatgctgaagcaaggaggatccggggcaagaaagccaaggtgaatttcccggatgagccttcaggcgctgctgcttcctcaaaacgcctcaaggtgaatccagaggctcagccaatgaaggaaaatctgaacaccgtgaagccgaaaatgaaccagatgttcaattttggtcacaatctggagggctactacagcccaatagatcaggtggaacagaaaccactggttaaccagtatgttaaccctgccccgttccctggaaacggagttcaagtctcacctgttactccatctgctgatgttactgcttacttcagctctgagcattcgagcaactcgtttgattattctgaccttggatggggtgaacaagtccccaagacccccgagatctcatccttgctttctgctgctcctttggagggtgctgctgatcaggttcagaagaccaacaactcgcaggatgtggtggctgcacaagatgattctgcaaaaaccctttccgaagagcttgcagacattgaatcccagctcaagttctttgagaccccttcttttcttgatgaagcctgggctgatgctacattggcgtctttgctcggcggagacgcaactcatgacgccgccggaaaccctatgaacctttggagcttcgacgacctgccttccatggcaggagtcttctgaacaccctttatctccccttttatgtaaataaagctacaagaattgtgatcgtgatgttggtgatggagtccacagcaagaaacctgcttaaagcttatgtggagtttattttatcttgtagctaatgcagtagtataggactatatataggtttttattatagggtatccttttgtgaactcaaagacctcgttttcaggggattttctgtttgatgtccttaaggattatcaattatgttatatatggtcttggatacagtcttgactgctgatacagtttttttttaacttggttgttttcattttcattattattattatggcaatttgattatgactttgagaccagccatttctcaatgctctgtgtggtggcaatttgatattattctgctttctggtttggtgatttatggacgtggaaaacttttttttttttcttttctttctaaaccaatctttctgcaataattggctttgtttcagagttcaagtgctggaaatctaggtgtgagggaagaagtgttaaatcgatgatttatcatcattggatcgaatctgataagttcataaatcgttttccgaattacttttccagattct

SEQ ID NO: 26036 - DNA, 1689 bp, Glycine max
  Clone ID: PAT_MRT3847_123511C.1
ggtccggattcccgggtcgacccacgcgtccgattagtatcccccaaacacatatccaaccgaagctactagaagcccaatccgtcacgaaaagtctagaccctgtcgtgtaacataaaaaccaccgaagaaaacatcactgcgccgcgctgccacaccgaacaaacacaaacatggatgcatccaaactcaatcaattgaagcatttcatcgaacagtgcaagtccaacccttccctcctctccgatccttcactctccttcttccgcgactatctcgaaagtctcggggcgaaactccctgaatctgcttattccgaatcgacgggcgtggagagcgatgaggacatagaagatgttacggaggagcaagagaaggtagaagaagaagaagaagatgatgaaataattgaatccgatgttgagctcgagggtgaaacctgtcagtctgatgatgatcctccacagaagatgggagacccctctgtcgaggtcactgaagagaatcgcgacgcttcgcagatggccaaaattaaagccatggatgctatttctgaaggtaagttggaggaggcgattgagaacttaacagaagctattttactcaatcctacctctgccataatgtatggaactagagccagtgtttacatcaaaatgaagaaacccaatgctgcgatccgtgatgctaatgctgctttggagattaatcctgattctgctaaaggatacaagtcacgtggcgtagcacgagcaatgcttggtcaatgggaagaagctgcaaaggatcttcatgtggcttcaaagttagactatgatgaggaaataaatgctgtacttaaaaaggtggaaccaaatgctcacaagattgaggaacaccgtcggaagtatgaaaggctgcacaaagaaagagaggataaaaaaaaggagcgtgagaggcagcggcgccgtgctgaagctcaggctgcctatgagaaggccaagaagcaagagcaatcatcttccagtagaaatcctggaggtatgcctggtgggtttcctggtggcatgcctgggggcttcccaggggccgggggcatgcctgggggcttcccaggggccgggggtatgccgggaggcttcccaggggccgggggtatgcctgggggaggcttcccaggagctggtggcatgcctggaggggtgcctggaaacattgattttagcaaaatcttgagtgaccctgaactgatggcggcatttagtgatccggaggttatggctgctcttcaagatgttatgaagaaccctgctaattttgccaagcaccaatcaaatccaaaggtaggtcctgtaattgcgaaaatgatgaccaaacttggaggtggtcccaagtgaatacttttagatgcttataagttatatgagacttcaacattccagccctctggcatcgggtatttaatgtttattgcatttttaattttaacgaaattatttaactttttaccatttgttagtcctgtttcttaggtgccctattatagctcgtgctggtagccatgtttatttgtgaacaatgtaatgttattttcccgagtgaatttgaatgtttaaagttgatattttttgcatttcaggaaaaatgaaataatagtttcttagctttgtccaaaagaaaaaagcgcctaagaaaaaaaaaaaggggggc

SEQ ID NO: 26037 - DNA, 310 bp, Glycine max
  unsure (1)..(310): unsure at all n locations
  Clone ID: PAT_MRT3847_123512C.1
cgaananannacgcagcncncaccaaagaacagcaaagaangacngcaagncaaggnnaaagcagannncacncngngaanntgntnnaggaacnanaagaagnnacgtnacgaccaaccaccaagancagaagnggcgacgntgananaatangcacnaaganaacnnagagacgatgagatcanagaaaacngcgaaanagngagagncnangaannagacagganagangccgancacgacgaaagcaganagacagganaanaggancacaaggcngnngnganagacaacgacnnngagattagn

SEQ ID NO: 26038 - DNA, 425 bp, Glycine max
  Clone ID: PAT_MRT3847_123513C.1
ctttgccggttttaggccaccctggtggccggcagcgtgtaggccatacactccatccctcaaggtgccgtgatgtgcaacgttgatcaccacataagagaccgacgagttcttcacagacgcttgggcgactatgctataggaataaggtagaagcctgattactacaaatgtaggatcaagcttccttctgctgtgaagaagacagagccaagtgtgcgctgggcgctgagtgctctggtcgcaggaggcgggatgactgagaagactgtcatcaggctgataggcttaccatgcgatcagagtgatgaggagaatgatgcactatggtgcgaggtgtggagaagaacccagatcagcatgctaacggcggaggttatgatgactatattattgttatgagcaccgagaggcgtgacgctcct

SEQ ID NO: 26039 - DNA, 339 bp, Glycine max
  Clone ID: PAT_MRT3847_123514C.1
aagctgggacgcctcgcgggtcccggtcccgaattccccccacgccccacgcttccggtttaaactgactttcccacacggcactttccgaagtgttaaaagaacgcctccttttatagggggaggagctggtgcaaagaatgctcttcttatgaatatgccaaatgctcctttttcaatgtggagatattgtgctggacatctcatactttcaaggccctaagatgactgatgcgtacattaattgtgcagactctttctttatagcacttgaaaatcatgatgattacaccattaatatcgatgcctctcacgacaacctggttcatgatggagaga

SEQ ID NO: 26040 - DNA, 174 bp, Glycine max
  Clone ID: PAT_MRT3847_123515C.1
gcgttcatttatgtggtgatggtgcttgcacaaacgcgaggactatgtcatttaaaacgaatgcgggttgtgatgcatggaagagagactttttgcagcggtccggatgttagtgggatgtcatttgtgtcactgggtggactggcaccccaatgcaagatgttcaggttacaa

SEQ ID NO: 26041 - DNA, 1678 bp, Glycine max
  Clone ID: PAT_MRT3847_123516C.1
ttgaagggtaaggttatatatttgtgtgcgaagaaagaggtagttaaattgttctgcagaatgtttatcaatttcaaggcactgaggtaacagagggaagcaatttccattgtcataatgtagattccgagaggcacgtcaattgcatgtcccttattgtatgactaagttggaaacatgaagaatgtttttatctaacaattatttcgagaatacaacatttcttctattttgtatttcttttatttaaattttttccccaagttaaataaaagttttatgaagcaatggaaaacactgctacaaccatttggaggctgtccttcttactatgcttttcttcttttatgacttaaaatgaaatcatcatcatcgtcgctctcaacaattcttttcttggcttttatgtcaccatttttggatgtctgttgttgcttttgtgaagtttcagttttagtttccggctgccttgatgacttaaccggagttcctgtccttagctgcttctgtttcctctgcttcttctcaaatgctctcttagctctttctggagatagcagcccatgctccattaaccaaaattctgccatttcacttgttggtatctgttttgacaatgactcatagaaaaccctcaggggttctttctgttctggaggatcatgcttctgcccgggcagactgtagactttcttctctctcactttagtagttgtctttgttactgtttttgaagatgacgatgtcgatttcgatttaacctcagattttgtcacagttgaaacagatttcatctttgaatcagcggggagcttgcttgagctttccactttcttcctgacagctgaagaatcaatctttcccttggaagagccatctggggcacttgatttgagcttcacagtgctgcttttggtctctgtggccatacacgaatcttaacgcaaattatttgaatttagattagatctgattgacccttcctttggttttcggttacccttctcaattttcattcacagttgcactattccatcgcctatgagagttttttctttctctgtgaatttttttgctgtgttttgtaaagtgacccagacggcatcaagatcgcaatcaccgaaaattctaaaattggaatagatgtcacctgtcttagacaggtgtcatagattccttacagctgatgttttatgtaaaggcagattttttttagatctagtctcggtgcgaaggtgtttgttctccaggttagtaatcttcttttttgttgatagccattacaagatcatcatgagaatcagaaaaaagaaaaattaacccaactctccatgggggtcactctaaatattaggaagtaagtccttatgagatctacaagaagtaatttaaaatcattgatttttgattgaaaagaaaaagaaaaatctttacagtgatatcacaggatccaccaaaatattattaaagattataaatcttgatattctattagagatattctcacgtatagatgagatcagaagtgtgaagcagaagttaaaacaaacacagctctattcaaaacgggattagatccatgtggaccagacctgactctgaagatttttggcattagtttttggttaaaggtggggatcatcatttgtatgcttactcaaatgtcgttgccttcact

SEQ ID NO: 26042 - DNA, 757 bp, Glycine max
  Clone ID: PAT_MRT3847_123517C.1
agaggctaatgatccagctcagagaaagcagaagatgatgatctggagcagcaataccgtgatgatttgaaaaaagaacttcaaggtattacatgtacctcagcaggttctatagaaacatctactgaagtggtacagactggagaatcaactaccagtgttcatgaaaatgttgatcatgatgacatgggtaaacttatgttgtcacgtaaaaggagggggctagtgaaagccattgagaaatctagggaacggaataaagctcagactgatctcattaaacaacggaaaaagaaaattgatgaagagcaacggcaaaggagttgaagagatgccgcattcacaaggattccagcattgacttcattctgttttgtaaggccaaatgaaaagaaatcatttgttttggcactggatgtttttataacatctcagataagattaaactatggttagagactaggggtatttaaaatcgaattaaattatatattatattgtcaaagtgataatcttgtattttaaaatgagcagattacctgattgagttcggaaagtgtaatcgattttacaatcatcttcttttgttagggtccttttgatttaaagatatgaaagtgaattgggatgacaaaagaggaaatgtttaaattaaaataaagtgttgaggaatgagatttgtctttttttgaaacttaaatgtactcaagtgtaattaaatcaaatttattattaggggtgtaaaaagtttttggcc

SEQ ID NO: 26043 - DNA, 357 bp, Glycine max
  Clone ID: PAT_MRT3847_123518C.1
ggccatccaatggaaatggaaatttatagtttaatttgcagacataaattaatttttttttaacatcaattttttcaaaatcaattttaccaaagtttcaactccactgacttgggccacttttcgtaaattctaaattttagctacaaaaaaaaatcaaagtttttcttgtttcagaagcctattttaaatcaaaaattaccgctttttgtgaagaatattagggggacttgcattacagcatgcgttaattttttgcagagattatccatgggctggtaccaaacaacaatttcaccaaaacagttttttatcgcaaaattttacattacactttacaatttggcttaccgccct

SEQ ID NO: 26044 - DNA, 386 bp, Glycine max
  unsure (1)..(386): unsure at all n locations
  Clone ID: PAT_MRT3847_123519C.1
ggattctagaatacattataataataaagaaccttgtaaatactggggaacagtcactattttcntgtttgtagctctttacttgtttgggatttagatgatgacatcgtcatctgttacgcccgtgcaaaatttttatgtgtctcaagagaataacaatgacgtgaaagaacataatgaggctaatgaacacccaactgacccctctaataacaattctcagcaaattgaatataataaacgtgatctttcttaggatacaaccaaaagggatggttgtgtcacccctgctacaaactattacgtgacagaaaaacatgacaagaaatcatacgaaaaatctcaataaaaaccttcttgcgattcacccaaaaaaaattttattt

SEQ ID NO: 26045 - DNA, 397 bp, Glycine max
  Clone ID: PAT_MRT3847_12351C.1
tcgttcgcacccacgacccaaccttcagctactcagccacttcgctttaacccctgtcggaacagcttcaaaagcaggggtgacctgaatacttggaatccctaatgattccctacctgcaggtgtaaccttattcatgtgaaagattactactttctgtgctttcctctctctttgggcttctgggggttttcaaaatcgcgcttaaaacggtgacggctgacccgttttgagttgggcccacatgacgagcacggaggtgctgaacctgaacaccttgtcatttgggcaacatcaacttcctgccggtgaagagctgattgactactacctccgttctaagaggaacgggattggcgaggaaggctgggctatttgagagattgatgtcagcaaa

SEQ ID NO: 26046 - DNA, 257 bp, Glycine max
  Clone ID: PAT_MRT3847_123520C.1
agaattcacatagatacatacataacacaacgtatgctgcataacaacaatatacatacaaatgagcatgttgattatatagaacgtagaaggcaacactcatttttgtttaccatgggtaacgacaccatctctcatataagagcctatataacacatgctgacatgtatgataaacgaatggttcaaacaccatttactaacctaacagactacattcgtacaaagacctttacgccatggttttgttgaacacg

SEQ ID NO: 26047 - DNA, 233 bp, Glycine max
  Clone ID: PAT_MRT3847_123521C.1
gctaggaatgaggctcgaggagataccaataccgagcattattcgccctttcatagagaagctcctgcttttgtagagcatgaaaccggacagcagatacttgctacaggaatcaaagcagtagacctgcttgcaccatatcacagaggaggaaagattgggttgccaggaggagctggagcaagcaaaactgagctcattatggaacttatgaacaaagctgcaaaagctca

SEQ ID NO: 26048 - DNA, 897 bp, Glycine max
  unsure (1)..(897): unsure at all n locations
  Clone ID: PAT_MRT3847_123522C.1
gtgaagcggaaggacctcgccggagccctgcggttcctcaagtccctcgaatcggaacagccgctcgtaaacggcggttctccgtcgagcgagtcgactcggctccggttcggcgagttggagcggttcgggccgcagagggactgggaggttctggacacgtgtttgaatgctgatgacatgaaacttgtcgctaacgcttacaggttcctcagagataggggtttcttgcccaatttcggtaaatgcagaaacattgttttggagggaccgaggaaagtgacaccagatgtcttgagctcctctactggtttggaagtgactaaacttgctcctaagaagtggggtctttcagatggttcaagcattgttttggttgcttttcttggtggggtgtcctttcttatatcacaaggaattgacctcaggcccaaccttgcagtgatattaggtctagctgctgcagatgctatacttctgggtggtacctgcttagctcaaatctcaagttactggccaccatataggcgtcggattcttgttcatgaagctggacatctactaacagcttaccttatgggttgcccaattcggggggtgattntagacccaatagttgcaatgcaaatgggcatccaaggacagtaaatttgtattttttaggcagggactcagttttgggacgaaaaagttgcaaatgaccttgctgaaggccgacttgatggtacagcttctgacaggtactgcatggtgctttttgctggcattgcagctgaagctcttgtttactgtgaggcagaaggtggagaaaatgatggaaattctattagatgcatttgtcttgttcttgatcctccattgtctacagcttgaatgtcccatcaggcaagaaggggc

SEQ ID NO: 26049 - DNA, 321 bp, Glycine max
  Clone ID: PAT_MRT3847_123523C.1
aaagggaacaaggcctcatttttcatgaaacccccaaaaggggaaaacaacattgttcagggcccctccatgactaagtaataatccccagggtcttatttaataaaaattaagggcccacttaagggcttgttttgggagcttaatcatagcccaagggtttgggcatcttaaaagccccaccccctttgttgcttcccaggggggcacccctttggtctccaacctttccaatgtttttgtttccctccttttccagtttttttttttaaggtggtttggtttcaaatgataacctcccaaagtcctcaaaggggtccc

SEQ ID NO: 26050 - DNA, 479 bp, Glycine max
  unsure (1)..(479): unsure at all n locations
  Clone ID: PAT_MRT3847_123524C.1
ttaaagtagtagttctagcggatgactcgcttttttcaaatgggccttcattactaatgaaaaggtaacagagagaatatacgagctcgtgctatagcaaatgttattaatcgttcgttgatcaaggtccatctacttacgcgtatggacactattttttgttgggcactaataattcacactgactaacgcatgcattaatcctcaagagtgcacccccgattggtgacccgggcaatacgcactantaactgatatccttggatctcatgaaagaaacacttagatagttccatggtcctatgcatcactcttgcaacactcagagcctttaccataattactatcgccgagtgcgctttaccttctgactatagtaaatatgtgcatcttctagttttggatcgggattgtcatcgtcaaactctatccatttggcattttcttgcttgacccatcccacataatgtcctgaatca

SEQ ID NO: 26051 - DNA, 793 bp, Glycine max
  Clone ID: PAT_MRT3847_123525C.1
cacaggctgcgagaaggcttctgaagaagacacacgcagtagctagcgcccccttgtttgtaggtccgaggttaagggaaacatcggtgtggtgtggttttgattcgctgtgtccaatccaatccaatccattctctttccctcttcttctcatatcgttttaaaggtttcatcttttcttaattccagctagtctgacttagatatggcggtaaaaccaacagttgcattaagggctattcttgttggaggcatagcagcatttgctaaaatagcaggtgctatgaaagctgcaggtggtgcaaaaatgggcgcagctgcagctgccatgacagcagcagcaactgcagctgtggcagggtccaaacaagagcaaacagatgcttctcaacagtctccaaaataattatctgtattttttcttccagttttacactgtgtgttggtaagtttctgtagcctagttgaatattccaagtggaagaaagaggccatatgtgaattatagtcttgacacatggtgataacctcttcaaagtctttgtaataagattacactaaatttatacagttcctgaagttttagatggagctatggttggatttcatagacaaaactaaagtctcagccgattagtttgtgaattagattttgtaaatcttattttgctaagaaatgagttatctttgaagttatttgtggtgtttgaactttgaatattattgataagataatttgtcaaagtacaaaaaaaaaaaaaaaaaaaataatattttattatattttaatatt

SEQ ID NO: 26052 - DNA, 234 bp, Glycine max
  Clone ID: PAT_MRT3847_123526C.1
ctcggtgtcatgtgcagcagtggtatgtgatcgcgacgttgtgctagtactcggagatctagagaaagaggcatacagatggacggggtgcagacgaccactcattagaccgattttggtgacaccgaaacaacacattgatgggaccaagcgggtctcgactagagcgaagcatcacgacaagggtaaggggcatgagatgtcaattgagtgcatgagcaatgggaattataa

SEQ ID NO: 26053 - DNA, 134 bp, Glycine max
  unsure (1)..(134): unsure at all n locations
  Clone ID: PAT_MRT3847_123527C.1
gttgataaatgtcttggcttggcactggtganncancctccattcgccattaggaatgaggtctccttcaaagaattgctccataccatcaggaaagacttcattcctaaatggcgaatgagcggctggttgat

SEQ ID NO: 26054 - DNA, 559 bp, Glycine max
  Clone ID: PAT_MRT3847_123528C.1
gcacgaggcttaaacttttattttttaatttaattaaataatttcgtgtgattcatgtagtcgaatgagataagttttattgttgttgtaatttatttctgatcttatcctttaaagtgtgtttatttcacattttaaaaatttatttttgaaaatttaaacataagaatattaaaagctaccaaactcttttaagtaataacattttttgaagtaatatttccgtgaatgtgattcttaaaaattcaatgttatactttcaaacaaatgtccttatagcttgtttcattgtggtgttgaccgcagggcacagaaatgggcttgctaatctttacaaggatatggagccttttgaagaaaatgatgatatacaagttatgtggaaaatgattcaagttcaatcatcaactcctcaatggtactgcacccgtcaaaagggccaataggtgtttattggaaactatgtttgcaacccacttgaaattttaaaaccatcgtggcgagtggttctagatgaactagtctcacattagagcgtgcaaagtaagagtgactatgg

SEQ ID NO: 26055 - DNA, 292 bp, Glycine max
  unsure (1)..(292): unsure at all n locations
  Clone ID: PAT_MRT3847_123529C.1
gccgctgctcccgctggcctgnaggaccgtgcttggcttggtgacaggaacattgcccatcctcttcncctcctgctcacagacccatcacacacacccagngcgtctcaggatggagctctgatcgncacctggcncaagaggcaggctatntgctnactcatgcgcttcccgtccacnnggntctacacaaccagnctagaagcctctgtcacgagcccccaagtaagcggcttggcaaatccagccggattccagaatcacattctctgggcacccnctcttctcgncc

SEQ ID NO: 26056 - DNA, 2522 bp, Glycine max
  unsure (1)..(2522): unsure at all n locations
  Clone ID: PAT_MRT3847_12352C.1
atcgcatgaatctaactttgtcttaccagaatgcaagggttgcccctccctccaccaactctaacttgttcaaattatggtccctttatttcggtgactaccaaagcatgttcagtgttgatcaatacacatggccaaaactcattcaacacgcaactaatttaagagagctttctcaagatggcttgaagatgtattctatcggacatagatctatgtcatttataataaaactgtcatcctctctcatctctcttactctctcattcaccgaattgcaagggaatctatcgagtgacatcctctctttacccaatcttcaacaactagatttgagttttaataaggacctgggaggtgaacttccaaagtccaactggagtactccactaagcttcttgtgtctctctttcactgctttctcgggaaacattcccgattccattgcccatttggagtctcttaccacactatttctggagcgttgcaattttgatggactgattccctcatcattgtttaatctaactcaactcttcagtatagatctatcatttaataaattagttggccccattccatattggtgttattctttgccttccttgttagagttggatcttaacaacaaccacctcacggggtcaattggtgaattctcatcttattctttggaatacttgtcactctctaataacaaactgcaaggnaattttccaaatttaatatttganctccaaaatcttactcaattgagtttgtcatcaactgacttgagtggtcatctggactttcatcaattttcaaagttgaaaaatctaaattacctcgaactttctcacaatagttttctctctattaactttgatagtattgctgactatttcttatcccccaaccttgaatacttaaatttatcttcctgtaatattaatagtttccctaaattcatagcaccacttcaaaatcttatccgactagatgtttctcataacaacattcgtggaagcattccccagtggtttcatgagaagctcttgcactcctggaataacattactcatattgatctcagtttcaacaaattgcaaggagatctcccaattccacccaatggcattagatactttttagtctcaaataatgagctgaccgggaacattccttcagcaatatgcaatgcaagctccctctatatactcaacttggctcataacaacttgacaggccagattctgcaatgcctggcaacatttccttctcttttggcattggatttgcaaatgaacaacctttatggaaacataccttggaacttttctaagggaaatgcattggagactataaagttgaatggcaaccaattggatggaccattaccatggtctttggcccactgcacaaatctggaagttttggacctggcagacaataacataaaggatacatttccccattggctagaaagcctccaggagttacaggtactcagtttgcgatcaaataagtttcatggtgtcatcacttgtttcggtgccaaacatccatttctcaggctgagaatttttgatgtctcaaataacaattttagtgggtccttgccagcatcatacatcaagaactttcgaggaatgatgagtgtgaatgacaaccaaactggttcgaaatatatgggtaaccaatatttctataatgattcagtagtggttgtaatgaaaggtcaatacatggagctcgagaggatattaactatttttacaaccattgatttatcaaataatatgtttgaaggagaacttctgaaagtccttggcgaattgcattctctcaaagggcttaacctttcgcacaatgcaatcacgggtaccattccacgatcctttggtaatttaagaaatttggaatggttggacctctcgtggaaccagttgaaaggagagattcctgtgtctttgatcaatttgaattttctggctgtgttgaacctttcacaaaaccagtttgagggtatcatacctacaggtggacagtttaacacatttggaaatgattcctatgcgggaaatccaatgctatgtggattccctttgtcaaaatcctgcaataaggatgaagattggtcaccacattcaacatttcaccttgaagaatcaggatttggctggaaagctgtagcagtgggatatgcatgtgggtttctatttggaatgcttttgggatataatgctttcatgactgggaaaccacaatggctcgcgagacttgttgaaggtgtgcttaattaattaatgaagagtgaaaaggacaaatcatagggaaaggaaatagtttatccttagtttaatatggttctttggtgtgtgtctgtatgttttctgtaattttaacttatgtcctttgtgtaacaaatcacatctctcttgactcgagtgatgtatttcaagttgtttaaaaataagaaaaaaaattgatgatagtagatatcaaaatgagtggtcatcacatgtgatgatattggctcc

SEQ ID NO: 26057 - DNA, 339 bp, Glycine max
  Clone ID: PAT_MRT3847_123530C.1
ggctcgagctaattttccctccccgaattcggagccaaaaaaattgtggccgggcagtacttatccacgccagaaccagaaatcagcagaagaataatgcaaaaacaacacatggttccctcctcttttgttgttcttccacgtggcacagcctccatcatcttgattctgaattcacgaaccaccctctcttcctctccctcgcttattttacttcctctaacataatagccatctctcatttcacaaccctttggtttctggtgttggtcagaagacgaatgaaggagtgattgaatatgtggcacactactagccaatgctattgaaatttcattg

SEQ ID NO: 26058 - DNA, 1457 bp, Glycine max
  Clone ID: PAT_MRT3847_123531C.1
gataaattcaaaggcttgtttctctaaacattcgcagtggccggccaagagctttcgccttcgccaggcttgagagctaatgctgctattatccttccttggatgtctgagagttggttcattgtgctgtgaattgattattttgttttgtatttcatttaatttttataagttttgtatacaagtttttctcaccaattttttattttggcattttgtcacattgatccacgccaatgatgataaatccaaaggcttgtttctcaaaacattcgcagtggccgcctaagagctttcgccttcgccaggcttgagagcttgtgctgcttttatccttccttggatgtctgaggtcattatattatttctttgttgaccattttcgtctgtggttgattgatgctgtaagttagtagttttttttctttagtatgatttagttaaacatggttaaatgaaagagatgttgttatcacccacatcttttgtatgtaaattattaaactatgtagaaactgtatgatgagtgatacaattcctctcattatgtggaagcattgaattatcgtggatctattgaaaatattgagcttctgggtaccgaagctgcgaggttatacactcagacctgggatcgttgaatgagtctgtttcctcattacttccttatacgagttcgcttcccttgaacttggaaattattaactactttttttggttccctgtgacaaaaatatggctgtggagaggaaaagaagtcacaagagaattcaagcatccaggttaaaaaaatccatgactaaaaacgcataaaatttagtagcttgtccccttgatttgatgttgttacacttttttatacgatcgtttagccgtctttattctatcttttatgtccgtaagtttaagcgaagattatgttaatttgtaaattgtttttttagaaaactctattgattgctgataagaattagaagatttaattgtgtaatagttagtgttaatgagttgaaacggatcaacattctagttgtttacccgtttatgatgtacgatctccattttagtttgtataaattgtataatgagtaatacaattcctttcattaagccgaagcattgaataatcgtggatctattgaaaatacgtaattgaagttctgggtacagaagctgcgaggtaatacacttagacctgggatcgttgaatgagtctgtttcctcattgcttccttattcgagttcgcgtcccttgaactcggaaattattaactatttttttggttccttgtggcaaaaatatggccgtggaggggaagagaagtcagaagagaattcatgcatccaggctaaaaaacatccaagccaaaaaacggttaaaatttagtagtgtcgccaagtgattttctgacagttgtgtattttatgccatcgtttaaacgtgtgtattctatcag

SEQ ID NO: 26059 - DNA, 831 bp, Glycine max
  Clone ID: PAT_MRT3847_123532C.1
gggagagtcgagtttattccatgctgcctcattgtccaacaaagatgaaactgtaaagggacctagtggaaaatttatgcacaatgtaacttcagttttgtgttctaatgacactgaggcaaggaggacggaggcaaatgaaagctctggtaataagaaaattcttggtattcccatatttgatatggctcatatttctcctaagaaggaattttcttcaatcacttctctgtctgtgttgaatcctactccatccgatctagaagcagtgggaaataagaaaaaatggatatttgatattaacttgccttgtgatgctgctgttgttgagttggacaaagaagcattcactgaaactgctgttggtaagacaaggtctcctacaacagaagcagactctagaaatcaaattgatctgaacttgagtatgagtgagaaggatcttcgtcacaactatactcaagtgataatgtaaaaatgaaggcacaaatagatttggaagcccctgctcctcccgagacagaagaggatgctgttcttgaagaaaagctgcttgaaacttctctagcatcactgcaagtcccacaagacacagttgaactagcaaaggatgaacttatgacaaatgcagcagaggcaattgttgtcctgtcatctcttacctgtgatcaaggggatgattgtgtgatcagcaaaagtccatcagaaagtccaaaggtggacctgctaaattggtttgcagatgttgtttcctcatgcaaagataatgtgagggaaactgtgatgtttcaagggaaaaagatggcgaagacaacgaagggcattcctctg

SEQ ID NO: 26060 - DNA, 596 bp, Glycine max
  Clone ID: PAT_MRT3847_123533C.1
agaacaaacagagattgtagaaaatgcaatcatcaattgcgttctttcctcatatgtacgtatatggaggagttgtcagagtgcaatcacactcacacactaactttgttccaacaacaaactctgttccaaaaaccattacccccaaacccaaccactttacttcaactcaaatcaaatcaacttataggatcacactcagatgcaattctcaacctcaaccactgccaaacctttttgcatcaaaatcaccaagagtctccggttccaatgttgctccacttcggtgcggcatttcttcgaacgagtacagcgcaaatgaaggtaggagtgttggggaatggcttgtgctggccggtgaggtcctttcgacgggatttccattgtgggtcacaattgcgtctgttttggggttgatgaaaccaagttacttcaattgggtcactcccaagttgagcatcatgggtctcaacatcatcatgctgggtatgggtatgactctcactcttgatgatcttcgtggggttcttgctatgcctaaggaagtcctctctggttttctcatccagtattcggtgatgccactatctggattt

SEQ ID NO: 26061 - DNA, 570 bp, Glycine max
  Clone ID: PAT_MRT3847_123534C.1
gtctctgcttccacaacccttctccgaatagaagaagttcagagacaatgggtttcaacaaaagttaccttcttttcaccgtgtccctctcatttctcctcctatccacccatgccatcagcagcattattgctccttctccctccccattcccaacccacaccaacaccaaaaccaaaaccatagactccatcttcaagaaagccctctcaaaaacccaaaacatgttaaaatcacccaaccccaaggtcctagacttctgcaaatccacagagaacccaaccctctgcggcgataccattgccccattcttccaaggctccttcttcgaccccatcaaggcccttctgaacgaagttgaagccacgcataaccaaaccttgaaggtcgccgacgtcattgcaaacacactcaacgaccccaacaccaacagaaacgcacgtgagccactcgacatatgcaggtcacgatacaaaagcattgttagtaccatcaaagaggccgtggagttgctgaaccaacagaacgtagttgatgcttattacaagttcagctccgttatttcggacc

SEQ ID NO: 26062 - DNA, 773 bp, Glycine max
  Clone ID: PAT_MRT3847_123535C.1
cactgacgtgtgacgcgacgcgattgctcaaaagcaagggataaacaatagtacgaggcaccgcattgttgagacttgagacttgagttatggcacttgttgaagcctatgcttctctttcaatctcttctgttgctcgtcttttcactccaccaaaatgctctcccaccgctcactttcctcatcggaattttgttgcaactcgaccatcattcatcgttggttccccactcttgattcaaagaaatcatggaaggaaagctgcatgcaaagcaatccctgttccaataagatgtgagcaagtacccaacaagggaatggtctggatgtgtggctaggcagactagccatggttggctttgcagtagcgatcactgttgaaatttctactggaaagggactcctagagaacttcggagtcccaactccactgcctacagttgcccttgcagtaacagcactggtgggtgtcttgacagcagtttttatcttccaatcagcctcaaaaagctgattacatgtttaggctggttgtgattgttgtaaattcttaagctgggaagtttcaattttcaagataaaatttatctttttgtatcctgtaatatttgtttggtggaaagaaagaattgttattgaagcctgaaaaatcaaagtaacttcgtgttaaatatggtatgacctcacctttccatgttgccttcatccatgtcaaacgctacctttgtgaattatgttgtcctcattgcattagttgtgaatgaaagaggatt

SEQ ID NO: 26063 - DNA, 235 bp, Glycine max
  unsure (1)..(235): unsure at all n locations
  Clone ID: PAT_MRT3847_123536C.1
acgaggtttggcttcaattgggctagagaacactgaagctaaccgccaggcgtaccgtaccctccttgtgacagaacttttgaagtagcagaaaaggtctgggcagaggttttcttctaccttgctganaacaatgtcctttttgaaggtattcttcttaaacctagcatggttacacctggatctgagtccaangacaacgccactcctcagacagttgctgattacaccctca

SEQ ID NO: 26064 - DNA, 445 bp, Glycine max
  Clone ID: PAT_MRT3847_123537C.1
ggttgctgtaggagataagatattgaagtagtgctaagtgcctaacacctgcagtgaacaatggcctctgcatcagcatctcttctcaagtcttcacttgttcttgacaagctagtgggtgaagggacaaacacttcccaaccttctgctgcatcagttgtgagatgcaaccccaccaccccatcaggcctcacaatctccaaacccgtggcacgtgtcgttctcggatgccagagccctccaaaacactgccttgaagacatggggaggccgcccagagaatgtgaaggcggcacaagatgcacttcttttccgtgccaagtccaactcgctcgcccagcttgggaagtacaccggtgagggtgaatctgaggaagccaagaaggagttgttcgtcaaaggctactcctactaagatgtttgtagtgaatatgatacatgttag

SEQ ID NO: 26065 - DNA, 341 bp, Glycine max
  Clone ID: PAT_MRT3847_123538C.1
atttgatgaatggccaacatattcatttgaaggattcaccagatcttgttattgtggtaaagcttgttcccatggattcaatggtgttaactcaggttgtcaaactgttcgaacgaaacgaaccattaataaaacgaatattggagcgatcaaaagacggcattcgtttggtcacccggccagagcgatatttgctttgtttaatgactgattcaaactcatctgacgataaaaactgaccatgtaactgaccaagtaattgattactgttaaacattaacaaaatattgttcatttaaaaaaaaaaaaaaaaaaaaaaaaaaaaaaaaaaaaaaaaaaaa

SEQ ID NO: 26066 - DNA, 977 bp, Glycine max
  Clone ID: PAT_MRT3847_123539C.1
cccacgcgtacgcccgcgagagacgacagaaagggactgcaaagttgagaagtgaatacacaagcaaaattaaattaattaattaagctgaaagcaagagaaaatgaagatggaaattgaggaagttggcaactgcgaagcacttcccctgctttcactgaaccacgtgtcccttttgtgcagatcagtgtgggagtctatgaggttttatgaggatgtcttgggctttgttcccatcaaacgcccttcttctttcaagttcactggagcctggttttacaattatggtattggaatccacttgatcgagaatcccaacattgatgaatttgatacctgcgtggttgaagaaaggcctattaatcccaaggacaaccatatctcattccagtgtactgatgttgaacttgttaagaagaggttagaagagagggggatgaggtatgtgacagctgtggtggaggaaggaggaatccaggtggaccaggtgttcttccatgacccagatggttacatgattgagctctgcaactgtgagaatatcccaatcattcctatttcttcttgctctttcaagcctcgaggtcacagctttaagaaggctgctcccaacaagtgtggattcatggagaatgtgatgatggaaagcttgagcaccgacatgatcaatttctccttttaactaagctgcctattgttttttaaacaattggagaacaataacttcacttcctacctttcttttttgtttataagataaaaaaaaatgattggttgggggataaaaagattaatttttatctgtattgttattaattttgttaaaacctatagaaacttaagcctctatgtggtctataaatcttggtttgcaagggaatggtggaccaaggtaaatctgtattgttattgtatcatcatggtttgtttggaataaaagaaattgtgagttgctaagttgtaaaaaaaaaggaatt

SEQ ID NO: 26067 - DNA, 1455 bp, Glycine max
  Clone ID: PAT_MRT3847_12353C.1
gttatattgacctcagtttcaacaagttgcaaggagatctcccaattccacccaatggaattcactactttttagtctcaaataatgagctgaccgggaacattccttcagcaatgtgcaatgcaagctccctcaaaatactcaacttggctcataacaacttgacaggccccattccttcagcaatgtgcaatgcaagctccctctatatactcaacttggctcaaaacaacttgacaggccacattccacaatgtctcggaacatttccttctctttgggcattggatttgcaaaagaacaacctttacggaaacatacctgcgaacttttctaagggaaatgcattggagactataaagttgaatggcaaccaattggacggacaattacctcggtgtttggcccactgcacaaatctggaagtgttggacctggcagacaataacatagaggatacatttccccattggctagaaagcctccaggagttacaggtactcagtttgcgatcaaataagtttcatggtgtcatcacttgtttcggtgccaagcatccatttcccaggctcagaatttttgatttgtcaaataacaattttagtgggcccttgccagcatcatacatcaagaactttcaaggaatggttagtgtgaatgacaaccaaactggtttgaaatatatgggtaaccaatattcctataatgattcagtagtggttgtaatgaaaggtcaatacatgaagctcgagaggatattaactatttttacaaccattgatttatcaaataatatgtttgaaggagaacttctgaaagtccttggagaattgcattctctcaaagggcttaacctttcgcacaatgcaattactggtaccattccacgatcctttggtaatttaagaaatttggaatggttggacctctcgtggaaccagttgaaaggagagattcctctggctttgatcaatttgaattttctggctgtgttgaacctttcacaaaaccagtttgagggtatcatacctaaaggtggacagtttaatacatttggaaatgattcctatggtggaaatccaatgctatgtggattccctttgtcaaaatcctgctataaggatgaagattggccaccacattcaacatatcagcatgaagaatcaggatttggctggaaagctgtagccatgggatatgcatgtgggttggtatttggaatgcttttgggatataatgttttcatgactgggaaaccacaatggcttgggagacttgttgaaggtgtgcttaattaatgaagagtgaaaaggacaaatcataaggaaaggaaatagtttagtttaatatggttcttttgtgtgtgtctgtatgttttctgtaattttaacttctgtcctttgtgtaacaaatctcatctctcttgactcgagtgatgtatttcatgttgtttac

SEQ ID NO: 26068 - DNA, 1836 bp, Glycine max
  Clone ID: PAT_MRT3847_123540C.1
ggtacaactacaaaggttgctgtaggagataagatattgaagtagtgctaagtgcctaacacctgcagtgaacaatggcctctgcatcagcatctcttctcaagtcttcacttgttcttgacaagtctgagtgggtgaagggacaaacacttcgccaaccttctgctgcatcagttgtgagatgcaaccccaccaccccatcaggcctcaccatcagagctggttcctatgctgatgagctcgttaagaccgcgaaaacagtggcttcaccagggaggggtattttggccatggatgagtccaatgctacctgtgggaagcgtttggcttcaattgggctagagaacactgaagctaaccgccaggcataccgtaccctccttgtgacagttccaggacttggtcagtacatctctggtgccattctctttgaggaaactctctaccaatccacaactgatggcaggaagattgttgacgtgctcctcgagcaaaacattgttcccggtattaaagtcgacaagggtttggtaccccttgctggttccaacgatgagtcatggtgccaaggtcttgatggtcttgcctctcgctcggctgcatactaccagcaaggtgcccgtttcgccaaatggcgtactgttgtgagcatccccaacggtccctctgctctggcagttaaggaagcagcctggggtctggctcgctatgccgcaattgctcaggacaatggattggtcccaattgtggagccagagatcttgcttgatggggagcatggtattgacagaacttttgaagtagcaaaaaaggtctgggcagaggttttcttctaccttgctgagaacaatgtcctttttgagggtattcttcttaagcctagcatggttacacctggagctgagtccaaggacaaggccagtcctcagacagttgctgattacaccctcaagctccttcacaggagaattccccctgctgtccctggaattatgtttttgtctggtggacagtctgaggttgaagctaccctcaacttgaatgccatgaaccaatctccaaacccgtggcacgtgtcgttctcgtatgccagagccctccaaaacactgccttgaagacatggggaggccgcccagagaatgtgaaggcggcacaagatgcacttcttttccgtgccaagtccaactcgctcgcccagcttgggaagtacaccggtgagggtgaatctgaggaagccaagaaggagttgttcgtcaaaggctactcctactaagatgtttgtagtgaatatgatacatgttaggcagcagcaacaccagcagttgtagtaggtgttgacggaggatgaagtggaagaagactaatttgtctaaaatgtaatgtttttatagtcttggagactatttttgtttatggttacatgtacctttacagcttataaacctttttgctgtgagttgtgtacttgattgattatgtctcaatatataacaaacatggttgaatctcggcaatcaatgaaaaaacccattaaaaatgtgtggaaattgaaaaaacccgttaaatgatctgtgggaggaatatagcggcatgatccattgcactatttgctggttgaatttggtattgctgagaagctcttccaagacaattgtatgtcgtcgttatttatttgttatgacaatcactggtacatatatttttactacccaactcacacccaattaggacaagagtacaagacttgtgttggccttgtgtctgttgcattagtgaacccatatcgggtgaactgaaactgattaacgaagcactgaaggttcaacgttattatg

SEQ ID NO: 26069 - DNA, 263 bp, Glycine max
  Clone ID: PAT_MRT3847_123541C.1
gtgagagacagagatcgcagacacagagcagaatggcttctactcaatgtttcttgcaccaacatgctcttaacacccctgccagtgccagatcccatcatacgcatctggttagcaccaagcctaaccagcttgttgtgcaggcaccagaacaacaatacaccacaagatgatattgatgtcagccaatctctcgccggtagctcaactgtgctcatggtgctgctgctgttggctcccaagtcaactgctgatgcagctat

SEQ ID NO: 26070 - DNA, 3542 bp, Glycine max
  Clone ID: PAT_MRT3847_123542C.1
gcagtatcggtccggattcccgggtcgacccacgcgtccgacaaaggttgctgtaggagataagattgcagtagtgctaagtgctaacacctgcagtgaacaatggcctctgcatcagcatctctgctcaagtcttcacttgttcttgacaagtctgagtgggtgaagggacaaacccttcgccaaccttctgcatcagttgtgagatgcaaccccaccaccccatcaggcctcaccatcagagctggttcctatgctgatgagctcgttaagaccgcgaaaacagtggcttcaccagggaggggtattttggccatggatgagtccaatgctacctgtgggaagcgtttggcttcaattgggctagagaacactgaagctaaccgccaggcataccgtaccctcctcgtgacagttccaggccttggtcagtacatctctggtgccattctctttgaggaaacactctaccaatccacaactgatggcaggaagattgttgacgtgctgcttgagcaaaacattgttcctggtattaaagtcgacaagggtttggtgccccttgcaggttccaacgacgagtcatggtgccaaggtttggatggtctagcctctcgctcagctgcatactacgagcaaggtgcccgtttcgccaaatggcgtactgttgtgagcatccccaacggtccctctgctctggcagttaaggaagcagcctggggtctggctcgctatgctgcaattgctcaggacaatgggttggtcccaattgtggagccagagatcttgcttgatggggagcatggtattgatagaacttttgaagtagcccaaaaggtctgggcagaggttttcttctaccttgctgagaacaatgtcctttttgagggtattctccttaagcctagcatggttacacctggagccgagtccaaggacaaggccagtcctcagacagttgctgattacaccctcaagctccttcacaggagaattccccctgctgtccctggaattatgtttttgtctggtggacagtctgaggttgaagctaccctcaatttgaatgccatgaaccaatctccaaacccgtggcacgtgtcattctcgtatgccagagccctccaaaacactgccttgaagacatggggaggccgcccagagaacgtgaaggcagcacaagatgcactcgcattccgtgccaagtccaactcactcgctcagcttgggaagtacactggtgagggtgaatccgaggaagccaagaaggagttgttcgtcaaaagctactcctactaagatgtttgcagtgaatatgatacttgttaggcagcaacaccagcagttacagtaggtgttgacggacgatgaagtggaagactaatttgtctaaaatgtaatgtttttatagtcttggagactatttttgtttatggttaaatgcacctttacagcttaataaaccttttgctatgagttgtgtacttaaaaaaaaaaaaaaagcttgaattcaagctgcttcttcttccatgcacttctgaattgcactgacccgagctcccatgcctttgttagagataacaaatgcgcaactatccttccggtattcactgacaatcccaatgccacaccatcatgctaaaggaggagggtcttggatttccttccgcagccttagaattagaaacttgaatgtcattaaggctgttgccaccttggatgctaaacctcgcttggatttggatgcacctcacccgcctggctttttgctcgaattctccgacccacctgatgatagggagaagttgagaagattgagaatttccaaagctaataaaggaaacaccccctggaacaaaggacgaaagcacactcctggtactttttactcttttcttttcttttcttttcttctaattttcattttctctctttccatgtcacctccagagactttgcagaaaatcaaagaaagaacaaggctcgcaatgcagaatcctaaggtgatgtcatgtcaaaatgaagctcattaatcttgggcatgcacaaactacagaaacaagaaagaagattggtgttggagtgagaaggcgatgggaaaagaggcgtggaaagaaaatggtgcaggaatcttgctgcactgagtggcagaatttaattgcagaagcttctaggcaaggctatgttggtcaggaagagctgcagtggaattcttatgaaactgtgaatgaacagctgaagcaggactggttgatgagtgttgaacaaaggaaacaagtggcaaggacaccatctagcaaaagagcacccaagtcccctgaacagagaaggaaaattgcagaagccattgctgccaaatgggctgatcctgaataccgcgaaagagtttgttctgcattggccaagtatcatggcagtgaagttggagctgaaaggaaacctagaagaaggccaagtgatggtacccaacctaccaagaagaaacctgcaaaaaaaagagatattgatactagcgctcatgttaagaatgactccaagacccgtaagcctatcctgttgaaaaaaagcaaatccccagcctataaggatcctttggtgaattctaagcttgaaatgattaagaatattagagcacagagagttgccgcagaaaccacacaaactcaggccattgaacaagcaagagtattgattgctgaagctgagaaggctgccaaggcactcgaggttgctgcgacaaagagtcctattgcacagtcttctttgatagaaaccagaaagctaatagctgaagctattcaatcacttgaatccattgatacacaagctataactgaggaaaaaggatcagcatttgaagttctaaaccaatctcaaatggcccaagtaaatggacacacaatgttatcatcaagtgactacaagttctctgaagattttggcaaattttccttggagaagccagttaatggtgatgctgaacttctgctaaccaatggttgcacatccttaccttttagtttgaatagtcagatgaatgaatctagtccatcaaatcaacaaagggaagcagaacaggatcagagaagtgaatacgaaacagatccttctccaacagtgatgggaattcactcccttgaaaatcagacaatgtctgtagtaactaaaaagtgggttcgtggaaggctcgttgaagtggctgaagagaaacaataaaatgggtaaaaaagcttagctcagttttcaaacattaatacaaagcaatgtcatattgtttgttgcgttataaagatcataaatgcacgaatattttctgctttaatagtgtgatcattgcttgctcacccattcactccttgaaatcaagaggtgagttgtatcagccctgcaacagccaactacgtgtagtagacagatggaggaagactaaaatagatagctatcactaaggaaagaggggtggttcactggatacttgtacttgttttagtcatgttacattaaactgagttaatcgtataattattgttacattacagcgt

SEQ ID NO: 26071 - DNA, 261 bp, Glycine max
  Clone ID: PAT_MRT3847_123543C.1
ttgtgcattcatcaaatggactattgaatatgaaagggttggtgaggaagttgaccttaaagacctttttcttgagaaccttatcttggtgtgtcaaattgtggacgctcatcttctaaaggtattgctccaacacttatctcgggtttttcttgaaagagactacagatcatgttcttgttttgaagataatgtggttgatttttttattcatagtgtaattggctcgaaggatgcttatcaacttgacccattcttttg

SEQ ID NO: 26072 - DNA, 409 bp, Glycine max
  Clone ID: PAT_MRT3847_123544C.1
cttcattaaactttttattatcctgatctgctaggcccccatgggtggtttccaagttggggtggggttgggttgttaatgggactttataactggaagtcttttgtgtgatgctatctgatattgggacatggagagggttgcagagccgacggtactttctcgaaccttgcctatcctggttgaggtatctaactcgtgcacagttgctgctagagattccagtcagagactaaatcgccaggaggtttcgggtgttggtggatttctcttatagaagtgaatcaaatgtccagaacaagggatgttcttgttcctattacacattttgccttcctcatataagttggttcattaactaatgctctgatattatttttgcatgatgattcctaattttatgcttttt

SEQ ID NO: 26073 - DNA, 406 bp, Glycine max
  Clone ID: PAT_MRT3847_123545C.1
gaatacttctatcaggagtcctatgatggggaggttgttttcagggctctagaagagctttcactccgtcaactaccaaacctaaaaatgttatcaaggcagtatggggaaaacatgtttccacgtttttccatacttgaaattgatggctgtcctaaatttttgggagaggaagttttgctgcatcggttgcactctctctcggtaattagttgtggcaagttcaatttgtcagcaggttttaaatgcctgcagaaattgtggatttcagaatgcaaaggggtgaaaaatttgcaggctttgcaatatatgacttcccttaaggagataagattaaggaatcttcatgagctagaatccttacctgactgctttggcaacctttctttgcttcacacattgagta

SEQ ID NO: 26074 - DNA, 776 bp, Glycine max
  unsure (1)..(776): unsure at all n locations
  Clone ID: PAT_MRT3847_123546C.1
cagagagggaaacatttgagaagcaacatggttgggttataaagacaatggaaagagagccttcactggttagagatgagtatgcaccggtgatatttgtgcaagacactctctcttacctcgaatctattgatatgatgtccggggaggaggaccgagaaaatattttgagggctagggccactgggaaagctgttctcactagtccttttaggctgttggggtctcatcatcttggtgtggttttaacatttttcctgtttataaatctaagctccctccaaagccgacaatggaagagcgcattaaagcaactgcaggatatgttggaggatcctttgatgttgagtccctcgtggagaatttacttggtcaacttgctggtcaccaagcaattttggtgaacgtatatgatatcacaaattctactaaccccttaatcatgtatggcaaccaaaacgaagaaggtgatatgtctcttgtccatgaaagtaagcttgattttggagatccatacaggaaccatacaatgatatgtaggtatcaccagaaggcaccaacaaattggatagcacttaccacggcattcttattctttgggattcttttattagtgggttatattttatatggtgctggaaatcacattgtcaagtagaggatgattttcatcaaatggaggaattaaaagtccgagcagaagcagctgatgttgccaagtcacagtttctagctactgtctctcatganatcagaacacccatgaatggcattct

SEQ ID NO: 26075 - DNA, 496 bp, Glycine max
  unsure (1)..(496): unsure at all n locations
  Clone ID: PAT_MRT3847_123547C.1
atgggatagtatggtaatgacttgggtgtctgttagtgtggtctatacatgttttattgctgatttaatttcttctaattttcatagactgcgtaattggtattgaaattcctggaaaatattttaatagtaaatgtattttgtttctttaatgattttagacatgataactttctgcaaatccaaagttttcacccatgtgcaacatttgcattcttggctcatgcatcagctgacagatctgattatttgattctattttacaaaactgtcccaaccatctctctgcttattgatctgttctttgatttatgataactgttttcatttgctcttttttttttctttctttcntaatatggtaggttttccttatcttcaattaattgaggtcattggattgttctctgtatgagctgtgaaataatcattcagttttcctggtggtctgtgtgacctctgttattgggttgcttatatcttcattaacatttgg

SEQ ID NO: 26076 - DNA, 298 bp, Glycine max
  Clone ID: PAT_MRT3847_123548C.1
acatacaaacaacacttaattttaatttatttcaagacgtattattcattgaacagagggagaacccgattacccaattgcctatgttgaaggcggatctggctcaacagaacataccaaactgctgcttattactgcaattgtttaacattttccattcacttgttcaaaatcaacacgctggtactaattatatgagtcaagaacagagcaattaatactccgacgcataatggtagtatcagattcaaacgaggcaggtgcttaactaaagacgacaatatttacatgcaatcca

SEQ ID NO: 26077 - DNA, 388 bp, Glycine max
  Clone ID: PAT_MRT3847_123549C.1
acttggggcaacacaaacggctgtcgggatggatctcaccctagggatgtcccttgccgtaatttggggtccccagctattctggcccgccacctggtggggtaccacttgtacctcaatggtggcggatttaacctggagctaatcatggccataatatgtgtcttgaaagaaaagtgtatgccttatctattaccttggctcttgttagcgcaatctttacagagacaaccttgggcgccactatggtgggctgcttcatactgtatagtagccccgcaaacacctctttttcataactaagaccatagcaccctggtaatataaaggaccctccaaccgcctggggaacgtgacatcacaatatccgcccatggtgtgtattttt

SEQ ID NO: 26078 - DNA, 1608 bp, Glycine max
  Clone ID: PAT_MRT3847_12354C.1
caattatattacaaaatctcataatattaataatgtcttccgatatctgtggcattctccctcgtattctcatcgtttccaggcgaaccgttcgcaaaaacaagttcgttgatttcgttggagaataccaccttgaccttatagtaagctacatatgggttcccgcgattgtctctcgcattcccggcgtgcactcgtagcgcaatcgctttgaagccgttcatagtaacaatctctttgatttcgtaggtgagtatcaccttgatcataatgtaaaggatggcgaggtgaccgtgattgttcctcgtgtttccggggtgcacatgttgttggatagctttgagccaatccacggcgtgcttctgtgtgaaggagaagacattgatccttcttgttacgaacaagataccgcgaatgtttaagaagtgcttgtgaatgagaatgggctgcttcattcctgaatgacgcacagtgaggatgagatataccaggacatagggaaagagctttcaaaaaaatgtgatcaaagccagagcagtgatgcacatcaactatgatgattatgatggtcatagacatgcgggtaaactgcgtcaaaaacacccctttgtgtcattgttttcagggtgaagaggaagaaaaagaagaaggggaagaaatggagattttggtgaatagctatcaccatcaaggggttaagaagttggctgaacgttttatccctatggcctttgcttctgatggtttgattgaagggttttatgatcctgaatgttataatcctcaagatggcaaatttatcatgggattgcaatttcaccctgagcgtatgagaaagcctgattccgatgaatttgattaccctggatgccccttcgcctataaggaatttgtaaaggcagtgattgcttatcagaagaagctgaatagtttgacatctgtgccaaagcctctgaaacttaacaaggaaatggagagcaagaggaaaattatagtgcgtagcttctcacttgccaaaaacctatacaccatgggtcgcgggaattgctcctccaaagactctgaacttgaaattggagcagaatttttggagtcaaacacggcgttaagtgtgcaacaagagaatcggttaaagcaaatgggggcaacagttaggaatggagggtcatacgttgagagactgaagctgaatgaagtaagggaaaaaatggccaaaaatgtaatgggaaagatgtcagtggagcaattgtctgatctgctctctttctaccgcaccatggaccagatttgctctcaagtattggaaagaaagctacatgacgttgtcaatgacttcacttcatgacttggacttatattttgtttttaatttggtgtcttttaccatgccactcacatgaatcttgtgtgctgtgcctccttgattccctctgtacatgtttaatatcaaccttttccctcttcatgaaagtgatgttaatctctcttgcttgggctaggattaatattatatattgagaaaaaaaaatatgcattcacattgaagtgaaaaaagttttatatactcttgtatattcttataacaaaatcagacagtctttatggttg

SEQ ID NO: 26079 - DNA, 481 bp, Glycine max
  Clone ID: PAT_MRT3847_123550C.1
aagaaagtagatatggaggtcataatgattctgctttgcaccacactagcatgtgtttttgtgggtttgcaactctaccatgtgaaaagaaatcctgacatgcttcccttaatctcctttgtcatgtcattgattttgactttgggaaatatggtacctcttgttctgaattttgaatccctttttgcacaaaatcatgacaagaaaagaattttgcttggaagtgaatggcttgaagtgaatgaaattgctgtaaggctaattgtaatggtggctttcttgttgcaattccgtctcttgcagctaacttggtcagcatgaaaggtttatacaaaacaaaaggacctttggattgctgagaagaaggttgtgtatgtgattttaaccctatatgcagcaggtttcttgattgcattgcttgtacaccaaagcaataccttgcagggcgatgtggtgtattcatttagcctttcaaacaaca

SEQ ID NO: 26080 - DNA, 920 bp, Glycine max
  Clone ID: PAT_MRT3847_123551C.1
tcttggggggtagatagagcgagaaagtgaaaaacgaaaacgtaaacgaccccgttttagagagagaaagtgaactatataaaaatttctactttttcttttttatgctgtttttggtgacttgggatgtttgaatagagttttaaaaacataaacttggaggcgattttgttggggtgtgcgtgtcaattttctcaggaaattttgtttgcgtctgttgtaagttacttactttctttctttcttttttctaatttttgtttgatgggtttctttggatgaacttcaaacggtggccagcttctcagtgaagcaaaggtttgaaagaggggaacatgctacatgggtgagcaccatatatgaaaaaagatttggtttttaatgttttttgaagatggggtggcagtgcatgattgattttggatgaaagtgtttgttaaatgttattaaaagaaaattttggttatatatatatatttttttccttttactttggaagtgttgtttacgttggaaggaaaattcaagggaggtggatttgttgttggatttaaagagttttttttctcctaattctaggtaggtattgtaatgagggacttggttatagtttaaggtttgcagcatgagttacagagaaaggaacaaagggaagggagaagagaaggaatatgagaacagtactactgtgggattggattcaaaatcagtgagtcacaacaatggttcaatagaagaggagctgctaacaattgatgagaatcttctgattgaccccaaactgttgtttattgggtcaaaaattggagagggagctcatgggagggtttatgaaggaaggtcagtgtggcaaagccttgaatgtattgcctgacttaaatttttcaatttttttatattaatttatttatttatttatt

SEQ ID NO: 26081 - DNA, 311 bp, Glycine max
  unsure (1)..(311): unsure at all n locations
  Clone ID: PAT_MRT3847_123552C.1
acgcgttgagtctctttgtaatccctttcatgtcatgcctctgtggtgctttcaattcatcgcgttgataacctntggcaacgacttgcaacggtgtgggtggcgaaggaagattggcctccctcgactttgattacccatcctaactccagctaggcccttgtgtggcctgtgtgacatatgtgagcactcttatcaaccaggactcttaatcagtaaccttctctgtcagtactcaagttgccatggagtccacttgaagctttgtgcctcaacttgagaacctacacgtagtacatgttctgttgcca

SEQ ID NO: 26082 - DNA, 1387 bp, Glycine max
  Clone ID: PAT_MRT3847_123553C.1
ggggaaagatcccgattgggagcgaagaaagatggagtccccaatctcaatctgcgacactgagatccctcttctaatgcagagcatcgatgctttcaccgcttcttacgtcaaatccctccattccctcagagccagagcgcaagaaaccgctcgatgtcaagttcaactagacgaggttaaatctaaactcagagagaccgaggatgatttcgtcaaagcacttgcggtcaagacccgcaaagaggccaagcgaatggctttgatggatgctattgcttctgcaaaggctagagttgaagacctcaatgcatctattcaggagcagcgaaccaaaaagcaagaatatgctgcatttatatctcaacaatctctcgctttggcagcatctgaagggaagttaaatgaaagcattgaacagaatgatgaaacacaggccatttcctggtacaatagggtccttggttttcatgtaaaaggcggacgtggggtaaaattcacattcaagaatataaatatgaacaatctagatgaggagtacttttttactatcttccatgaaaatgatacatactcattgttaagctgtgaacattccctcagggacaccaaagagttgatccatgaattaaacaagacaaatgatctatttaaatttgtcagaataatgaggaaaaagttccaagaagttgtggcacaagggaatttagttgtgacaaaagatgaacatgaagaatctgcctttaactctgcttctgctccagttttatcaatgtcatctgttagaagtgattttctaggcaaggaaaatgagcatcaagctgaacctatagaaggcaataaacagttcaaaaaacaaaatgttcatagaaggctaaaatcatcagttttatctcctggatctgcatcatctgttcgccagtctcctcgtttgaaggctaggaaataaagtcgaggggaggatgctagccacctcatttgttgatacaagctgaggtctctgaagtgctcctgtagggataactcatgactcaggtcgctaagagctaacaaattgacacaattccagacatttctgcattctagttctagatgtctgaatctgtacatattgatcagatgatctccacaaaatgggtgaaacatgaaactaaattgggagacaggaaatttgttgtaagttctaaaaaatcttgtattgtctatggctatttaaattgtttgccttgttgctaaattagtcaaaattactcaattaaataaacattagtcattatgatgttgacatcttttattagcaatgtaagtgaagcaatgtattagaatggttcttcctgatcttttattttttttccttgtgttaacaaatttcaatttaaccaaaaaa

SEQ ID NO: 26083 - DNA, 401 bp, Glycine max
  Clone ID: PAT_MRT3847_123554C.1
acggctgcgagaagactacagaaggggaccacttcaaaacactcataacacaaatcacaggggagagctcatcctggagttaaaaaatggcttcagtttcttccatggctctctcatccccatccttggctggcaaggccgtgaaacttgtcccatcatccccagatgtgggaagggtgagcatgaggaataccgtcaccaagcatgtcttctcaggaagcccatggtacggcccaaaccgagtcaaggtcttgggcccattctttggcgagcccccgtcctacctaaccggggagttcccaggcgactacggttgggacacttgctgtgcttttctcaaacccatatacctttcccaataaccgtgaactctgaatgatccacttccagggggccattct

SEQ ID NO: 26084 - DNA, 324 bp, Glycine max
  Clone ID: PAT_MRT3847_123555C.1
gcgtccgaacacgagtccgaccgctgctacatgacacaacgagacaacaatagcaagtggtagagatgactttgaagaacagcatggtggtgcttaaagtgtgtatgatgcttcatttccttgtgggggttacaacggcacgcatggaactgagcttcttcaacagtggttagtcatcaagttaggatgaaaactagtattcaaaaccatgctgtgatcgctgacatgtgcacacgcgcaatgtcacctcaatgcagactcaagggatattacgactaattgactgcactcagattgtatgagcgctatgtacacacgctcaga

SEQ ID NO: 26085 - DNA, 295 bp, Glycine max
  Clone ID: PAT_MRT3847_123556C.1
ggaaaaggaaaaacagagaaaaaggaagggacacatttgacatttcacgaccgcgttcttttctacggagcctcgaccaagaagaatcgcagagagaagagggtcagagtgagaaagagagagagagagagagaaactgagagaaattcgcaaaccctaatttcggaaagatcggcgatggctgcctccaaggatcgcgagaacttcgtctacatcgccaagctcgccgaacaggccgagcgatacgaagagatggtggaatcaatgaagaacgttgcgaaagctcgacgtgaac

SEQ ID NO: 26086 - DNA, 652 bp, Glycine max
  unsure (1)..(652): unsure at all n locations
  Clone ID: PAT_MRT3847_123557C.1
attagaagattttgctggnnnnngctnnaactcatgggaccacatgggtagattgtctcttctcaatggaaactggaaagccagcctggccatagtatttttcacaagcaatattataatttttagataaatattgttgtcataaacacaggttattacgtcagagagaattatagaagattaaaaaaaaacatcccaaaaggagaaaaaacaaaaaataaaatcgggtaagctacaattcacaatttggagttttaatacacttaaattttctactggtactagaatacttcaaaattcagaacaagaaaagttcatggggacaattatagatctccaaacggaggaaatgcagagcaactgaaccatcatttgacttttgtcaaactaactgcaccatactacacagaattcataagaaaaagagaagagttcaaagaaaaagaataaaacacataattcataattgtttaacttaattattatataacaaagtttcagaacccagaaaacatgaatttgaaagcttgttaagggcaaggtatatttgatttctattttagnaaactatttttagntnnnttaaaaattnnncgcctatgccatattgacatgcnnntaccttactacacgaaatacannnnnnnatgat

SEQ ID NO: 26087 - DNA, 167 bp, Glycine max
  Clone ID: PAT_MRT3847_123558C.1
tttttgttaattaatttaaaaaaatattgtggggtgcgcctttattcagggggccatatgaacatgacacagtaacggactgctactataaacagcatcaccagcgaggaatgactgatatgaatccggcttaacaaaacctttaaaacttgcacgataaaaacacc

SEQ ID NO: 26088 - DNA, 328 bp, Glycine max
  Clone ID: PAT_MRT3847_123559C.1
ataaagtaattttggatcggactttttataccttccatctttccttaaagtgaaatcattagacgttggtgtaaaaagggagatacgttgctaaacgtggggaattgttattaacagggaaaacagcaaaacctccgagccgcaaaaaaaaaaagcaaggagggcgtgcccaatgagggaactcacacaaaataaaagaggggcggccaatgggggccgcccaagaagaaaaccacttgcgccagatgaatgaatgaaacccccaacggacagggaaaggaggcttgtggcttgagagccacggtggtttctttatttcccgggcggg

SEQ ID NO: 26089 - DNA, 273 bp, Glycine max
  Clone ID: PAT_MRT3847_12355C.1
accactcctacatccccacatactgccacccaaccacacaggtgacatgagaccacataaccaccgtctttccatatacataccatataaaacaaacattctctaaacctttatcactatatccctatctttaccttataaattttcgatttaatttctctacgactccgggtcgacctcctatcactttgggtccctaaacccaaaacacaccccccctattaaccacttctttcactaaaaaaccctgactaaccccattttacttccttg

SEQ ID NO: 26090 - DNA, 1063 bp, Glycine max
  Clone ID: PAT_MRT3847_123560C.1
aaaattccctccgaggggccttgtcacattttccactgcccatgtcccttagaacatggaggaaattatggcatttcccaatcttaaactcactctctctttctccctctcacctctcacaccataaaagccctcatggaacaacaacaagcacttactacttcctagtccttcaagcaacaatcccaagtgagcaaactcagcatgctacactcaagtaaataaacaagaccacctcaatcattgtggtcgaatccaaccaaatcaaagccaaatactttgcccttcttgctcactcaccacgacccttttgcatgttttaaggagaaagattctcatctttagaaagaaaagacaacaagaagcttgaaagagtttataaagagatatggagattgagtcagtgaaatgcgagtgttgtggcttgaaggaggattgcacccaagactacataagcgaagtgaagtccaagtttgatgggaaatggttatgtgggttgtgctcagaagcggtgagagatgaagtgagccatggagggaagaaggcatcatcagctatggatgaagctgtgaaggctcacatgtcattctgccgcaagttcaaatccaaccctgcagttagagttgctgaagggatgagacagatgctaaggagaaggtctgacttgtcatcatcatcatcatcatcatctccatcttcatcaaagaagtacacaaggtcaaccagcacttctcaagtcggggattcttcaagtttccatttgtagtagcaatgagagaaacagaggatggaaacagggcagaggcagaggagactctgctttggttggaataaaaaaagttgataggtttagacttttgggtttagtttttttcttcttcttgttatgtacaggaagtcttatttcagttttttttctttctgttttctttttctccaactgatctctagtttggtatctctaatcctctttgttatctctttgtttactttcttggctaaatagagacctagttttcaagaaaaaataaaaaagatgatcttaatcaaaaaaaaaaaaaaa

SEQ ID NO: 26091 - DNA, 587 bp, Glycine max
  Clone ID: PAT_MRT3847_123561C.1
gacggactcggaattcagctcgagtagctctaaaaaaagtttggttgcaatctactgattatgttgaaagcatagttttccttattgtaactgagctcctccgcaatgattggcttatctgaatttatgtgactgtcaattggcaatctaggtacacgtgtatggatttgcaaaacattgcagtgatgttgaaacttcaaagaatgtcaagggaaattctacagaagtctaaagacacaggggttctatggaaaatagatttaaggctcagtcaaccagaaaatttcaagacattatatgttgtgttttttgtggactatttcaaaagtttcaaatcctgcattgagtagtttagcttttctcaaagggtatatatatctgcatgagataagatgggttaaactagatagcgagacaaaggtgttgtgcacataaaattgggccaaatggttgattgtagcacaaattgtctgcacatccaaaagagggaatgttggaatatttaccgaaatgttttaattttttgtggttttcgcttttaaaagaaaaaaaaaaaaaaaaaaaaaaaaaaaaaaaacccacaaaaa

SEQ ID NO: 26092 - DNA, 500 bp, Glycine max
  Clone ID: PAT_MRT3847_123562C.1
aattgaaagcaatggggtacgaagtttttatatccataattgaaagcaagcattgaacctattcaccattgcaatacatctcacctttttctaagatgaaaatattcaaacactcagaaatgaaatgatatgttgcccattcctggaacccgtattcatagaaataaaataattaataaccaacagagaatttgaccatgacaactcctgtaaggaactcctatcagttaccactctgatgttgtgcctccccacaacaatctctagtctcctctaaggctcttggccccatcttctacccaagccctggtcatggcaaaggctgtgtttgacctctagttcatattgtaaatgagcaatttccttctttttaacttctgtttgttcccaaagcttgcatatcctctccttacatgatattctattttgttattcaaaaggttcagtacataatcctcaaccccagaccttaatcttgagaacacttccatgtatgattc

SEQ ID NO: 26093 - DNA, 200 bp, Glycine max
  Clone ID: PAT_MRT3847_123563C.1
acgtcaactctcttgctactctcttacacttctttcacgatttttccaactacctcccggggagggttattactaaagggggtgacataatgcacacatttaatacataaactcagcacattattcccaactgtcatctaaagcctttccaatcacactgtcatacccctcatgattgattaacccctccacaaacatac

SEQ ID NO: 26094 - DNA, 323 bp, Glycine max
  Clone ID: PAT_MRT3847_123564C.1
attccacacaatttacctctattatttctgaccctcctgacccactttgcttctcttacgaaaaaccatagttatatttcttgatacccattcggcttgatgatacacgaagtgcctggatcttatatgctctgatgtgcaaaggtttgaacaaaacagagacctgtgtctggatctgcccttgctatacaggttctatgacgccacccaacgactaaataacgacgacccagatcacgaagctgatcccactgatgccccgcagcgtcgaagactaatcttggagagacccctcgactcagggcatggtggagaaccactgg

SEQ ID NO: 26095 - DNA, 710 bp, Glycine max
  Clone ID: PAT_MRT3847_123565C.1
caaagaatctttaatttaattaaaaatctcttcaagatagagcagagttttacagtgttccttatgtcctattatacagttactaattagccttcactcctcatgtacacacacgtacacacacgtgtacacacacacacacacacacacacacacacttcctacatgcaggcaatgaagggaattatttgtgatacaacagtacacaattaatcacagtagcagctggggtagcccacagcagctgtagacagagacctcccaggcaggaaggcagcagcatcgtcacagttcgtcacttttccagtctctgcttctcgccctgtcctacctgtcctaggccagataaaagtctgctatatgcttccctttgtgcaatatttctgccgaggccccatttgagctctgaatccttcagagactgagtgagggtaggaatcaattggatgacaacgtgctgattcagcgttgctactgtctctaggatgctgtatacttgataactgtattgcataccatagtcctggatgaactgcctaaacagagaagtcagctgggtggcaggtcctccttccgaccccacttggcaggtttgtaccatgcactgcaggttctctgtggccagctttttaacttggggttcatttaccaacaccaaacatttcaggatgccaggaaggagcagctcaaggtcacaggcacccatttcg

SEQ ID NO: 26096 - DNA, 595 bp, Glycine max
  Clone ID: PAT_MRT3847_123566C.1
gctcagcaaaaataacatattatattaaagatgagtaccagaggtactagaaaatacaataggaaacccaatgtacagatatatcgggacaaacaagatacagcagctagaatagcccaaactactgagaaagaccagggccttaaactattctcaaatggctgtcctaagaaaaacatctttgagattggaggaccattgattgaaatgtaaagagaaattttcttcaaaacatctgagccatgaccataacatgaacactgcatcatccattaatttctggccatcaaagaccgcattggagaaaataatattgttcctctgcttccaaatcgagtaagtgagagcaaaccaccaccactgccatctttttccttgcatccctgcaggaactacacaaatatgctgcataaaatggctgatctgggccagtaaaaatggcttccaaccggaaaagtggcattgctatttgagacaaactgagtgtcattgtggcactccaatctccatgccacaatgatgaaacacttggcaacaaacaatggtggcacacaatagcagacagactattaactactttgtactggattaccta

SEQ ID NO: 26097 - DNA, 789 bp, Glycine max
  Clone ID: PAT_MRT3847_123567C.1
ccacgcgtccgcaatcatgtggcaaattccttcatgaagaaatcagctgctgattctaaagacttcagaaatcatccccaacctaatggttctagcatgaaaaatgaacaagatttacccttgccacttcaagatcaccagttgcaacgtgctgaactgggatcctcagatgttcttgagtcagagctggtggcaaatcctccagcattagatgaggaagagcaatatatagagagtgacgatgagcttccttcttattctgacgtagaggcaatggtacttgatatggacctggatcctcatgatcaccaggattcttattataatgaggaagtatcaagatatcaacatgtggaaagtaagagagctatcatgaggctggaacaaggttcccattcttgtattcaaagagccattgattcacatggagcatttgccattttgtacagtcgccactcaaagcattatattaagaaacccgaggttttacttggacgagcaactgaaagtgttcctgtggacattgacttgggcaaaggagggcatggcaatgcaatatctcgacgtcaggcaattataaagatggctaaagatcccacattctacatcaaaaactttggcaccacatcaatcctttcaaatgccactcaaagcatcacattaacagtctcgaggtctgcattcgaattgtcactgaatgtgccatctcatgccttcgttataatagcctgacgtcgagatattgcattgccatctggatattgtcctcgtgccgaatcggcacgaggc

SEQ ID NO: 26098 - DNA, 1265 bp, Glycine max
  Clone ID: PAT_MRT3847_123568C.1
atatcctctgactcagttgagttgagtattccttcctctgctcacaagtcataaatcccattttcagtgttcccactcaccatgccttctctcatcgccattgtgaccctcatagccgttgttctgacttccaccgaggcgaggatcccgggcgcctacagcggcggcgcgtgggagaccgcgcacgccacgttctacggcggcagcgacgcgtcggggacaatgggcggcgcgtgcgggtacgggaacctgtacagccagggctacggcgtgaacacggcggcgctgagcacggcgctgttcaacaacgggctgagctgcggtgcctgcttcgagataaagtgcgccaacgaccccagctggtgccacgctggcagcccctccatcttcgtaaccgccacaaacttctgccccccaaactacgctcttccgaacgacaatggaggatggtgcaaccctcctcggcctcacttcgacctggccatgcccatgttcctcaaaatcgctcagtaccgcgccggaatcgtccccgtcgcctatcgccgggtgccatgcagaaagcacggagggataaggttcacgataaacggattccgttacttcaacctggtgctgattagcaacgtagcgggtgcgggtgatatcgtgcgcacgtacgtgaagggcacccgaaccgggtggatgccaatgagccgtaactggggtcagaactggcagtcaaacgcggttttggtgggccaggccctgtccttccgcgtcaccggcagcgaccgccgcacctcaacctcgtggaacatcgctccacccaattggcaattcggtcaaactttcaccggaaagaatttccgggtctgaaaaaaaccctaatcataatcatcacccatgtcatcaacatcaatgacatacttatatatattttttatcatgatcctttttgttttggttcccgccatttatttacttattactagacatggtcgtttgactggatagtgagtgacaactttttaattgtgacttagatgttgttgggttttactttttctgattgggtgggtttgataattatacttggggtgcgtgaagttgtagtattttgaatttctagggaacgctgaagtggcttaagtaaaatggtagcccgcagctaatttgtactttttattgtagaatcatcatggtgttatatatatatatatatatatatatatatatattaatattccaattgaatttaagcatttaactacattattgttctcttt

SEQ ID NO: 26099 - DNA, 182 bp, Glycine max
  Clone ID: PAT_MRT3847_123569C.1
ccagggggcatcactaaaaggctaattggctaaaataatcttcatatgcgataaaggacatatccgggattgtaagatttcagggatccaagagggaccgctaactagtcccacttttaaaacacaatacccttgaattaaaatcacagggttttttttattaaaatatatatatatatccc

SEQ ID NO: 26100 - DNA, 1233 bp, Glycine max
  unsure (1)..(1233): unsure at all n locations
  Clone ID: PAT_MRT3847_12356C.1
gagacttgttgcattcaaacatttccaaccactccaacaagttgaggtgaatgtgtgactatcatcctcttcccctaatctcttagattttcgtgggatttgtggtagccatgaatgggttttggttttgaaccctaaccctccaagctttgagagccttgtaagaaattatgcatgaaacccactaagttttggtagttctgaatgtttagtacttgtttaggatcattgaaatgaggttaggatgggtgggtacaccattgatggccttctaatttgtgaaaaccttgttcaaattcctttctggatgtgtcattcccatgacatctaccacgagcaggccatggtagaatctgactttaaatttgagtctttctggggtgtgccatgtctatggtgtttaccacagactggttgtggtacatcttgattgtgtagttttgtcagtttctcacttttctttgcattttcaaggttcttaacttcttattacttccatgattaacaagggagggattgaatatgtgtcttgatgaattataaagtgtccttcatcgagtttcatgcatgtagggttccttgctaggattgggatccctggaactaagaatgttaatgtcttttcttacctatcacatgagtaatctaaaatgttgtagacattatatgtgtagtaagtgttaatgatgaatgtaggaggttccatatgaatatgtcagtaataaatgaaacatatgtgtgtatacttgtgaaaaggaaagttaaagactaaggcccctcagaccgaagggggatataagtaagaggttgaatgctttctttaaatgataggcagggttccgtcacttcctagcatttaaggcaaagcaaagcccctcggactaaaggggaatataaatacgaggtcatgacataagatcaagggagatgctccttgaaagtttgggctcaatacttgccataagnggaaaaagacaaagaaagaaataaagtaattcatgcaaaggttgatgtttaaggttatgtttatgctttngcaagtgttgaactaangctatatctttatgntacatcctgngtcncataggtacattgtttcatgtttnggactcattaagnccttgtctcattngtttngtttccncgttccngattgaacangctatggagaatactcttggccatgaatatgttgtactttgtgtattagtnnnttttatcttattacttttg

SEQ ID NO: 26101 - DNA, 1291 bp, Glycine max
  Clone ID: PAT_MRT3847_123570C.1
acgtaagctcggagttcggctctaggctgagttgagttccgtgttctcgctcagcatggctttggttaacctttcttacatcggcattgtgacccttataacccttctggcttccaccgaggccagggtcccgggcgtgtacagcggcggcgcgtgggagaccgcgcacgccacgttctacggcggcagcgacgcgtcggggacaatgggcggcgcgtgcgggtacgggaacctgtacagccaggggtacggcgtgaacacggcggcgctgagcacggcgctgttcaacaacgggctgagctgcggtgcctgcttcgagataaagtgcgcgaacgaccccagctggtgccacgctggcagcccctccatattcgtaaccgccacaaacttctgccccccaaactacgcccttccgaacgacaatggagggtggtgcaatcctccccggccccacttcgacctggccatgcccatgtttctcaaaatcgctcagtaccgcgccggaatcgtccccgtcgcctatcgccgggtgccttgcagaaagcacggagggataaggttcacgataaacggattccgttacttcaacctggtgctgattagcaacgtagcgggtgcgggtgatatcgtgcgcacgtacgtgaagggcacccgaaccgggtggatgccaatgagccgtaactggggtcagaactggcagtcaaacgcggttttggtgggccaggccctgtcctttcgtgtcaccggcagcgaccgccgcacctcaacctcgtggaacatcgctccacccaattggcaattcggtcaaactttcaccggaaagaatttccgtgtctgaaaaaaccctaatcataatcaccacccatgtcatcaacatcaatgacatgcttatgtatatttttttattgtaatcctttttttttcaaggttcccgccttttaattacttattcctagatggtcgtttgactggatagtgagtgacaacttcttaattgtgactttagatgttgttgggttttagtgttttttttttcttttctgattgggtgggttttataattatagttggggtgcgtgaagttgtattttaatttgtaccgtagaccaaaggggcgtaataggaatggaaaaggcgaaagggagagcgaaaggatgagagaaagtgttgtaggtaacgctgaagtggcttaagcaaaatggtagcccgcagctaatttgcgctttttattatagaatcatggtgttatatatattattaatggtataaatttgttctatgaatttaactg

SEQ ID NO: 26102 - DNA, 483 bp, Glycine max
  Clone ID: PAT_MRT3847_123571C.1
tccaccttttttttctttttccacaccccgggaacaaaagacatggcattttattagaataatgggtacattacaaaggggtccaatataacaaccaatatacgcgcactcaaattcaaagcacgagggtcccaagagggtggttcaaactaagacaacctatgcccagacagactaaaacacaggcgttgtacaacgaacgagctcgcacccaaggaacaatgccccatgggcacaatgggtacatgccccaacagaacctaactcaccgtgtacgaaacaaaatagcaagcatgtactacgcattagtgaggtatgcatgaatgaggcgagccactgaaaagtgaaccaaagtaaatgccagcaaggcactttggaggggggactgggaaccgggactcaggctaacaagagtcatagataacatggttcagacgaacccgcctgtaactaaccgctttaatggagctaagggctagggat

SEQ ID NO: 26103 - DNA, 266 bp, Glycine max
  unsure (1)..(266): unsure at all n locations
  Clone ID: PAT_MRT3847_123572C.1
acccagcgagcggaggcgggcaancagnncancnnncgncagggacnccncccagagaaacaanggccccgaagggccangaanacgccagnngnacggacacgaacgcancagggncagccagcagcancagcggngcgggcgggggganggngaacncacgcgccggaacgccggnggncacccagnnnnnngggnaacgggcagaggcganaangccnncgcgccgngcgaccgcancccggcagggcncaggccngncgaca

SEQ ID NO: 26104 - DNA, 440 bp, Glycine max
  Clone ID: PAT_MRT3847_123573C.1
tcatcaggcctttgacccggttatgatcagccacctggccttaaatgggtcttctctctctaccatgtgagcttgaagatcaaataactaaaatttaaaaagaaaaaagtaaacctcaaatgtttacgcctatgaatcttcgtgttagcctcccaatattaattaaaaaaaacttacacatagatcttttagtgttgggcgtattggctgtcaatcaaaattgatagtttcgccacgataatatgcatgctcctttaatacaaacctttgttacatagattacttagatgaaactccgattctaattgaagaacaacgcaaaatgtatttaagttttgccctactcatttgcttaggggtgttggggttagttaatacaatacttaactatgtgattttcctaattgccattgagttgaccttcacctttattaattaga

SEQ ID NO: 26105 - DNA, 334 bp, Glycine max
  Clone ID: PAT_MRT3847_123574C.1
tgatgtcacaaatctttgagccaaatttccggggttagctttctaaacgtgacgttagcgtatgaggaaagtagaatttttgtctgctaatgttgtgtaggtgtgctatacccatgatacgataaggattgagtagtgtcgtgatagggcggcgtagccggtggaagtaatatatggggattaaacaccagcgattgcagccaggtagatagtatatgagttagagtctgcgcgtaggtgtgatagacgaatgagttgaaagctgtgtgtagtctaattactacatctaatagagatagcctttcatatcatagctatgacgttggtattgaag

SEQ ID NO: 26106 - DNA, 301 bp, Glycine max
  Clone ID: PAT_MRT3847_123575C.1
aaaagcaacaagaagactaggggttttaatttttgacccctgaacaaaaaaactttttttttcacaaaaggggaccccaattaacgaaagaaggaaaaaaagggctagccaaattaatctgactaaaaatttgtttctttggggaagggggtgattcccttaatataaaataatggggccgcacaaaatatgcccttttttgaagcctaaccccttcctttctttgggtccaccttttgggaaaaaaagagtttttttgttcaggggtccataaacttttttttttaaaaaatctggggcc

SEQ ID NO: 26107 - DNA, 569 bp, Glycine max
  unsure (1)..(569): unsure at all n locations
  Clone ID: PAT_MRT3847_123576C.1
ttttttanttttttttntatttttttttagtttttttattttttttttttttttttttttttttttttttttttttttttttttttttttttttttttttttttttttttttttttttttttttttttttttttttttttttttttttttttttttttttttggggggggattattttttttttttttttctttttttttaaatatattttttttttaaaaaaaattttttttttctttactcctaagatttggtaatgccacaaaaacctgaaaagaacccattcggaaggcctccacaatagtctccccccaggttggtccccttaccggcctccttttgttaaaaacaaacccctggaaaaaaacattttccccccccccggaacaggaggccccctttttggagccctaaattcatgcccccaaacttttgttttaacccctttattgggaaccggccctcagaggggaccttgtttttcctttcgggggggttttaacagcctacttttccccaggacaaaatattttggggggaaaaaattaatgccgggaaaaatttcagag

SEQ ID NO: 26108 - DNA, 252 bp, Glycine max
  Clone ID: PAT_MRT3847_123577C.1
ttgattcacgggccggagctacgaatggttccatgagggggcttgccagttctgatattaacaccgatctctctaaagacagtgaaggagggaccactgttcgcacagaactattgactatgtcattgacatgcaggcacttgtagagctggagggggtttgcaatgcactcatcgtaccaaaggaaagagtgaaatgatgggcacaactggatggactgacactacaggtgtatgatgtgcacggtgctat

SEQ ID NO: 26109 - DNA, 1553 bp, Glycine max
  Clone ID: PAT_MRT3847_123578C.1
ttttgcggacgcgcctccaaggagagagaaattagagagagaaaggtgtgagtgtttgttttttagagagagaaagagtgtgagtgttgtgttgagtgcagtttctttctcacatggcctctatgccgttggggccgcagcaacagcttccaccgccgccgccgcaacaaccgccgccagcggagaatgacgcgatgaaagtggactctcgcggcggctccgacgccggcaccgaaaaggaaatgtcagctcctgtcgcagatggtaatgatgcactcactggtcacataatctcaaccacaattgcaggcaaaaatggcgaacctaaacaaaccatcagttacatggccgaacgtgttgttggcactggatcatttggcattgttttccaggcgaagtgcttggagactggcgaggcagtggctataaagaaggtcttgcaggacaggcgatacaaaaatcgtgaactgcagttaatgcgcgtgatggatcacccaaatataatttccttgagtaactatttcttctctacaacaagtagagatgaactttttctgaacttggtgatggaatatgtccctgagacgatcttccgtgttataaagcactacagtagcatgaaacagagaatgcccctaatctatgtgaaattatatacatatcaaatctttaggggactggcgtatatccatactgtaccaggaatctgccatagggatttgaagcctcaaaatcttttggttgatcgactcacacaccaagtcaagctctgtgattttgggagtgcaaaagttctggtggagggtgaatcaaacatttcatacatatgttcacggtactatcgtgccccagagctaatatttggtgcggcagaatacacaacttctgttgatatttggtccgctggttgtgtccttgcggaacttcttctaggccagcctttgttcccaggagaaaatcaggttgaccaactcgtggaaattatcaagattcttggcactcctactcgagaagaaattcgatgcatgaatcctaattatacagatttcagattcccccatatcaaagctcatccttggcataaggtttttcacaagcgaatgcctcctgaagcaattgaccttgcatcaaggcttctccaatattccccaaaacttcgttacagtgcagtggaagcaatggcacatcctttctttgacgagcttcgcgagcccaatgcccggctacctaatggtcgtccactgcctccacttttcaactttaaacaggaattagatggagcgccccctgaactgcttcctaagctcatcccagagcatgtcaggcggcaaacccaaatgtaaagagatagtaaaacatagagtgaactgttctagtggattagtgtgaaatacatgagagcttgcttgtggtcaatagaacaggggttaggcccaaatatgcagtttttctcccccttgtgaagatgtatacatgtgctggaaaactcagtgtaacccggaaatgtagattatgtctaatgtctaatatttcattctagttaaacagtgctt

SEQ ID NO: 26110 - DNA, 711 bp, Glycine max
  Clone ID: PAT_MRT3847_123579C.1
ttttataaagtagtttcattatgctcattgttcatacaatactaaaaaagttatttttagaattagcgtagttttcactggtggcttcttttaaaggtggaagcaatggcacatcctttctttgaggagcttcgcgagcccaatgcccggctacctaatggtcgttcactgcctccccttttcaactttaaaaaggaagtatgtatctaacacaaaacagaaattgcattgtcgaatgcttatacacatcagtttgcactgaatatcagttaatcataacagcactgtactgctgaaaggattatgtattttctttttccctcatgatatccatatatgttaataattttgtaatgaaaacttttgattgcagttagatggagcgccccctgaactgcttcctaagctcatcccagagcacgtcaggcggcaaactggtctcggcttcctgtactcggcagaaacccaaacccaaatgtaaagagatagtgaaacatagagtcaaccgttctagtggattagtgtgaaatacatcatggcctgcttgtggtcaaaatagaacaggggttaggcccaaatatgcagtttttctcccccttgtgaagatgtatacatgtgctggaaaactcagtgtaacccggaaatgtagattatgtctaatgtctaatatttcattctagttaagcgaaaaaaaggaggaggaaagaaggg

SEQ ID NO: 26111 - DNA, 222 bp, Glycine max
  Clone ID: PAT_MRT3847_12357C.1
cttaggagtctttcttcctttgtaatagaaagcacgcgtttctctctctcgctatctcaacgaatatctgtgtagttcaagccccaatccgcaacatccatttacaaaatatagttcatcggaatactctcaattttccggccagaaaccggcgaggtcgccggagaaatcgagcttctctcagacttgtagcctgttgagtcaatacatcaaggagaaggg

SEQ ID NO: 26112 - DNA, 1008 bp, Glycine max
  Clone ID: PAT_MRT3847_123580C.1
cccacgcgtccgtacggctgcgaagacgacagaaggggaggcactacaattccctcaaaggagagagaaagtgttggtgtgttttttagagagagagagaaagaaaagactgtgtgagtgtagtgtgtgtctttctctcatggcctctatgccgttgcggccgcagcaactgcttcaaccgccgccgccgctagtggagaatgacgcgatgaaagtggactctcgcggcggctccgacgccagcgccgaaaaggaaatgtcagctcctgtcgcagatggtaatgatgcgctcactggtcacataatctcaaccacaattggaggcaaaaatggtgaacctaaacaaaccatcagttacatggctgaacgtgttgttggcactggatcattcggaattgttttccaggcgaagtgcttggagacgggggaggcagtggctataaaaaaggtcttgcaggacaggcgatactaaaatcgtgaactgcagtttatgcacgtgatggatcacccaaatataatttccctgagtaactatttcttctctacaacaagtagagatgaacttttttctgaacttggtgatggaatatgtccctgagacgatcttccgtgttataaagcactacagtagcatgaaacagagaattcccctaatctatgtgaaattatatacatatcaaatctttaggggactggcgtatatccatactgcaccaggaatctaccatagacatgtgaagcctcaaaatcttttgattgatcgactcatacaccaagtcaagctctgcgattttgggagtgcaaaagttctgatattttgaagattgtagagattggtgtgaagatacgtgagtcagtggtcaattttacttatgtatatgtttgcattagggtagaattatgtattgctctaactaggttatttgatgtataggttgggagtagctagtacataatttctctgtatttgttaaactttgtcttcattctaatatcatggtctaatgt

SEQ ID NO: 26113 - DNA, 346 bp, Glycine max
  Clone ID: PAT_MRT3847_123581C.1
gggggaactacttttgatgttcttttaactggggaagcattaatttccgtgttttcattcccatttgacgatgagagtctaggagatctcctaggctccaatgtaccatgcagtttcacctcaagcttttctgcatatgcctcacatgatggatctaatcctgggcactgcctcaagtgcttctcaccaaagaacttcccgtgagaatttttgataggcttagcatctgaatgaagattggaatctacattttggtcctttaggtaagcattcaatggtaattctggacccctagacccttgccacttaacgggtgttgagaatctcggggagcgtctccgagatg

SEQ ID NO: 26114 - DNA, 751 bp, Glycine max
  unsure (1)..(751): unsure at all n locations
  Clone ID: PAT_MRT3847_123582C.1
acccggggatcctctagagtcgacctgcagagttttctgatacatcatgaccttgaaataacaagaaaagactcttgtcgatcacctgaaaattttatagaagaatataaaaatgtggtgattgcggtctcgtgcagctactaccatttatttcccaccattttattaatgtacgaatttggttgaatgtaattcatcaatccacatgcaatggaagtggacaanctcgaactcacaaacttatttatggttttgcatggtgagtcatgcataaatgttcagctttacaccaattcagaatgactctcctttgtaagaaggctctccctctttctgactaggtgacacaatctagaaggatgaccaaaaagaaaataaattttgatatatgacaaataaatgaaataattcattttttaagaaaatatttctaaatatgttgtaaatatgtgtaggaacatgcttgcgactgtgccattgctttttaaccctcttctccttaggtcttggaagatcgttttgaagatatatattaattagctattatttcttgaaaatttgtattccaagaatctttttcactgcactagatcttttatgacaaataatttgctcgatgttttctcgagaacaagtgacctcatttttatttttctcacaatcaacgtattaccaccatgttaatactggttcgatggactcaccatttttatagattttcaccaaaatagtgggaaagtcctcctaaaat

SEQ ID NO: 26115 - DNA, 888 bp, Glycine max
  Clone ID: PAT_MRT3847_123583C.1
aaccactgcttgtctttcctttgaaagaaaaatccaagacttcggttagcggggagcgcccctgtcctcttttctccccccaccctttcttattagttagaagccgaacctagtctttgtgtgagttgtagcggatcacagtggctagacgcattcctgattgattaacctttttcgaatggtttcccttattcactgattaaagatcagagctcgaagcctgaaagcttaggtctgaggctacgagtgaaaccgctgtccaaatacaaacaataggtgccggagctgctacaattgctttagcgggagctgctgtaggtattggaaaggtatgccttttcttcttgactttctatgttcttcttaggttcattctccctttggatttagaagtgaaagtcttttgcttttatctaacaaggcccaagttacagcaggctctttctattatgaaatggttcatctgtatctatttattggttagtttagtatataggatttctaccttctttgatttgattttacttcattcccccttgactatgcttccgctcgatccgagcagctctggagtcagctcaggacggacataaaaaggtaatttcttgaaaaattggacttgttgtttcaccccaacccaagacgaaagccattctgtttcgcctccaaaaccaattcccaaactgggtggaagaggttgatcttccaaccgaggatcaaaacgataccataaacgatcttagagataagtgtgcgattcttctagaatccttctctaaaaaccaatcaagagaccgctttacatggcaagatatcgcacaacgccgcgttttactgggaaggatcgaaccatgggaacgaatctacagggctatcaccttctttggc

SEQ ID NO: 26116 - DNA, 289 bp, Glycine max
  unsure (1)..(289): unsure at all n locations
  Clone ID: PAT_MRT3847_123584C.1
acgttgcncgagtacgtaagctcggaattcggctcgagatctatatcatttaattactgtgattgataaaaaaaaaaaaaaangggnggccgccgactagngancccgtcnacccggganttaatnccggaccggnacctncaggngnacnngntttcccnanagngngtcgnnttagngtttggngnaatcagggcnatagctnntccccgcggnaaattntnatccgntcaaaatnccacacaacntanncgnnnganaaaacgcntcgatcgctacncaggctcgg

SEQ ID NO: 26117 - DNA, 121 bp, Glycine max
  Clone ID: PAT_MRT3847_123585C.1
ctcggattcttatccaaacatctatttccaatatctctgcatgatattgcccagaggacccgaccactatcacaagaatcaggtcccacttctcactacatgacattcactaaaactctaa

SEQ ID NO: 26118 - DNA, 519 bp, Glycine max
  Clone ID: PAT_MRT3847_123586C.1
cgaagatgtttccaccggtaccgaagataccaacagcgcttggactgattcgacaatgggcgattcggacgattccgacaacgattcggataacgagttcgaacaagagtactcgaaagtcgaaaacaacatcgacaactcgatccgcacactaaaacaaggaatcatgagcgatctcaaagagatgaaacgtcaagccaagatcatgagcgaagatttgaaacgccaaaaacgcgagatgatagaaaccaaacgtcgtgcgttcagagcggacgcttccgctgtagctatgcgtcgcattatcttcaacgagtggtcgcctgccgatcaaagcgaagcgaatttgagcgatagtcgtggcaaagaagctgtcgatcctcgcaaacgtatcatggaagtcgttggtgggcaatcgacgaactcgcaaggaatgggcattcatcgcaccggtggcatgcctcatcaatccgctttaacttatgtcgtacatcaagcaaatgatcaccaacgaaatcgaaa

SEQ ID NO: 26119 - DNA, 525 bp, Glycine max
  Clone ID: PAT_MRT3847_123587C.1
taccacccgcaagattcccacgttaatcaatctcatagagtcttcccgcggaattcgaaagagaggaaagctttgcatctatgccatgcacttgatggaactctcagagcgatcttcagcaatcacaatggttcacaaggcacgcaagaatggcatgcccttctggaacaagaaaccggatgacaaagatcaaatgatcattgcttttcaggcttatgagaaactaagaagtgtcaatgtgcgccccatgacagccatctctgctctcaatagcatccatgaggatatttgtactagtgctcaccaaaaacgtgcagccatgattatcctcccattccacaaacaccaacgtgtggatggatcaatggagtcactaggacattcactccatgtgatgaatcagcttgtgctaagccatgctccttgctcagtgggaattttggttgatcgaggtcttggagggacaagccaagtccaagctagtgatgtgtcttataaggttgttgtacccttctttggaggacg

SEQ ID NO: 26120 - DNA, 539 bp, Glycine max
  Clone ID: PAT_MRT3847_123588C.1
tccaaggaaggtttcccgtcatcactgtatgaccgtcctcgcttgctttgggggggggggcggcgggcgagtggtacacgtagctgcaagtctaacaggctaccaggctagcagctatgcaaccaccggcaccatggcaccatagaaacgcgtcacagtaactaaatgggaacgtaaaacgtcaacgacggggaaggagatgacattcaaaggggtacagttgtactagtgcgtgatacctagggttaagaatacgcagatacagaatgaaatgtaaacgtaatacggtgaaagtaggacaaagaaagagcaggagcagaagaaacatggtaaatatggtaaggcgggagggttaaatgcggccgcaatggtgactatacaagtacaacctaccatagcataagcggagtaactccgtacttactgctggatactaatgcgggtattggaagcagcgaagtatttaggctggtcgatggccagggtttggtaatacttggttagctgtttagggactgtgcgtttgtagcggcaatagg

SEQ ID NO: 26121 - DNA, 501 bp, Glycine max
  Clone ID: PAT_MRT3847_123589C.1
aaaaaaaatataaaacccccaaaaaaaaaggggtgaaagaaaaaaacaagaaaaaaaacaaaaacaagaggggggaaccccccccaaaaaaaaagggcggggggaccaaaaaggcaggcaaaagggccccacagcccccacccccccgaaaaaaccaaggccccggaaaccaaggggggggacaacaaaaagccccaaccccgcccccggcctggggggggggaaaaaaacggggggggacacggagggccccccccccccccccccccaaaaaaagacccccaaacacagggagggccctggaaacaaagcccaaaaaaggcggaaattgggaaatggcgggaaaaaaaaggggggggggactccggggacaattttgaccggccaaaaaaaaccggggcccccgtttcccaggggcaaccccggaaaaaggggggaaccgggaaaaaaaaaaaaaaaggaccccaagtccctttaaacctatttaaccccaacaaggaa

SEQ ID NO: 26122 - DNA, 643 bp, Glycine max
  unsure (1)..(643): unsure at all n locations
  Clone ID: PAT_MRT3847_12358C.1
cccgtgtngttgntgctgaccaaaacgaccccacgccccatcgcccagtacanatnaggtctcaacccctcgcccccnncttcctgtnncttacccttnttcnctccccccccgntcgntgncctnngnntctnncctnntcggagctnaantntncnatccctnccttcatatcncttnacggnaaccntntnttnacccatcgnaaganctancnnnatctngaccggntcgaagctctactcactnanatcctgttcagatctggggggtnngattgcaattctcactctgctgctnggatttgatcgtncgaaatgtcgattttaccnaaagggganncngctcanatcacggaggntnggaacgataacctcaaggaggagttcncgttgatccgcnaaatcgtcgacaagtataactacnnggcgatggataccgagtnccctggcgnggttcttcntncggtggggaatatgaagaacattgaccactacaactaccaaaccttgacggncaacgtggacatgttgaagctgntccaattaggtctnaccttctacgacgaaaacggnaaccttncacctgcgnacggagagcccctgctctggcaattcaacttccgcgagtcaacgtcancgan

SEQ ID NO: 26123 - DNA, 369 bp, Glycine max
  Clone ID: PAT_MRT3847_123590C.1
acgaggttttttttttttttttttatttttttttttttagataccaatatgaaaagaaaaggcaacaagcagccagtaaatgtaagagagaagtgaaatgctcaaaagccaaaacttaatatatgacagcgaacaagttaaaaccttaattgacggacaaattaaacaaaaatctagaaggcaatgataaagcgcatagattgaagaataacaaaatccaaaatttcaaaaagaaaatataaatatagttgagaggagttcaagtgttaaacaaggcatttcaaaggatactaccttgatacttggactttgggtagtaaatgtcttcacacctgggctggtgccgaattcggcacgagatttcatttc

SEQ ID NO: 26124 - DNA, 912 bp, Glycine max
  Clone ID: PAT_MRT3847_123591C.1
cccgggctgcagggaaaaaaccagcagagttagaagaagaagaagaagccaagaatggcttcactgtgcaccacgcttctcttttgtctcctcctcctccttccgttatcttcccactttgttgcagaggcagagagacatggtatacccggcttcctctacactcggagcagaggcagatgcacggcacagttttggagcgggaggagggaggcgtggccggggatggtgccggagacatcgacggtgtcgaacgtgttcggttcaagagtgtacgaacggtacagatcggatctgacattgttggaagcaactgcgaggaacgacgaggagagtaaccctttcggaggattggtcaaagagggaaccgcagcgttgcttaactcttatgccagagagggtttccctttcaagccttggcaggttaagactttgctcataaaagcgctggtttcacacgctgaagctgcttctcaagccaataacttcttgttggctaatcaggcttgctcctaaatcctaatctaatctcaagtcaagaactttgtcatcatatatatatagcagtattggtatattatatagtatatactcatgatgatgatccagtaatgttttagttgtgttattgggtaagtcccactcgctttacccttttttacattgatctttttgtgcgttttttcttggatagactcgaatcactacattgtgacgtgattttggaatattggaaagggtgattgttgatatggtgggaacccttggaatggaggaaattaaattagtactgattttgtatttgtgttcttcgccaccatactttttaatttgtctttaatcttctttgttcttatcagtagtatccatgcttgtcgatgtatttataaagtgatgggtggattagctttc

SEQ ID NO: 26125 - DNA, 261 bp, Glycine max
  Clone ID: PAT_MRT3847_123592C.1
atgttgaataactacttttctcaatgcagtgcattactttatttcagaaggaactgtttaggcagagtcattaacaaaggttttcaaacaagaccacttgctggcatccatcttgaccttatggttgcaacaggaatcccaagacatgatgaaggtaaagagaaaggtaggctaagtgtgagatacctatggaagaacagagctgctaggctaaggctgttagctgtaagtgctttatatattttgccttatgatgattaa

SEQ ID NO: 26126 - DNA, 140 bp, Glycine max
  Clone ID: PAT_MRT3847_123593C.1
gcacgacggaagaacaattgctgctctgaaccccaaaagtttcctcgttatcaggattcccaatgcgcttgttttgcgcattctgtctcgctcattgttcctagccatggttcttgctgccttgcctttcttggtttttt

SEQ ID NO: 26127 - DNA, 643 bp, Glycine max
  Clone ID: PAT_MRT3847_123594C.1
gccaactgatccaaatctgcaacaaaagcagcaaaggcatcgtcacgcaagaaactacaatttaattcagcaaaggcatacgtcaacaacttccccaccttcttttcctcgatctcccacgagaccctcaccttctccaccaccccaaaatggaaaagcaacaacctacacagcctcagcctcaccacgacttcattttccgttccaaacctccccggacatttacatcccaacgcacctccctctccacacttaccttttccaaaacctctcacaattcaaagaccttccatgcctcatcaatgccgccaccggcgagactttcacctacgccgccgtcgaactcaccgcccgcaaagttgcctccggtttcaacaaactcggcatccaaaaaggcgacgtcatcctccttctcctccagaactgcccccaattcgtcttcgcattcctcggcgcctcctaccgcggtgccaccgtcaccgccggcaatcctttctacactccgggcgaggtagcgaaacaagccacagcgtccaactccaaactcatcattacgcaagcattctacgtgggataaagaaaggattttgcgagagaaaacgacgtcaaagtgatatgcgttgacttcgcggccggagggtac

SEQ ID NO: 26128 - DNA, 267 bp, Glycine max
  unsure (1)..(267): unsure at all n locations
  Clone ID: PAT_MRT3847_123595C.1
catctgntggaacttaacgacgtgaagctcgaaaaacggtgggtcctttcggaaccataaagcaaccctccggaactcgctcacgggcgctaacaaaggtcttgacatcgctgttaaggcttttggagccactcaaagcggagtttcctantttgagctacgccgatttctaaccagttggctggcgttgttgccgttgaggtcaccggtggactgaagttcccttccatcctggaagagaggacaaactgagccacaccagaggtc

SEQ ID NO: 26129 - DNA, 141 bp, Glycine max
  Clone ID: PAT_MRT3847_123596C.1
ggggaaaggaagaagaggcgtttggacatgcatgaaaaactaaacgagagacagtggaattggatggtggggaatggaaaaccgcgtgcgtgtggcgattgggatggaaacgggattatgccttttctttttgagatttag

SEQ ID NO: 26130 - DNA, 421 bp, Glycine max
  Clone ID: PAT_MRT3847_123597C.1
ggctcgagcatacatcacattggtttgttgtactaaacgataatgcacacgatgaccaaggatattatgccagatgatgtttggagggatgcaccacataaggtggtgatggactatgccttgctagcagagcttgatcttacagtgttggctggcgtctacaaaaggcatatgaaggaccgccaaggagagattcactggtgaatgaacacagctatgacacaagataggatcgtattgatcgctgaggagctgtatggctttgacaagagtacattgccttggccgagagtgatggttgaggttgagcttgtggactatattgcaattgatgctgcttatagaatagagactactacaaataaagtaaatgagagactaggtagaactgctgctagacttatcctggagagagggaata

SEQ ID NO: 26131 - DNA, 356 bp, Glycine max
  Clone ID: PAT_MRT3847_123598C.1
gtttccatgaataaaacacaaaactccgtgaaaggacgatgaactctctctactgggggaccaaagttattataaggactgtaacccccacagctcactctaaaagaagaacacaagccaaacaatggtgatggacaaccagctattcatttatgaataaatctcctaaatagaccgactttactagcttggactgtaacacaacacagagattaccaactatgaaatctgggtcaaaaacatagtatccattaattatgcgaatcgaggacaataccagaccgcgactaatttaaagacgccacattaggtttaaaaactaacagaatcggtcgataaaatgaaggaatgggatt

SEQ ID NO: 26132 - DNA, 549 bp, Glycine max
  Clone ID: PAT_MRT3847_123599C.1
cttcctcaggcacacagttgaccggagttgatttagatgtttcagaaattcagaatgtcaacatctacacttacagagaattgcgaattgccactgaaggttttagcaatgcaaacaagatagggcagggaggttttggagtagtctataagggaaagctgagaaacggttctttggcagctataaaggttttatcggctgaatcaagacaaggggtccgggagttcttgacagaaatcaaggtgatctctagtatagagcatgagaatctagtcaagttacatggatgttgtgtggaagacaaccacagaattttggtatatggctatcttgagaataacagcctagcacaaacacttattggttcaggccatagtagcatccaattaagttggcctgtaaggaggaacatttgcataggtgttgcccggggccttgcattccttcatgaggaggttcggccacgcattatccatagagacataaaagcaagcaatgtactacttgacaaagatctccagcccaaaatttcagattttggccttgcaa

SEQ ID NO: 26133 - DNA, 456 bp, Glycine max
  unsure (1)..(456): unsure at all n locations
  Clone ID: PAT_MRT3847_12359C.1
acggaactactgtctacataccattaagcctaggaggcttttttacccttaaaaccatttgtatccgggaaactcttttgacccaatcgtattcttagggatatttgaaccctacccttttttttttttcccccaccttttttgcagaatgagaatttttgaaacaaaacccttaagtaaaccttgtgttaatccaaaaagagagggaaaaccctaagctttatcactaaaagaaaaaaatcaaatccaaataggcccttcgagaaaaacattaatatccataaattagatgagactttccagagaaattgatcaacaggttgtacaatggaaatgataattgttaatttcttcctctagatacctctaccatcgttgttggaatccattaaaatggtcaacctccttgcagttntaggaaattcggctgagtaccatcaaagacttaatcaacat

SEQ ID NO: 26134 - DNA, 332 bp, Glycine max
  Clone ID: PAT_MRT3847_1235C.1
atgcgggagggacaaaccacaatctctcacagggctcttgaaacatgtactgggccagttgtcaacttcgtgggcacccaaagcagagggaaaagtgactacaaggcgaggaatgacaagaactcccagggaacatcttgctgcatacttagcccaaaatcagtgtactggtagtgcgcgctctacatgaggcctgaccagacatagagcccgctttcacagcgccagtttccttcactgatagtgatggcaaatgctcataacaacgggccccaaatatgtgagtgacagaggatcagatcccctggctctacattagaaactttctgatg

SEQ ID NO: 26135 - DNA, 626 bp, Glycine max
  Clone ID: PAT_MRT3847_123600C.1
gacaggaaaaatcatggaagtttcaataccattggaatctttgtgtaacatccatatacaaattgatgttattaataactacagtaatataagtatagtatagacaaataaacacataaaggccattctagaccacaagaatccgttgctaccttctcaaacatgtcattccttcacgagctagagttccctcaaggtctcctataattctagccgtcctaacttctagacctctttgaacttcatggaacagatttctaatgctgtcggcaaaccggttcatgtcaatgcctgaacttttccccatctcttctgccactccaacaaagccagaaagtatcttggactgaatttccatcagtttttgtcctgttgcaactatgtatctttgtaactgaaatgtttcttctaggaagtgctccagtgttgatgttttctcctttgctcttgcagcactcacatctccacggtttgcatagaggtcattctcgtgcatccgtttgcaaagatcgtcagtcttctcttggagggattgatatcttccaacttgtttattcagcaacgttgtcaaggacagataagccttcataccaacatttgctgatatcagtaatttctgcatgctc

SEQ ID NO: 26136 - DNA, 1123 bp, Glycine max
  Clone ID: PAT_MRT3847_123601C.1
tgtgcggcgctcgagccggccggttttaaattctacaaccagactcatgaaatctcctcctcaatagttaactaacacatccttaaaatattcctcttcaatctgctcaatcttccactcttgtgttgtcttgtgtgtgtttctccgcctagtcctagatctgtctccccaatggctggtttcttctctcttctaaggcgcctctatctctccctttacaattggaccgttttgtttggatggtgtcaagttctgtattttgttctcaagacattgaacgaatcgggtcatcaacatgtttacagtgcagcagaaaaacctttgcattatgctcaaagcgctgctgtgttagagattcttcatggtttggtagggctggtgaggtctccagtaacagcaacattgccacagataagttcaaggctgtttctggtttggggcatcttatggagttttcctgagactcggtcccatgtgcttgttacctccctactaatcagctggtccatcacagagatcattcgctattctttctttggctttaaagagacttttggatttactccatcatggcttttgtggcttagatatagcagcttcttagttttgtatccaacaggcataagcagtgaagttggtttaatatacattgccttaccattcattaaggcgtctgggaagtattgcataaggatgccaaacaaatggaactcatcatttgattacttctatgctgcgattgttgcaatgggaatctacgttccaggtagccctcacttgtacacatacatgcttgctcagaggaagaaagctctctccaaatcgaagagagagtaatgcaacatcagtagttttcattgattttgggtcaaacgtaggatatatacacatgtcatatcttggtttggattcccatataggtatcagggaaacgcttataaaaaaaaaaaaaggtatcaggaaaatctattgctttacttgttaatccttaaaaggcaagatgccggagattaataaactaattattttgtttttccgtaacgtggtgcgaaacagcttatagtttattgttggtttttattccacgggaaacataaatcatagttccacccatatgttagag

SEQ ID NO: 26137 - DNA, 1039 bp, Glycine max
  Clone ID: PAT_MRT3847_123602C.1
gcggcgttgtattgaatggtgtgctagattcttcatggtttggtagggctggtgaggtctccagtaacagcaacattgccacagataagttcaaggctgtttctggtttggggcatcttatggagttttcctgagactcggtcccatgtgcttgttacctccctactaatcagctggtccatcacagagatcattcgctattctttctttggctttaaagagacttttggatttactccatcatggcttttgtggcttagatatagcagcttcttagttttgtatccaacaggcataagcagtgaagttggtttaatatacattgccttaccattcattaaggcgtctgggaagtattgcataaggatgccaaacaaatggaactcatcatttgattacttctatgctgcgattgttgcaatgggaatctacgttccaggcatgagcaaaacatccttctcactgctgacaatgatgtccttaggctaatatttgtttcactgaccttgtattttaactggttgaatgtggcgcattctatgcaggtagccctcacttgtacacatacatgcttgctcagaggaagaaagctctctccaaatcgaagagagagtaatgcaacatcagtagttttcattgattttgggtcaaacgtaggatatatacacatgtcatatcttggtttggattcacatataggtatcagggaaacgctgataaaaaaaaaaaaggtatcaggaaaactcttgctttacttgttaatcattaaaaggcaagatgccggagattaataaactaattattttgttcttctgtacattgattttgggtcaaacataggatatacacatgtcatgtcttggtttggatccacatataggtatcaggggatctcatgcgtttcatgttgacgtatcattaaaaggcaacatgccagagataaataaactagttattttgttcttctgcaacgtggtgcgaagcagcttcctatagttgatcgttggttcttagtcatcggctatagatattcaacgtg

SEQ ID NO: 26138 - DNA, 491 bp, Glycine max
  Clone ID: PAT_MRT3847_123603C.1
accagattgaatccgagctgtatatggccattgatgggtctcgcaatttcattgtggtcttcacaaagaactatgcttcctcaacttggtgcttgcacgaactagcacggatctgcatgaacattgaaacatcaacaagacgaattctgcccattttttatgttgttgatccattaaaagtgcaaaagcagagtggatgttatgagaaagcctttatggattacgaagaaagattcagaggagctaaagagagggagcaagtatggagatggagaaaaggtctgaaacaagtgtcacatctcccttgtttgcatatccaaaatgacatgaagagaagttgaaacaaaaggattcttcatttgagccaatctgataaagtcatctttgtctcctactttcaagtaatctgtttcagatttttatctgaacagactatgccctgttctttgactcttacatttgagggcttgactagtattttcatggagact

SEQ ID NO: 26139 - DNA, 468 bp, Glycine max
  Clone ID: PAT_MRT3847_123604C.1
cggaacgaccgcatcgtccgaaccgttcgtcgaatacgacagaacgacattatggggctcaaatgaatttggtgatcgagagtgcttggaacagtttgatgaaaaggaaagtactagctctcttcgttgcttcaattttggtagcatgtcaatgccatgcctacgatatgttccctctacgaatgaacactggctatggtgcccgtactcacgacgtgaaatgcgcaagtcggatgcttgctgtggaagcacactacatctttggctttgagaccattcctgaagaatgccttgaatcaacaaaggaatacatccatggcaaacaatatagatcagactacaaaacagttaaccaactaacttacttttatgccacaaaccttgagatccataccaaggacacatttttgctcagtatacatggcaccgtactctctaatatatcatactacctaaaacatggatatg

SEQ ID NO: 26140 - DNA, 253 bp, Glycine max
  Clone ID: PAT_MRT3847_123605C.1
gtcgcatgacgcggcttcatgaattcgtatgtcatacatttcatcatcgtagtcactgcattatgatgccttaagggtcgatcacattctttgacatagagaacaacattgttggctgatatggcgcatctaatgcaagatggaattgcctgcttatttaaggacgcgctaccaaattaagacttaagtaacctatttggccaaccggataagggggcccttaaggaagatcggacggcgtgggcggactccc

SEQ ID NO: 26141 - DNA, 2342 bp, Glycine max
  Clone ID: PAT_MRT3847_123606C.1
gaattcgagctcggtacccggggatcctctagagtcgacctgcagttggagagtacttattaacatctataaataagagcgatgggtgtgaactccaacagagtggaacactttgctagccatgatagcgccatcgaggagacaatgcaaatccatgcagtgcacttgccaccacaccagaccacacttcacaaactcaggcacaacagtctccgaaatcttcttcccagatgaccctctccaccggttcaagaaaatcccaaccactatctctttctctagtcttactttcccatgtcttccactcccaccaatctcattgatttcttggtgaaccaagccaatggagtgaagggtctcgctgatttgaacctcgcaagtgttcctcaccaatacattcaacccctccaagccagattagaccacaccaaaattgtcactcagaaatcaatacccatcattgatttcacaaaatgggaagacccagatgtccaagattccatctttgatgctgcaaccaagtggggtttcttccaaattgtgaaccatgggataccctctgaggttcttgacgatctcaaggatgctgtgcacaggttctttgaattgccagctgaggaaaagcagtgtcttaaagacaactcaccccctgaagttgtcaggttggcctctagttttagcccctatgctgagtcggtgttggagtggaaagattatctgcaacttgtgtatgcctcagaggaaaaaattcatgcatattggcctcctatatgcaaggaccaggcactggaatatatgaagcatgctgaagctttaattagaaaattgttaaaggtgcttcttaagaaactgaatgtgaaggagttagataaagcaagagaacacactctaatgggggcaatgatattgggtttcaattactacccagcttgccctgaccctgaagttgtagcaggggtaggtcctcattctgatgtatcatccattactgtccttctacaggatgatattggagggctttatgtaagaggcagtgatggtgatagttggatctatgttcctcctgttgagggagctttagtaatcaatattggggatgtgctacagataatgagcaatgaaagatgcaaaagcatagagcatagagtggttgcaaatagaagcaagaccaggatctccattccaatctttgtcaacccagcacctgatgctgttattggtcctttgtcggaagtgttggatgatggtgatgaaccaaaatataaacaacttttgtactctgactatttcaagtatttcttcagcaaggctcatgatgggaagaaaactattgaatttgccatgatatgattggtgactgtatctatgaatatttggttttgactaagtctaatgacatcgtgggctctatgtagccgacctcacttaatagaataaggcttctgtaattgtatgatttgtgctcattgttggcagtatttaaggtgtttgaaatccagctgctttttgttcggatcaacatagccgaaaagcatatattatgctgatctttatttaacggaattctagcatgatacattgaaacagaaaatgcaaaaactttattgtaatgatcagctgtggctcctgtacaattttgattaaacattttggatgattttttcctaaaaagctgcaggtcgactctagaggatccccgggtaccgagctcgaattcgcagacagaggaaatactagcgaatagagatgggtgtgaactccaacagagtggaacactttgatagccatgaaagcaccatcaaaatccaggacgagacaatgcaaatccatgcagtgcagttgccaccacaccgaaccacactccacaaactcagacaaagagtctctgaaatcttcttccctgatgaccctctctaccgtttcaagaaccaaacttgcttcaaaaagttcctcctcgcacttcagtatctcttccccattttccagtgggccccaaactacaatctcacccttctccgctctgacctcatctctggcctcaccatttccagcctcgccattcctcagggaatcagttatgcgaagcttgccaacttgccacctattattggattgtattcgagttttgttcccccattgatatactcgctgtttggaagttctagacatcttggtgttgggcctgtttccattgcctctttggttatgggatcaatgttaagtgagaaaatttcttacactcaagaacctattctctatctgggattggctttcaccgccactttctttgctggtgtattccaagcttctctcggtatattaaggttaggcttcgtaattga

SEQ ID NO: 26142 - DNA, 154 bp, Glycine max
  Clone ID: PAT_MRT3847_123607C.1
gggggcaatcaacagtttctttaattgggggtagcaaaaaaaaataaaaccgggtcaggaattcttttccaagctttgtccaatttatttaaatccaactagagctttgaatgacaatttgacccccctcatactgatttaacttaaaaggggg

SEQ ID NO: 26143 - DNA, 185 bp, Glycine max
  Clone ID: PAT_MRT3847_123608C.1
cgacccactcgaactatattttttcattccacattattttccgtgttccaaacaatgaatttaattatgatctttggttttttttacaatcttcaaattctaaatctcataattttaagcttcaatcttcaccattattccagtcttattgttcccatcaatactccccaaaaaacttccaaacc

SEQ ID NO: 26144 - DNA, 189 bp, Glycine max
  Clone ID: PAT_MRT3847_123609C.1
aagacagaggacacgatctttctcagagagtaccagacccgccagaaccagtgcttctataactccagttacctgaatgtccagcgggagaatgggaccgtctccagatacgagggaggccgagaacatgttgctcacatgctgttccttagggacaccaagaccttgatgtttggttcctacctggac

SEQ ID NO: 26145 - DNA, 121 bp, Glycine max
  Clone ID: PAT_MRT3847_12360C.1
ccgcgtcttggtcgagaagattggcaccccgcaaggcaacatcaatgcccggcgaagcagcatctccctggcggtccggattcactgggcaagcaagcactacgaggacaacagccgcgtc

SEQ ID NO: 26146 - DNA, 600 bp, Glycine max
  Clone ID: PAT_MRT3847_123610C.1
ggctcgaggttttgctctggactctcaccgttccttcagagtggaaccctagttgtctctatccttaaggttccgccaccgcaccaagtctcagcacccaaccaggtcttctttcattcatggcggaggaacttatttctcaattaaacaatatgctagaagaaaatggaacaccaagtcatgtagaaagggctgctgatgctgatgctgatgctgagctttctccaccatcacaaaaaggagatgacactaaaggaaaaagaaagaactcttgcaacagactgatccaccatcaatttctgttattgaccttttcccatctggagattttcctgaaggtgaaattcagcagtacaaagacgataacctatggagaactacatcagaggagaagagagaactggagcgcctgcagaagccattatataattcagttcgtcgagcggcagaagttcatcgtcaggttcgcaaatatattaaaggcattttaaagcctggaatgctgatgactgacatatgtgaaacattggagaaacactgtcgtaagctaatatcagaggatggccttcaagcaggcatttgcattcccacaagatgctc

SEQ ID NO: 26147 - DNA, 821 bp, Glycine max
  Clone ID: PAT_MRT3847_123611C.1
cccatgttgatggatatatagttgactgcgcttttaccgtggcattcaaccccatgtttgatccactacttgaagcatctcgtgaagcaaccaatacgggtattaaggaagctggaattgatgtgcgcctttgtgacattggtgccgcaattcaagaggtcatggaatcttatgaagttgagattaacgggaaggtgtatcaagttaagagtatacgaaatttgaatggacatagcattggtcgctaccaaatccatgctggaaaatcggttcccattgtgaagggtggggagcagacaaagatggaagagggtgaattttttgctattgaaacctttgcatcaacggggaaaggatatgtacgagaagacctggaatgcagccactacatgaaaaattttgatgttggtcatatcccactgagattgcctagagcgaagcaactgttagcaactattaacaagaacttctctactttggccttttgtaggcggtatttagatcgtctaggggagactaaatacttaatggcattaaagaacttgtgtgactctggcattgttcagccttatcctcctctatgtgatgtgaaaggaagctatgtatcacaattcgagcatacaatcttactccgaccaacatgcaaagaagttatatcaaagggtgacgattactaatgtggatttgaagtttttttgctttgttttatatatatatatatatatatatatatatatatatatatatatatatatatttaatactccctgtcccattatctttgtgaactgttttcattataccatcaacacttcggtttt

SEQ ID NO: 26148 - DNA, 567 bp, Glycine max
  Clone ID: PAT_MRT3847_123612C.1
aaatcggttcccattgtgaagggtggggagcccccaaagatggaagagggtgaattttttgctattgaaccctttgcatcaccggggaaagtatatgtgcaaaaagacctggaattcagcccctacatgaaaaattttgatgttggtcatatccccctgagattgcctagagcgaagcaactccttatcctcctctatgtgatgtgaaaggaagctatgtatcccaattcgaacatacaatcttactccgaccaacatgcaaagaagttatatcaaagggtgacgattactaatgtggatttgaaggttttttttttttttttaaatgtgatactcactgtaccattatctttgtgaactgttttcattacaccatcaacactttggttttatatatgtgcctgtggaggaggccattactcgtttaataactgaatatttcctcaatagataatatcgtattagaaggtccacccaaaacattatcattttactaattgtaatcaaatatacagaaccccattcttttaaccaacttggtcacgcaaaaacaaaaaatagtaaaat

SEQ ID NO: 26149 - DNA, 313 bp, Glycine max
  Clone ID: PAT_MRT3847_123613C.1
ccaaatctaaaacaaatgccggtcctgctaacactaaggctacagagccaatgcacaaggtcgaagatggtgtctttggcactgtcggacgattcagagtgtactaaccagaacgagccctttgctgctactgtcgctatgctagcatctgcaacatgattgatgggagaaagaataactggcacatgaatgctaagtcaattaaacacaggaactggtactcccatttatgagagcggagcctatagatccgctacacatgctcattaccctgctcagagccattggagggacaagagaccgtggaaaattt

SEQ ID NO: 26150 - DNA, 1942 bp, Glycine max
  unsure (1)..(1942): unsure at all n locations
  Clone ID: PAT_MRT3847_123614C.1
tccggtccggaattcccgcccacgcgtccgcccacgcgtccgacggctgcgagaagacaacagaaggggagttctgcatcgcgttttgctctggactctcaccgttccttcagagtggaaccctagttgtctctatccttaaggttccgccaccgcaccaagtctcagcacccaaccaggtcttctttcattcatggcggaggaacttatttctcaattaaaaaaaaatttgctggatgaagaaaatggaacaccaagtcatgtagaaagggctgctgatgctgatgctgatgctgagctttctccaccatcacaaaaaggagatgacactaaagaagtttcaaagaagaaaaagaagaaatctaaaagcaagaaaaagaaagaactcttgcaacagactgatccaccatcaatttctgttattgaccttttcccatctggagattttcctgaaggtgaaattcagcagtacaaagacgataacctatggagaactacatcagaggagaagagagaactggagcgcctgcagaagccattatataattcagttcgtcgagcggcagaagttcatcgtcaggttcgcaaatatattaaaggcattttaaagcctggaatgctgatgactgacatatgtgaaacattggagaacactgttcgtaagctaatatcagaggatggccttcaagcaggcattgcattccccacaggatgctctttaaattgggttgctgctcactggaccccaaattcaggggataagactatacttcagtatgatgatgtgatgaaattggattttggtacccatgttgatggatatatagttgactgcgcttttaccgtggcattcaaccccatgtttgatccactacttgaagcatctcgtgaagcaaccaatacgggtattaaggaagctggaattgatgtgcgcctttgtgacattggtgccgcaattcaagaggtcatggaatcttatgaagttgagattaacgggaaggtgtatcaagttaagagtatacgaaatttgaatggacatagcattggtcgctaccaaatccatgctggaaaatcggttcccattgtgaagggtggggagcagacaaagatggaagagggtgaattttttgctattgaaacctttgcatcaacggggaaaggatatgtacgagaagacctggaatgcagccactacatgaaaaattttgatgttggtcatatcccactgagattgcctagagcgaagcaactccttagcctactctatatgatatgaaaggaagctatgtatcacaattcgaacatacaatcttactccgaccaacatgcaaagaagttatatcaaagggtgacgattactaatgtggatttgaaggttttttttttttttttaaatgtgatactctatcaaagattatcttttacaactgttttcattacaacttctccactttggtcttttgtaggcggtatttagatcgtctaggggagactaagtacttaattgcatatttcaatatatattatcgttcttggtggtccgccctcatcattccctcttcacttcgggttttcatatgtgccgatccccattcccttanctagtttaataatttaaagaacttgtgtgactctggcattgttcagccttatcctcctctatgtgatgtgaaaggaagctatgtatcacattccgatcatacaatcttactccgaccaacatgcaaagaagttatatcaaagggtgacgattactaatgtggatttgaagtttttttgctttgttttatatatatatatatatatatatatatatatatatatatatatatatatatttaatactcactgtaccattatctttgtgaactgttttcattataccatcaacacttcggttttaaaaaaaaaaaaaaaggggacgccattactagtttaaaaa

SEQ ID NO: 26151 - DNA, 322 bp, Glycine max
  unsure (1)..(322): unsure at all n locations
  Clone ID: PAT_MRT3847_123615C.1
cggctctatacttctgctatagacgacatattttatcccttattaaccaataattttttagttaaactttgtccattgccatggtgtaacacttttnnaaaccctttttcctactatattgtattaccattatcatggctactcttattctttcggtattttttacacaattttattctttctcttttatcaaaattttcttctccattttttttttttctcttttacactattcttttctttcttttttgatatactttatttatctgtatttttttcatttacatttttttttaaattttttttatattattcttttttt

SEQ ID NO: 26152 - DNA, 891 bp, Glycine max
  Clone ID: PAT_MRT3847_123616C.1
tttttttttttttttttttttttttttttttttctcaaccaaaataaactacttatataaaaataattattaaatattcttatacaggagtaggagaaagtagaaagtctggttgttttctccgtagcagtatcccacaaaaaggacagaatggttttgaggatacagcttgagtgaaagatttagaggaagagtctgaatctagatgaaatgaagacattctaaaaagtggttctggtgccaatctaaaccctgacctatggcaacaaacacaataccataggggagtagtggggcaaacctgcatactaacaacacatctcaataacctgtgattcttaacatcaccactagtagaattttcaccttggcaaaaaccaaattcaggggattcaaatggaacagatgctgaacaaaaactacatgtctccactgctgaacatctactgctcagaaaccttttctcatgcttaacttctgatgcaatggcttttaactggtcatgtatatgttcctgatctaaagcaatccattgttccatctgtgctagtccaacaggataccaacaaccagatttggaatttgtttctggattggacatgctagtttggaaagcagaaaaactaaagcccacaagcctttcacggagctctctttcactgcttagaagaacttttgtccacttagtaatttgtttttccatggcaggacttacctcttccagcttttgaaactttttgtgtattccagttatttgatcagcatccagctctgctaacattacccgtctgcagtgtctgttgagcttgcggagtaatatgatagctttgtctggagagcggtccatatctatgtgtagacttgttcatgagatccacttaacaagtaaat

SEQ ID NO: 26153 - DNA, 404 bp, Glycine max
  Clone ID: PAT_MRT3847_123617C.1
cgaagtgctcattattcccggtcgacgagctgactagctcgctggccggcggccgcccttttttttttttttttcacttggaaactaactatgcattttaacatgggatccagtgtattacaaaagaacatcacctatcctacataacagatattgtctgaaacctacttcaggggaaggcatcatgagacactacatacatccatcttacagcacctgcctaaccatccaattgagctcctgaacttaaatataacgctagtgtataaaacttgggaaagtcaaaggagtgcattcattatggtcatcagcacatgggaaaaagaaagcttcaggacatgaagaaaccgaacagtaaaaaaacacagcttacagtcttacaacttgcttctacgttacaggcc

SEQ ID NO: 26154 - DNA, 391 bp, Glycine max
  Clone ID: PAT_MRT3847_123618C.1
gtctaacactactcttacaccttttactggttcctacacaaccgaggccgagggagaacatgctggcgcccatgatgatatgtcgtcgttactgtctgttttttactaccactcctctgtggagtatgctgaggagtgttagctggctttgtctaccaacttatcttctaatactcggcatgatcatgtagatctaggccccgataacactggtatttgagctctggacttatctaactcctaatatgaaaaaggacatgttcactccggcggtgagcttaatatacctagactgctggctttatttgtgaggactacaacagagactgaatttggtagacgcactattataatgatgactgtatggcgcttcggcgtagaagtaatgaac

SEQ ID NO: 26155 - DNA, 498 bp, Glycine max
  Clone ID: PAT_MRT3847_123619C.1
tttgggcactatcagttgtttggtttgtgttgtgttaactgttaagtgaagtgaaggtcggaagcggtgatagttaaacaggtgacggtggacccagaaatccaagagctgattgagaaggagaagtgtcagtaatgctccggtatatagctgacttctaggggcttggttgataaggactttgagcagatcagagagttccttcatcgtgcactgattttcacactggacatccagaaggagtatggcaaacttttgaaggatttcaacaatagggccattgaagagctcaaagctgatgttgacaacaatatgcctggcttccttgtatctgagttgaagtacaaggactagcttcaaaatgtcttgcgcaatcttttgttttctggtgtcacaggctagcttggtttttcgattcaattttaagttcatttgtcttgttttgttttccttacataatatattttcttaataacaaaatcaaatattatgcttacc

SEQ ID NO: 26156 - DNA, 296 bp, Glycine max
  Clone ID: PAT_MRT3847_12361C.1
tccacgcgttcgcccacgcgtgcgggcgatcacaggttggcgcgccttaaaaccggagacacaagcgatcggtacttgatttcaagaatctctcaagtgctccctacttctttgagcacgatggcttaagggaaagaaaatcactctctgtgctggccacacacttcgagactcatgaccttttccactcttagtgagattggctgcacactctcctatctgatataggacttcctgtgacattgaaactacttctggctttatactagaaggctggccaagcacaagttcatgct

SEQ ID NO: 26157 - DNA, 264 bp, Glycine max
  Clone ID: PAT_MRT3847_123620C.1
gcgatctagagttctaaatttatgtgatgtctatggtctctatggcttatcatttttctttaccacacaagggggacgctcggcttatcatgttgtttcacgcttagccgcacttgagcgggaaaacccgagattaaacccaaagccctctagggtagttccgggcctaaacaaaacggggggcttcacaattccaattacagcacaacccccttctttagccttcccccttgtggaaagccaacctttttaccgaggggggcc

SEQ ID NO: 26158 - DNA, 107 bp, Glycine max
  Clone ID: PAT_MRT3847_123621C.1
gcctcattaagttttttgtcctatattattcattgactctccaaaagcccgttaaacctctctattcgtctctcacgtaccctgttccttccattcactccagttgg

SEQ ID NO: 26159 - DNA, 372 bp, Glycine max
  Clone ID: PAT_MRT3847_123622C.1
ataaatgctcattttatgcaagttttgagttgaagtttttctttgttaaaagaaattactttattatttaaagtttcttgtaaattacgttttatccatttttccttttaaagagacgttaaagaaaaattaagttacaccaagtgctactaaaattcaagcaattgaaactagaacattagtcgtgtttgaatatttcctttctataaatactaatgaaaaagaaaataagaatgtaaaatgcctcgagtttccatctttcacaagttaaatttaacttatgcatttcaatttttgaaaaagatagatgaagaagtttcttttaaagttaagtactaattataacttatgaaagaaatttattccttttac

SEQ ID NO: 26160 - DNA, 389 bp, Glycine max
  Clone ID: PAT_MRT3847_123623C.1
ttacatttttggggggtaggcacatggttaagggaggttaaagacactactaaggagggatatagttttgaagagctatgcatcaagaaagaagccattgtgggagaagagaagttttgtgcaaaaccctctgcgaacagaaattgactttgccatctcaaagctgggaaaaaacattaaagtacttttaagttcctttgacaataagcaagaccaatacactgaggaaggagtgcagaatcttggagacaaagcaaagaagagggatcggctaaatctcagaactgcagtattatactgacatgaagtgcgtgaaacaccaaattgtatgggttcattgttggatggcgatggaaccaaaacttaagcactggctatttgccactcaa

SEQ ID NO: 26161 - DNA, 245 bp, Glycine max
  Clone ID: PAT_MRT3847_123624C.1
tgggatttacctcatgtccctaaataagaaaagagataaaatattgtccaggaaaaggctcttgttcatatattttgttgatgatctgtcaggttagtagatggtcttgataaaaccaactggtaaaagggtgagaaaagtgaagaagaataacactcaagaaattgtagaacttaattaattaattgtatcccttagtcagttggggcatcccacaaatagtgggatttaacttctagttcatt

SEQ ID NO: 26162 - DNA, 507 bp, Glycine max
  Clone ID: PAT_MRT3847_123625C.1
ccacgcgtccgccgacgctataaacccacacaccctcctacatcgtccgccatctatctatctctatataaaaccaaatctcgagtctctcttctcttgctgtgcactattcttcgggcttcccggtccatcgtcgacggcaacgccacaacctttttctgctctatcgacgaatggatcgcgagcgcctctcccttgcttctcctggatctgctaggagaaccgctgaacgctctgagcttgaacgctgtatgataaagacggagtgctctgatcccggatgcggtagggccgaacaggcgggttcctacttcgggggacagaactaccagaatcttggccagtacccgaagctagagcaccagcactacttcgattacagcacgatgattcgcgacgacggatactccgatgacaccgcgcacgatgtggtgcacagacactcaattgactccgtactgaatgtgactacaattgagatcaagacaatcaataccgattgactct

SEQ ID NO: 26163 - DNA, 391 bp, Glycine max
  unsure (1)..(391): unsure at all n locations
  Clone ID: PAT_MRT3847_123626C.1
gctttcgtatgcttggtttttcgtgagcggccgccctttttttcttttttttttntctgggggttcctncttttttgngttnntcccgctttttgctntcttgttgtttctctttttttttgccgtttggatcgtccctcgctgtgngcatttttaaagctgtttctcccggtcnttggtctagtcgttggtcctcnggatggctcctttttgttttttctttggtctgttgtgggtttttgntctctngttgttcggccttgcgtctggtggcttctgggcgngctttatcgggtcgtggtcctgtggtggggttgtttttatgttggtagtgcggggtggcttcggtgtcgggctttctgggttttcaggggggttcgtgtgtgtctgg

SEQ ID NO: 26164 - DNA, 248 bp, Glycine max
  Clone ID: PAT_MRT3847_123627C.1
ggaacgactactttggtgtggtgtcagtagatcaacattagattgcctgccgagctctttacggtgacagcacaagcacgtggcgcatacacgcacatatgcgatcaagctcaagctgataacgccgacgcccgactgtgaagactaagacccggtcctcaccttcatgttgctccttcttcctattcctcttcctcctagtggcgcacttcacatcgtcgctctccgagatgcggttctcctagata

SEQ ID NO: 26165 - DNA, 260 bp, Glycine max
  Clone ID: PAT_MRT3847_123628C.1
cgtgagttggagaaggttgatgctgtaagattaattaatatagtttttgatgaaactggacacttcgtgctgtatggaacaatgctgggcattaaagttataaatgtagagacaaaccggtgtgtgcggattttaggcaaacaagaaaatattagagtgatgcaattggctttgttccaggggatagccaaaaagcatcgtgctgcaactactatagaaatgaaagcttctgaaaatcctgttcttcagaatattcaagc

SEQ ID NO: 26166 - DNA, 353 bp, Glycine max
  Clone ID: PAT_MRT3847_123629C.1
aacaccaaaccaaacagttttagttttttaataggaagctggggtttatttaataggaaaggcatttgttttttgtttttttaaaacctaaaacttgccccataaccaaagtacattgttttttttttaggaaggccttttacttaacattttttttggtaaaatttttaaggggtttttttttaaaaacgggacagaaacaatccccccccccaaaaaaaaatttttttttttgggcctttttgaaactgggttggaaattttgatcctcgaactccaatttttttttttagcacaaagcttattttcagtccttttttttggggaaagtttcgttggccctttcgctggcg

SEQ ID NO: 26167 - DNA, 250 bp, Glycine max
  Clone ID: PAT_MRT3847_12362C.1
tggcaaaggtcgatagattatttaagtgatttattatctattactattgcatattggaccggtttgtttaaacttagagtaagcaattttaaaataagcggatttaaaaaaaatgcttatttaataagcagattggatttgtttatcagaataatcagaaaactgttgttttaagcagaagtagtttagacatttacactaaaagttcagaaatctgtttattttatttaaataagtgttttttgtaacg

SEQ ID NO: 26168 - DNA, 1036 bp, Glycine max
  unsure (1)..(1036): unsure at all n locations
  Clone ID: PAT_MRT3847_123630C.1
attgcacttttcatccaattctgtgaaatcactgttgttgtctattattttttttcctaacatgggagaagctccagaggtgttctacattaatgggggctcaaagtttggccatgaaattgaaacccaacaaaaccatgtgaatgatcagaaccatgagtcttcttggtacgaggaaatcatcgatgatgatctcaaatggggttttaaactcaacagtgtgctccataaagccattagcgagtaccaggacatagctctcttacatacaaaacgttttggaaaggctggaccttgtgatcaatgatgccaagtaagtaacttgcttactttattattaatgatttttgacattttacctttcatttatatattatttttaaccacaaaactatagtgttggatggaatcaattttttaaaccttaaatgaaaatttaaacttcaaaattttaagatgaaatatatctctttattactaaattattaaaggttttattttaagctttgaagattaataactatcttcttccacaaggtcaaataaactatctcaatagtccaatgacatttctcatttttgaagggctgaattggagaagagaaaggaaaagtttgatatcattgttggagatttggcagacccacttgaagatgggccatgctatcaactctacaccaaatccttctatgagaagatcctgaagcccaagctcaatgataatggcatttttgtgacccaggctggaccataaggtatcttcacacacacggaggtcttcacttctatatataacacgatcaaacaggttttcaaatatgtgattgcatacacgactcatgtaccatcatttgccgacacatggggttgggttatggcttcggaccaaccactatcgatttgcgctaatgaaatggacagaagaatcgaagcaagaatagatggggaacttctatatctaaatggtggcttggttccattcatctancaccatgaataanactgtttaccaatcgctgcaaatgaaactcacgtg

SEQ ID NO: 26169 - DNA, 907 bp, Glycine max
  Clone ID: PAT_MRT3847_123631C.1
ccacattgcacttttcatccatttctgcgaaatcactgttttgttgtctatattttttttttttccctgacatgggtgaagctccagaggtgttctacattaatgggttctcaaagtttgaacatgaaattgaaacccaacaaaaccatcatgtgaatgatcagaaccatgattcttcttggtacgaggaaatcatcgatgaggatctaaaatggtcttttaaactcaacagtgtgctccataaagccattagcgagtaccaggacatagctctcttagatacaaagcgttttggaaaggccttggtgcttgatggaaagatgcagagtgctgaaacggacgaatttatttatcatgaatgcttgattcatccacctcttttatgccatcctaatcccaagactgtgtttataatggggggaggtgaaggttctgctgctagggaaaattctgcgcgagggtcaatggacagagtgatcatgtgcgatatagacaaggaggtggtaaatttctgccgaaaatacttgattgtaaataaggaggcgttttctcataagaagctggaccttgtcatcaatgatgccaaggctgaattggagaagagaaaggaaaagtttgatatcattgttggagatttggcagacccacttgaagatgggccatgctatcaactctacaccaaatccttctatgagaagatcctgaagcccaagctcaatgataatggcatttttgtgacccaggctggaccagcaggtatcttcacacacaaggaggtcttcacttctatatataacacgatcaaacaggttttcaaatatgtgattgcatacacgactcatgtaccatcatttgccgacacatggggttgggttatggcttcggaccaaccactatcgatttgcgc

SEQ ID NO: 26170 - DNA, 191 bp, Glycine max
  Clone ID: PAT_MRT3847_123632C.1
catgcacccctacctaaacttcgaaatccgctcttgccactacaacaacatttattcattcacacctttcacaccgcgagccgaaaatatcaacggggggacgcacatttccccctataacacaatgcaacagaacgacaccctgcgcgtctgttgccgcccacctctacagtactctcctcattttccct

SEQ ID NO: 26171 - DNA, 516 bp, Glycine max
  Clone ID: PAT_MRT3847_123633C.1
cccgcgtccggttgcaagcaggtgggtttgaaactgctggagaaggaatcgctattgggtttgttgacactggcattgatcctacacaccctagttttgcagatgataaatctgaacatccattccccgttcctgctcatttctctggcgcctgtgaggttacgccagattttccgtccggttcttgcaataggaagcttgttggggctagacattttgccgcttctgctataaccagaggaatatttaactcatcccaggactatgcttctccctttgatggcgatggccacggcacgcacacagcttctgttgcagccggaaaccatggaattccagtgattgttgctggccaagtttttggaaatgctagtgggatggctcctcattcacacattgccatttacaaggcactatacaagagatttggaggatttgcagcagatgttgttgcggctattgacccggcagctcaggatgggggtggcataatatgcttggcaatcactcctaata

SEQ ID NO: 26172 - DNA, 518 bp, Glycine max
  unsure (1)..(518): unsure at all n locations
  Clone ID: PAT_MRT3847_123634C.1
ggggggaaaaagggtccaccccccccccaaaggggggggaaaaaagatccacccgccccccaaaaaaaaaggggccattttaagcaccctggggtaaatcctagaacatttttaaaaaaaaaagttttaaaaaattggccaattttaaaattttaggagggtaaaccccttacataagcgtgggggggtaaaaaaaaggggggctaaaaacggaaacaaaaattcaaaaaaaaagctaattctttaaaaaaaaagtcccccttttcaagggttgaatggaaaaaaagggttggcatgacttgaatccccaacattgaaaaccctgggcccccattataacccaaagttggaagaaaaagtttcttttttaaaaaaaattggcctttttaaaaaaaaaaaaaaaccaccctcctaacaaaaaaaaaaaaaaacagggggttgaaataaaaaaggtggtaaaaaaatttggggccccnaacatttaaaggaaaggacaaaccccgccttttggggaaggg

SEQ ID NO: 26173 - DNA, 1886 bp, Glycine max
  Clone ID: PAT_MRT3847_123635C.1
tacggctgcgagaagacgaccgcagggggacaaccagcaagtgagacattttttttttctcttttctcttaagccatataccactttggtcatactcataatcctttttcttcattttcactaagtccaccaacaccaagtcatggctcaaagacagatctttgctcatgtggtgattttgttgcttatggtcttagttggagccaggtttgctaaagcagaaggaggaggagaagctgctgataggattttggaactccctggtcagccaaaagtgtcatttcagcagttttctggctatgttactgttaacaaggttgctggtagagctctcttttactggctcactgaagctgcccaaaatcctctcaccaaacctttggtcatttggctcaatggaggtccaggatgttcatcagtggcatatggagcatctgaagagattggcccatttagaataaacaaaacagcttctgggctatacattaacaagttttcgtggaacacagtggccaacctattgttcttggaagctccggccggcgtaggcttctcctacgccaaccgctcctccgacctcctcgacaccggtgaccgccgcaccgctcaagattctctggaatttgttatacaatggctagaacgattccctcgttacaaaaaccgggaactttatatcactggagagagctatgcaggccattatgttcctcaattagccaaggaaatcttgacctacaacgcaaaaaccaagcaccccatcaatctcaaaggaatcatggtaggaaatgcagtgacagacaactactatgataacttgggcacagtgacgtattggtggagccatgctatgatctccgaccagactttccggcaactaatgagtacatgtgattttcacaggcagaaggaatctgatgagtgtgagtctgtgtatagctatgccatggatcaagagtttggtaatattgatcagtacaacatctatgctcctccatgcaacaactctgatggtagtagtagctctgccacccgccgcaccatgcgtttacctcaccgaccccatgtggattttaggcattggtctggttatgatccatgtacggaaaagtatgcagagatttactacaacaggcctgatgttcagaaagcacttcatgccaacaaaaccggtattccttataggtggactgcttgcagcgaggttttgaatcggaactggaatgatactgatgtatctgttcttccaatttatagagaattgatagctcacggaataagagtttgggtgttcagtggggacgtggactcagtggtgcctgtcacagcaacaagatatgcccttgcccagcttaagttgtcaactaaaataccatggtatccttggtatgtcaaaaatcaggttggagggtggacagaggtgtacgaaggggtaacattcgcgacagtgagaggagcagggcatgaagtgccactattcaagccaagagcagcacttcagttattcaaatcattccttacaggaaagcctcttccaaagtcctagaaaaccaaatagaagatggtgttaagaaaaaggaaaactgaggtgaaaaaaaaagaatgacaaaggaaattaaaaaagagggaaacaagtgtaaaagcctagaggtggtgctaatttctattgccttgttattgttccgaacaaattttatgacatttttcgttgtcaacaaattaacaaaacgggttggtggaaaaagaaagtgtccattctaaaatctcaaatgtgcatttttttcctctccttttttcctttttattgcatcttttggttaatattttttattatattcattaataagacgggaagatcaaatatcttgtgcacccagtattttttt

SEQ ID NO: 26174 - DNA, 470 bp, Glycine max
  Clone ID: PAT_MRT3847_123636C.1
ctgtttgagaatggatcgatgaatgatgctttataaatcaatacactttatgcccctcattctacctgggttcaccttcttcttcgaggtcgaagtcaccctagatcctgtctatgccttagaacgatcctgaattaccagccaccggccatcactctaaggttgaccatggaacccgacgacgatatgcacgacaccaacgatgtggagtccctcgtcgacgagaaatacagtggcgagaccgaggaccctcccatggattactacagggactacgacgactacgccggctagaacttacaagacgccctacaaaactgaccgaaatgcgactagtcgacccgaccctggctataccatactgagggaactggatagcacgcccaggcaggaacacgacataactacaccagcggcagtgctttccatacctcgggtatccgagagcctcctactggagaactacaact

SEQ ID NO: 26175 - DNA, 253 bp, Glycine max
  Clone ID: PAT_MRT3847_123637C.1
ggtcataatttgtggtagtggagagcagtatatggtgtcctctagtttaagcctatgataattgggcttttgtgcctaaacaaagacctttcttagcagtaactgagcagttagcagcagcaccgttgtttctttgtacctcctccgcacacaaccatcaataaacatagaagaagaaggacctaaccacctcaagagaaagataggtcaatggatcaatctttccttgtaatgctctccaatctactccacc

SEQ ID NO: 26176 - DNA, 373 bp, Glycine max
  Clone ID: PAT_MRT3847_123638C.1
gacacacgcagactatttatctctacatatggcgctatgtttctcaatttgactggggtctctgatcaaactaacttccaagttctgtaccatctccaacaccattcatttaggatgtactccatgtgaagaataacacctctacacgcttcttgctgatagctggaaataatctgattgaacctgaccttagatcagatcctagagaccaattctccatcaatggcggttgcgctctatgattacatcacatccagatatagtgaccaccacacacacccattaggatctcagatagcgacattttaatgctaccacccaagctagatgtctctttcggatcccgactgacgataacgggggctgacatgat

SEQ ID NO: 26177 - DNA, 2374 bp, Glycine max
  unsure (1)..(2374): unsure at all n locations
  Clone ID: PAT_MRT3847_123639C.1
ctttttagtttttattttacagtttttgtggataattctataactgtcaagggaggaaattggtacagatcaaagtttggttgtactttgccaactaaatatcatgacatcaatagatacttagatagattgatgcctttatttttatctttgttttgaactactatgattactggtacttttcttctggcagttgttacttaaaacttttgttttctctttttccttacaaaatttcttcagttattaatttttttaagtgaatgtgtttggcttgcaatcttcaatgcattttaagattgattaagctttaattcatctttttttttttctgtttttcctgacagcagttttctgtataggagtatgtgttgaatgattattgagttgcagcactgatcagttcttagaacatgaattcagcatccccgcagtttgtttccccgagaagtatgagtgtgtacgatccgatccaccagattagtatgtggggagaaggcttcaaaagtaatggaaatttaagtgcagccatgcctttaattgatgaggcagacatgaagtttgatagtcagtcagaggatgcttctcatggtatactgngagaacctaataagtatgaccaagaagctaggctcgagattgattcgttgtctgacacgcaattagtgtttagatatactactgatcatgtggttgctgatattgccttacaggcctatgtgcagcagttagaatcaagtcgtttgaagttgatgcagttggagcaagaacttgaacgtgcaagacagcagggaatgtatataggtggtgggttggattctaatcatctgggttttgctggatcagtaaattcaggaattacaacctttgagatggagtatggacactgggtgaatgagcaaaatagacaaatcacagaactgagaaatgctttaaatgctcatattggtgacgtagagctcaggattttagtagatggtatgatgagccactatgccgaaatgtttcgcatgaaatctgctgctgcaaaagcagatgttttctatgttatgtccggtatgtggaaaacaacagctgaaagatttttcctgtggattggaggctttcacccctcggagcttctaaaggttcttggtcccctgattgaacccctgacggagcaacagcgtttgaatatctataaccttggacaatcatgtcagcaagcagaagatgccctttcacaaggtatggacaaactccgccaaacacttgctgatagtgtagcagctgggcagttcatggaaggaacgtatattccacagatgacttctgcaatggagaagttggaagatctggtgagctttgtgaaacaggctgaccatcttcggcaagaaaccttggagcaaatgtctcgaatacttacaatccgtcaggcggctcgatgcttgcttgctttgggggaatatttccaacgcctgagggctttgagctcactgtggtctaatagaccccgggaacctgcttagtctcacaacaagattacaagagcgcaaactcataacatgaacgtgatgtgatgatgaatatgggtcagtttctttggcaaagagcatcaaaaccatgtgtcatgagaggtccaggattttcactttgcaatgggagcattgcagtgttattggtagtatgtgaaatacacaacagcaatgaacacacgtacaaaagtgcagctagcaggatttgtttccttatagaaaattggattgatgatccacttgtagctagcaggatatataatcatatcttgattccaggcagaatctcacaacttagatatagcatagtccaaggcatccacaacaaaatctgcacatcaggaagccagtcagtggacttcaacaaagaatctggactccacaacttggttaaagagagccaggacagaatttatttatatacctgcatcatctttggtgaaacacattggtggcttgatcctaaaaacatttccatgcagccctccttttccaactagaataccgagctctacaatttataggagtaaacagttactatgttttgtagaaattttggaaaagaaagcttcatatgcaattctttttattcaaccaaatttcttacctctgaatctttcgtgcaatgctgttgtttcagcctttgcaggtgtcttctcttttctatcggtgacaaattctatccccaccattaagcctcttcctcttacatctncaatgactggacatatataaaaattatcaaaataatcaacaaaattatggcatatgtatgttctatgtaatgaagtaatcaaaccatctagatatgggagagttattattggggaatggttttggcatggcaaatcacagccttt

SEQ ID NO: 26178 - DNA, 1868 bp, Glycine max
  Clone ID: PAT_MRT3847_12363C.1
gtttcccagtggcggggctagtagtaggcaatagaatagatggcagaggaagagtcttatccattgtttgagacaaggagggccaaaggaagggtcatttacacaatcttctctttatcactttttgtgggcattttgttcatctgggtttacagagtgagtcacatacccagagaaggtgaagatgggaaatgggcttggattggtttgctttgtgctgaactatggtttggtctttattggctcctcagacaccctttcagatggaaccctgtgttcagggaacctttcagacacaaactctctcaaagatacgaggagatattgccaagagtagacatctttgtgtgcacggcagatccagggattgagccagcagtgatggtgatgaacacagtgctatcagttatggcttatgactatccaactgagaagctgagtgtgtatctttcagatgatgctgcttcagatattaccttctatgctctcttagcagcttccctctttgccaaacattggcttccattctgcaagaaattcaaggtggaacccacctcaccagctgcatatttcaaaagtattgcctcatgcactcatccaaataatcatgtcaatgaattggtccccatcaagaaattgtaccaagatatggaaagccgaatagaaaatgcagctaaggtgggtcaagtacccgaagaagtacgcccaaagtataaaggattttctcagtgggattcatatacttctcgacgtgaccatgacacaattcttcaaatattacttcatggaaaggactcgagtgccaaagatgtagatggaaatgttatgcccatattggtgtatttggctcgcgagaagagaccccaagttgcacataacttcaaagctggagcaatgaattcattgttaagggtgtcatcaatgattagcaatggggaaattatccttaatgtagattgtgacatgtactcaaacaattcccaatctctaagggatgcactctgcttcttcatggatgaagttaaaggccatgaaatcgcttttgtgcagactccacagtgttttgagaatgtcacaaataatgatctatgttgtagtgctctacgagtagttgctgagttggaagtcggtggaataactcgacgatgtggcctttttaaaaattaagctcttacctctcagctaagtttgatatcatcttgaagtttttcgggttttcagaatcagcctttgttatatgtgcaaaggtagcagaagaaaatgtttcccaaagatatgaaaaagaagttatggagtttggaaactcatccccaatgctcactttacttgcaacacttgcattgctcaatttgttttgtcttcttggaatgttactaaagcaagtattcataagtgaagggggtctcagaatttatgaaacaatggcattgcaagttctactaagtggagttttggttcttatcaatgtacctgtgtaccaaggcctctacctaagaaaagacaagggaagattaccaatatctgttgcagttaaatcaacaacattggctctaagtgcatgtgtcctctttattgccataagttaaaatgtttaatattctcacttttagtttaaagtgttcttcatttgcaaagtttttctgttttagtgaagtaatttagaaaacgtgaatgttagtcatctcaattcaccaatatcctgatgttatttattcaagtgctgaaaaattgtattacaaagaatatatcaaaactaatttaaatgaaggttctgaatttgagtatgagtattcctgatacaattatagatttaaatcaagtgttttcttttaagtacacttataaagcattttgatgtagttcatttt

SEQ ID NO: 26179 - DNA, 1891 bp, Glycine max
  Clone ID: PAT_MRT3847_123640C.1
acacaccaatccacttattcacattcaatttatattgtcaattgtttacaggattttcactttgcaatgggagcattgcagtgttattggtagtatgtgaaatacacaacagcaatgaacacacgtacaaaagtgcagctagcaggatttgtttccttatagaaaattggattgatgatccacttgtagctagcaggatatataatcatatcttgattccaggcagaatctcacaactagaataccgagctctctgcatcatctttggtgaaacacattggtggcttgatcctaaaaacatttccatgcagccctcctttttcaactagaataccgagctctctgaatttaatccataaaataacaaataaaaattctcgtcgtattaatcattgatctagcctcttctctctctctctctctctctctctgtctatgaacacaacccttctttccttccgcgacgacaacaacaacgatgaccaactacgcaattccaaccgacacaccttgcaccaaccttgagttcatctcacgcgccaattctgaaccaacacagtgacgggaaggaagggtcttgcgttgctctgcggtttgatagatagctgccctgttggcatgaagatttgagcgggaaaataataagacaacatacataacgttttctcaaagtggtttttttattttattttttttatcataagacggcagtttgcctgcactgatcagttcttagagcatgaattcagcatccccgcagtttgtttcctcaagaaggatgagtgtgtacgatccgatccaccagattagtatgtggggagaaggcttcaaaagtaatggaaatttaagtgcagccatgcctctaattgatgagacagacatgaagtttgatagtcagtcagaggatgcttctcatggtatactgggagagcctaataagtatgaccaagaagctaacaaacctactgataagggtgacaatgacaagtatgttagtcctgccattttggactttgaggaatctgtatttaatttggatatacaaagacgtcttgcacaaaatcgagaggctgctcgtaagagtcggttgaggaaaaaggcctatgtgcagcagttagaatcaagtcgtttgaagttgatgcagttggagcaagagcttgaacgtgcaagacagcaggcaacaaaactgcagggaatttatataggcggtgggttggattctaatcatctgggttttgctggatcagtaaattcaggaattacaacctttgagatggagtatggacattgggtgaatgagcaaaatagacaaatcacagaactgagaaatgctttaaatgctcatattggtgacgtagagctcaggattttagtagatggtatgatgagccactatgccgaaatgtttcgcatgaaatctgctgctgcaaaagcagatgtcttctatgttatgtccggcatgtggaaaacaacagctgaaagatttttcctatggattggaggctttcgcccctctgagcttctaaaggttcttggccccctgattgaacccctgacggagcaacaacgtttggatatctataaccttggacaatcatgtcaacaagcagaagatgccctttcacaaggtatggacaaactccggcaaacacttgctgatagtgtagcagctgggcagttcatggaaggaacatatattccacagatgacttctgcaatggacaagttgaaagctctggtgagctttgtgaaccaggaaactttgcagcaaatgtctcgaatacttacaatccgtcaggcagctcgatgcttgcttgctttgggggaatatttccaacgcctgagggctttgagctcactgtggtctaatagacctcgtgaacctgcttag

SEQ ID NO: 26180 - DNA, 510 bp, Glycine max
  unsure (1)..(510): unsure at all n locations
  Clone ID: PAT_MRT3847_123641C.1
ttctgaaccaacacaatgatggaatggaagggtcttgcgttcttctgcggtttgatagatagctagccatgttggcatgaagatttgagcgggaaaataataagacaacatacataacgttttctcaaaacggcagtttgcctgcactgatcagttcttagagcatgaattcagcatccccgcagtttgtttcctcaagaaggatgagtgtgtacgatccgatccaccagattagtatgtggggagaaggcttcaaaagtaatggaaatttaagtgcagccatgcctctaattgatgagacagacatgaagtttgatagtcagtcagaggatgcttctcatggtatactgggagagcctaataagtatgaccaagaagctaacaaacctactgataagatacaaagacgtcttgcacaaaatcgagaggctgctcgtaagagtcggttgaggaaaaaggcctatgtgcagcagntagaatcaagtcgtttgaagttgatgcagttggagc

SEQ ID NO: 26181 - DNA, 545 bp, Glycine max
  unsure (1)..(545): unsure at all n locations
  Clone ID: PAT_MRT3847_123642C.1
ggctcgagctctcaaccctttatccatctagaggtgcagcggctctcttctctgcacactccgaatgcagtccacactcttcaaccccacccattcccttatccacacttcaccacactctatcagacccaatcctggtcatgctgctctctccgatcgcgccttcatcgccgtggaaacccccacggagactgtgaatctgcacaaggactgttaccgcatcaccgagcccaaattgtatggcgcctcccaagccgtgctctacggcgactgtctctccgcggacgacatggccaaaccccacgccgacgcctgctcagcctggtacgagggcatcacctgcaacatgcaccttcttcacctctccgaggccgttcgcgacagcgctgctgctgctgacatggacaccttccgcttcacaccgttggcgtcaacgacgccatctacatgagcacccgtggcatgtgctacagccttcagtccagtgacctcattgcctacaggatcgataccganatggcataacactggtaccatggcaatat

SEQ ID NO: 26182 - DNA, 3981 bp, Glycine max
  Clone ID: PAT_MRT3847_123643C.1
tgtactttgccaactaaatattatgacatcaatagatacttagatagatagatgcctttatttatctttgttttgaactactatgattactggtactttcttctggcagttgttacttaaaacttttgttgtctttggcaaaagggaacaaagaaattccgaaccaacgcaatgatggaatggaagggtcttgcgttcttctgcagttctgatagctagccatgttggcatgaagatttaagcgggaaaataataagacaacgtatataacgttttcacaaagtggctttttttttattatcacaaggagtatgtgttgaatgattattgagttgcagcactgatcagttcttagaacatgaattcagcatccccgcagtttgtttccccgagaagtatgagtgtgtacgatccgatccaccagattagtatgtggggagaaggcttcaaaagtaatggaaatttaagtgcagccatccctttaattgatgaggcagacatgaactttgatcatcagtccgcggattcttttcatggtatatcggtatacccgaataagtcggaccacgccgccgggctgtcttctgagagaacacatagtacttccggacaaactccgcggacgactatgctgagcgtgctgttcaaaaatcttcaagggcatccgttcctcgctgatcgtgttcgtcgtgctcatggcggggtggctcctcgtctacttcctccgcgacgaaaccttgctaattcatctttcggaatgacttaatcaggcgaccgcggtcttagcttatcgttatggcggtgctgaccgtcgtgctgctgcttctcaccggcgccatcggcaacatcctggtggcgctgctcgatcggagcggtgttgatagtggcgcacgcgacattgaggaaaaccgatgatttgttcttggacgaagaagaggcgaaaggtttctcttgtactctgtgctcgtctaactagatgtcttatctgctctttctttctatgagatttgttaatttgatcaaatttacgtaaataatttttacggttcagctttggatttctttcggggtttttggttccgtgattgaacccatgacgaagcaacagcgtttgaatatctataaccttggacaatcatgtcagcaagcagaagatgccctttcacaaggtatggacaaactccgccaaacacttgctgatagtgtagcagctgggcagttcatggaaggaacgtatattccacagatgacttctgcaatggagaagttggaagatctggtgagctttgtgaaacaggctgaccatcttcggcaagaaaccttggagcaaatgtctcgaatacttacaatccgtcaggcggctcgatgcttgcttgctttgggggaatatttccaacgcctgagggctttgagctcactgtggtctaatagaccccgggaacctgcttagtctcacaacaagattacaagagcgcaaactcataacatgaacgtgatgtgatgatgaatatgggtcagtttctttggcaaagagcatcaaaaccatgtgtcatgagaggtccaggttgctcacatttttcctgcagttttgcgttatggagaagttgtaaatatgactgctagctcattttatgcatacgggcttgtaaataaattgattttggacgcatggtgtatatcggattgttgcaaaaatgaaatatttagaatctgccatgagtctgtgtggaagttggtcatgtaaaattcatataatgttatgttgggtgttttggaaaatgaatcaactctagactctcttagtggacgtaatttattttttgtgattgctaagagtagtttattaaaaatatcagttgttattagtttgttagaaagttgttaactctaataggctctatatttagagcattcatacagtcttattgtatctttattcaatcaactacaaaatgattttctatgataatcttcttctctactctggtctttatggggtgtggccacaatatgttggtgttacttgtctcgttccttgaagttctgatagtgatagtgctcaacaatattcatcgtgaatttcatttttcttggatggatacttgagtttctgtccaagatgctgagtgagaaaatattaatgtgctgaaggtttcttgttttcatttgattttctatatagtatattgggaaactaaacatacacaccaatccacttattcacattcaatttatattgtcaattgtttacaggattttcactttgcaatgggagcattgcagtgttattggtagtatgtgaaatacacaacagcaatgaacacacgtacaaaagtgcagctagcaggatttgtttccttatagaaaattggattgatgatccacttgtagctagcaggatatataatcatatcttgattccaggcagaatctcacaacttagatatagcatagtccaaggcatccacaacaaaatctgcatcatctttggtgaaacacattggtggcttgatcctaaaaacatttccatgcagccctccttttccaactagaataccgagctctctgaattcttcccttctttccttccgcgacgacaacaacaacgatgaccaacttctatcggtgacacattctatccccaccattaagcctcttcctcttacatctccaatgatgtcatgtatttgcatcagggatcttaaacgctgaatcaagtgagaaccaacatcagcacaatgagattgacgcttctccttgtcaagaactctgagcacagcaagtcccccggcagaacatacagggttccctccagcagtattaaatggaagctgttgagccatcacactcgctatttctgagttgtaactacagctgctaatggccaaccattgtcaatttcttgatctaaattggaaaaccaatttccaaaatttgcttatggcatgagaaggtgtcccaagaaggaagacaaaccctcaggcacgttataattaaaaaaaataaattatcgcctattaataattgatttaaggagtgagtgtttcttttttttctctctctctctgaacttgaactcaacccttccttcgttccgcgacaacgatgaccaactacggcacaattccaacctcctcctcgccttcgaccaacctcgacttcatctcacgcgccaagcagcgcgtcaaggagggcctcggaacccgccgtccatggaagctcatgttcaatttccgatccttcggtctccccgccggggtcggagacgccgtcgcgcgtgtgagggagaacatctcctacttccagatgaactacgcgatcgtcgtgctcatcgtgctgttcctgagtcttctatggcatccaatctcgctgatcgtgttcgtcgtgctcatggcggcgtggctcttcctctacttcctccgcgacgaaccgctaatcatcttcggaagactaatcagcgaccgcgtcgtgcttatcgttatggcggtgctgaccgtcgtgctgctgcttctcaccggcgccatcggcaacatcctggtggcgctgctcatcggagcggtgttgatagtggcgcacgcggcgttgaggaaaaccgatgatttgttcttggacgaagaagaggccactggattctctcctcccggtgctcctctctcttgatcccaatcttctctttctttctatgaatttgttatttggtcaatttagtaaataattttaggttcagtttggtttctttcggtttatatgtttttgccctttttcggaggggaaatttgcatttcgtgtctgtgaagagagatgcttggtgaagtgaaattcattttcttacgctttgttaatttaaaataattattatatcagagattttatcatcttttttttgtctatgattcccactttgaaccaaaatcgaaatttcttatgtggttaggtaattggtattggtttggaaatagaaccagagttagtagttccttg

SEQ ID NO: 26183 - DNA, 3675 bp, Glycine max
  Clone ID: PAT_MRT3847_123644C.1
cggacgcttgggcggacgcatgggccttgatgatagcttcccaatccaaatccaaatccaaatgcagggcaggccttaactccgattgataattggctacaaggatgggagaaagtaacggaattaggtctgcgccaccaccaaccttccccgaaactccctctttttcttcttctcaaaatcaccggctattaccatttgaccatcatcatcatcatcattacacctttgaaactctatagaccccatatgaatcacatgctttccacctcataacataaaataaccccacttatataattcattcttctcccttgttttttctttcttcattccccattaccatggtttccctttccaccaccccttttcttcccttcactgcaaaaaatgcttctactagaatccctcctcccacatcattctcttacagcaagcaacgtagtaacagggatcccaggaaggttgtctgcgcctgcatcgctcctcctcaaaacttcaagagccaggactcttccgccattcatttcaatggttcgtccaaatcagagcaattgagcactgcgcgggatcatgaggatgattctgatgttcttattgagtgtagagacgtgtacaagtcttttggggaaaagaaaatcttaaatggtgtcagcttcaagatcaagcatggtgaagctgttggaataattggtccctctgggactggcaaatctacagttttgaagattattgcaggacttcttgctccggacaagggggaagtttatattcgaggtaaaaagagagttggtttagtaagcgatgatgacatatctggtcttcggattggattggttttccaaagtgctgcactctttgattctttgactgttcgtgaaaatgttggttttctcttgtatgaacactcaagcatgtctgaggatcagatatcagagcttgtcacggaaaccttggctgcagttggattgaagggagttgaggatcggttgccttctgagttatcaggtgggatgaaaaagcgagttgctttagctcgatctattatttgtgacactacaaaggaatcaatagagccagaggtgctcttgtatgacgaaccaactgctggacttgatcccattgcatctactgttgttgaagatctgattcgctctgtgcacataaaaggacaagatgcacgtggaaaacctgggaatatttcatcttatgtggttgttactcaccaacatagtaccattaaaagagccattgatagattgttgtttctacacaagggaaagattgtttgggaaggaatgactcatgaatttacaacttcaactcaattatccatccgaacctattaatcatggtcctccacctcctccaacttccaacacacacatactaataaaaaccagatccaattctactacgtccctctctctctctctctctctacaatggcctcagccgcatcccccaccactttctctctcctccactccaccaccccgtcctcctcctcctccgccacctccgcctccccctccccctcgcgcgtgcagctctcctcctccctccgcgcccgcccgctgcgccgcctgggcttcgccgcggcggacccgctgctcgcggcgagtgtagcggcgcgcgtggcggcggtgagaggaggaggaaagggcgcgaggggggtggtgtcgatggcgaagaagagcgtgggggagctgagcgcggcggacctgaaggggaagaaggtcttcgtcagggccgacctcaacgtcccgctcgacgacaaccagaacatcaccgacgacaccagaatccgcgccgccattcccaccatcaaacatctcatccaaaacggcgccaaagtcattctctccagccacttggggcggccgaagggtgtcactcccaaatacagcttggcgcctcttgtaccccggctttctgagctcattggtatccaggttgtcaaggccgaagacagtattggtccagaagtagaaaagttggtggcttctcttccagatggaaggtgttctccttctagaaaatgtgagggtattacaaggaggaagaaaagaatggatccccgagcatgcaaaaaagcttgcctctctggcattatctgtatggtgaatgatgcatttggtactgctcacagggcacatgcatcaacagagggtgttactaaatacctgaagccatctgttgctggttttcttttgcaaaaggaacttgattaccttgttggggcagtatcaaaccccaaaaggccatttgctgccattgttggtggttccaaagtctcatctaaaattggagtgattgagtcacttttagaaaaagttgacatccttcttcttggtggaggaatgatcttcacattttacaaggcacaaggtctttcagtgggttcatcccttgtagaagaagataagttggatcttgctacatcactacttgcaaaagccaaggaaaagggggtgtctctcttgttaccaagtgatgtggtgattgcagacaaatttgctcctgatgctaatagcaaggtcgtgccagcatctgccatccctgatggctggatgggattggatattggtccagattctgttaaatcattcagtgaagcattggatactacccaaaccatcatatggaatggaccaatgggagtgtttgagtttgacaagtttgctgttggtacagaggctattgcaaagaagctggctgatctcagtggaaagggggtgaccacaattattggaggaggagattctgttgcagctgtggagaaagtaggagttgctagtgtcatgagccacatatctactggtggtggtgccagtttggagttattggaaggcaaagagcttccaggagtccttgctcttgatgaagccgtcccagtcgccgtgtaagacacttttcatcttggaaaattttcccatcctcaggtttcagtgttgtcaatcttgtaaaagagcatatgttgtaggacccttcggagtctgttagtgtaaattttatcttgcttgagttattattggcttcacacataaattgcgtgtaactgtaaaccctggctgagagccataaattcaaataaatcttttagttgctggccataaattcgaataaatcttttagttgctgccaaaaaaaaaaaaaaaaaaaaaaaaaaaagaaaagaaatagaagaaaaaaaacaaataagcgggtacgaataccaaaaaaaaaaaagccgctaccccttaaaacccagtttgcatttgggagccttgatggtcctatcagatattagaccagtcctgcaattttaaactagataacatatggattagggctggtcttggctacttccatggagtgtgcagataagaattagcaaaaaattgtttgcaccaaggattaacggtcttgtcaggattttggtattaaattccaatttgacttttacagaatggccgtttgcattggattaaaaagccggcaaggacagctttttttcttttttttcatttttaagttagaggacagcttattgttactgatgactagattcattggcaatagaaggtgcatattgcctgccccccatatatgttagaagagattggtgtaaccccatgtattaaatatttgttttatgcggaaacttgaaatgaagtattaaataattttttt

SEQ ID NO: 26184 - DNA, 729 bp, Glycine max
  unsure (1)..(729): unsure at all n locations
  Clone ID: PAT_MRT3847_123645C.1
cttagatagattgatgcctttatttttatctttgttttgaactactatgattactgttttctgtataggagtatgtgttgaatgattattgagttgcagcactgatcagttcttagaacatgaattcagcatccccgcagtttgtttccccgagaagtatgagtgtgtacgatccgatccaccagattagtatgtggggagaaggcttcaaaagtaatggaaatttaagtgcagccatgcctttaattgatgaggcagacatgaagtttgatagtcagtcagaggatgcttctcatggtatactgggagaacctaataagtatgaccaagaagctagcaaacctactgataagatacaaagacgtcttgcacaaaatcgagaggctgctcgtaagagccgattgaggaaaaaggcctatgtgcagcagttagaatcaagtcgtttgaagttgatgcagttggagcaagaacttgaacgtgcaagacagcagggaatgtatataggtggtgggttggattctaatcatctgggttttgctggatcagtaaattcaggaattacaacctttgagatggagtatggacactgnggtgaatgagcaaaatagacaaatcacagaactgagaaatgctttaaatgctcatattgggtgacgtagagctcaggattttagtagatggtttgatgagcccctatgccgaaatgtttcccatgaaatctgctgctgc

SEQ ID NO: 26185 - DNA, 457 bp, Glycine max
  Clone ID: PAT_MRT3847_123646C.1
tcctccatggctggatggcactgtacctggaaacttctgctatgaccctcttgaacttggatctgacccgtatagtctgatatggaatgtgcaagcagacctagtgcactgctaatggacgatgttgggtgctgctggcattataatttcataattcctaacaacgatcggcgtcttgaacactcattcatggtactcaactggacagctggaatacttcacggacactactaccctgttcatacttgaactctttttcatagactgggcctaaggtagaaaacgggctgacataatcaagccatgctgtgtcaacactgacccaatctttcccaacatcaagctcaccgaaaccgatgtggattacccatgcggcctttggtttgaccatcctggatggggaaccggctcttctcagaggatcagggacttgacaactgacgagatcactaatgga

SEQ ID NO: 26186 - DNA, 488 bp, Glycine max
  Clone ID: PAT_MRT3847_123647C.1
ctcgagtagattcccacctcccaattcattctcccgcaacaagcaacgtagtaacagggatcacaggaaggttgtctgcgcctgcatcgcacctccgcagaacttcaagagccaggactcttccgccattaatttcaatggttcgtccaaatcagaacaactgagcacggcgtgggatcatgaggatgattctgatgttcttattgagtgtagagatgtgtataagtcttttggggaaaagaaaatcttaaatggtgtcagcttcaaggtatgaacactcaagcatgtctgaggaccagatatcagagcttgtcacggaaaccttggctgcagttggattgaagggagttgaggatcggttgccttctgagttatcaggtgggatgaaaaagcgagttgctttagctcgatctattatttgtgacaccacagaggaatcaaaagatccagaggtgctcttgtatgacgaaccaactgctggacttgat

SEQ ID NO: 26187 - DNA, 409 bp, Glycine max
  Clone ID: PAT_MRT3847_123648C.1
gatcctaaaaacatttccatgcagccctccttttccacttagaataccgagctctctgaatctttcgtgcaatgctgttgtttcagcctttgcaggtgtcttctcttttctatcggtgacaaattctatccccaccattaagcctcttcctcttacatctccaatgatgtcatgtatttgcatcagggatcttaaacgctgaatcaagtgagaaccaacatcagcacaatgagattgacgcttctccttgtcaagaactctgagcacagcaagtcccccggcagaacatacagggttccctccaaaagtattaaattgaagcttttgagccatcacactcgctatttctggagttgtaactacagctgctaatggcaaaccattgccaataccctgatgcatattaaca

SEQ ID NO: 26188 - DNA, 475 bp, Glycine max
  Clone ID: PAT_MRT3847_123649C.1
tttgcatgatgctaggtcacggaattaatcgaccgaggctgactagctcactagcgggcggtcgtcctttttttttttttttcgataattcacaaaaagcctggatcaacatgactcgctatggcatacaagccaccatcatataaggccatggtgccattgtagaacgtatacctgaacaatatacagggccctaaagtgtgacaggtattaaagcctggctgaaggcaaacatcaaatcgcttcaccaacggcaggatctaaagcttgagacacccttcatgggagctggcgcctagcttcgagtgaagactgatatcgtataccatctgaataaacaatttgaacagcactaccaaccgggactgaccatgctggaagcaaatgtcagaagacgggtcttctatgctgcccagatcctgaaccatgctgaatgtcctctataggactgggccgtgcactatgaatccgggcg

SEQ ID NO: 26189 - DNA, 295 bp, Glycine max
  Clone ID: PAT_MRT3847_12364C.1
ctttggcacatccaactcaattacacctcctactaggactcttgaagctgcaaagggcctatctgaactattcccgctatacctcgggccttctagaagagcatgtaacatcactgataaagccatccaatcataaaaaccgacctattaattgattcagcccactaaccgtgacccattcattggaagcatggataccccagttacatccagtcctaagaccgcatgaaactagagcaacctgcccgcatacaaaaccgcattgagcccactactaagaaggatcgatgtgagc

SEQ ID NO: 26190 - DNA, 2110 bp, Glycine max
  Clone ID: PAT_MRT3847_123650C.1
attcccgggctcgaccgtccgcgtccggagaaatccaaaatcctctcatcacacccaatcgttcccccattgtagtccacgtccacatcctttcatccccccccactcgttaaattcccaaacacactcaaactcaaacactctctctttctctctctacaatggcctcagccgcatcccccaccactttctctctcctccactccgccaccccttcctcctcctccaccgccacctccgcctccccctccccctcgcgcgtgcagctcacctcctccctccgcgcccgcccgctgcgccgcctgggcttcgccgcggcggacccgctgctcgcggcgagtgtagcggcgcgcgtggcggcggtgagaggaggaggaaagggcgcgaggggggtggtgtcgatggcgaagaagagcgtgggggacctgagcgcggcggacctgaaggggaagaaggtcttcgtcagggccgacctcaacgtcccgctcgacgacaaccagaacatcaccgacgacaccagaatccgcgccgccattcccaccatcaaacatctcatccaaaacggcgccaaagtcattctctccagccacttggggcggccgaagggtgtcactcccaaatacagcttggcgcctcttgtaccccggctttctgagctcattggtatccagattgtcaaggccgaggacagtattggtcctggctcaagatgaacgctggcggcatgtcttacacatgcaggtcggacgggggtggtgtttcccttgtgcagtggcggacggttgaccacaattatcggaggaggagattctgttgcagctgtggagaaagtaggagttgctagtgtcatgagccacatatctactggtggtggtgccagcttggacgttattggaaggcaaagagcttccaggagtccttgctctcgatgaagccgtcccagttgccgcgtaagacaattttgagcttggaaaatttttccatcctcagatttcggtgttgtcaatcttgtaaaagagcatatgggacgcgtgggttcgaagtctgttagtgtaaattttatcttgcttgagttattattggcttcacacataaattgcgtgtaactgtaaaccctggctgagagccataaattcaaataaatcttttagttgctggcaaaaaaaaaaaaaaaaaaaaaaaaaaaaaaaaaaaaaaaaaaaaaaaaaaaaaaaaaaaaaaaaaaaaaaaaaaaaaaaagaaaaaaaagcaaacaaattggggcaccagaaatgtaaaatggaacgcggccctgtaaaaaaaacattaagtgggggagctcttgacgggtcccatcttctaaatactcaaagtattaaccaaattccccttttttgatcaggttaggcatgcaaaaaaattgcagaatcctgacccaacccataaaatttttattggtttgtgtaacgggtagagtcaaacccaagccaacccaacccgagaacaccataccattgagttgtgccagatagtgtgggatggttgaactaaactgaacttccttcaattataacgcttctccatgtccttttattgtttatcacataatgcaatcatctctaaactattatgtttataactgttactgttattttttgttttgctgtggcagtttgcatctgggagccttgatggtcctatcagatattagaacagtactgcaattttaaactagataacatatggattatggctggtcttggctacttccatggagtgtgcagataagaattagcaaaaaattgtctgcaacaaggattaacggtcttgtcaggattttggtattaaattccaatttgacttttacagaatggccgtctgcattggattagaaagccggcaaggacagctttttttcttttttttcatttttaagttagaggacagcttattgttactgatgccccccctcattggcaatagaaggtgcatattgcctgcaccccatatatgttagaagagattggtgtaaccccatgtattaaatatttgttttatgcggaaacttgaaatgaagtattaaataattcttctaaaaaaaaaaaaaaaaaaaaaaaaaaaaaaaaaaaag

SEQ ID NO: 26191 - DNA, 1502 bp, Glycine max
  Clone ID: PAT_MRT3847_123651C.1
cggacgcgtgggcggacgcgtgggcggacgcgtgggcggacgcgtgggttctgaaccaacacaatgatggaatggaagggtcttgcgttcttctgcggtttgatagatagtcagccatgttggcatgaagatttgagcgggaaaataataagacaacatacataacgttttctcaaagtggtttttttattttattttttttatcataagacggcagtttgcctgcactgatcagttcttagagcatgaattcagcatccccgcagtttgtttcctcaagaaggatgagtgtgtacgatccgatccaccagattagtatgtggggagaaggcttcaaaagtaatggaaatttaagtgcagccatgcctctaattgatgagacagacatgaagtttgatagtcaggtgcaagtctatgaaatccgtgctttgtttcattggcaaataaaaatgcctattctgcctactaaccaaattcgtttgtgctgtttaatacccagtcagaggatgcttctcatggtatactgggagagcctaataagtatgaccaagaagctaacaaacctactgataagggatctaatatggtcaaacatgcagatacaaagacgtcttgcacaaaatcgagaggctgctcgtaagagtcggttgaggaaaaaggcctatgtgcagcagttagaatcaagtcgtttgaagttgatgcagttggagcaagagcttgaacgtgcaagacagcagggaatttatataggcggtgggttggattctaatcatctgggttttgctggatcagtaaattcaggaattacaacctttgagatggagtatggacattgggtgaatgagcaaaatagacaaatcacagaactgagaaatgctttaaatgctcatattggtgacgtagagctcaggattttagtagatggtatgatgagccactatgccgaaatgtttcgcatgaaatctgctgctgcaaaagcagatgtcttctatgttatgtccggcatgtggaaaacaacagctgaaagatttttcctatggattggaggctttcgcccctctgagcttctaaaggttcttggccccctgattgaacccctgacggagcaacaacgtttggatatctataaccttggacaatcatgtcaacaagcagaagatgccctttcacaaggtatggacaaactccggcaaacacttgctgatagtgtagcagctgggcagttcatggaaggaacatatattccacagatgacttctgcaatggacaagttgaaagctctggtgagctttgtgaaccagttttttgggttaagggtattgttgaagttatttgaagctattgatcttgctgatcatcttcggcaggaaactttgcagcaaatgtctcgaatacttacaatccgtcaggcagctcgatgcttgcttgctttgggggaatatttccaacgcctgagggctttgagctcactgtggtctaatagacctcgtgaacctgcttag

SEQ ID NO: 26192 - DNA, 1267 bp, Glycine max
  Clone ID: PAT_MRT3847_123652C.1
aaggccagaaagatttggattcaaggaattgcaaattgggtcaattcgaatcttcttatcatacatatctcccaaaacataaaactttgaaccaaaaagattatcctggtcgtgtatgacaagaagattcttccatttttctcctttgccatggaagtccggaacaagccctccattgatgattatgtcaatctttggaatgattgggagagttcagtggaacaattgtcatatgacaagtgctataagttctggatgtttatgttgaaacatttcagcacagaaactaagaaactttccaattgcttggtgaagctaccggcaacatcaggcaacaatgaaatagttttgttagataaaaacgatgttttcattcctgataaccttcatctgaagaagctttttcagcaggagaaagtctttgtctggtatcctcagaacctggcaccattgtccaggtgtgagttgtttgacgtgtacaggaaaattggtgctcgaaatatctctgaatctatatgcatggaagagccgtccttgctcaatggtgttgaactcaagcaagttgatcctggtaatatttgtaatgtgaaggtgttggctaagcttattcttagttttctttcttcttctagcctaaaaatggaaccaaacaagaggcgtgaagctgttcaaggtctactcaacttgagtttctttgagacaaaggaagcagtcaatgtaagttacagtttgtcactatcatccggggccatcattaccaaaaaggcagacagaatggtacggtggcaagggcaaagttccaagtttttcactcaaacgaactggcaaagtggaaatgcaagtttaataaaatatgctacatatttctcagaagccatctcagagggtgttttgcgtgagaatcatgatcatgttcctgcactctctgagctcatcacattggcttttgtgctgaaattcaacaatgagacaattgaatttcttatggagtccaagaacttgcactgtgaggatgaggagttcctcagttctgccttcccttctaactaagtcttctccatagatttttaaatgttttaattcaggcttgcatgcttctatatactatgcatatgcctattaataaattatgtttatgaggttttttgtgaccttgtctatcagtggtgcgtgattactgaattacctaagtaaagtgtggtattggctgttaagatttgaagaattataagttactcactccaaaaaaaaaaaaaaaaaagggcgt

SEQ ID NO: 26193 - DNA, 171 bp, Glycine max
  Clone ID: PAT_MRT3847_123653C.1
cttaagggatttttccaggataacttacctaccatcttcttatgttttaccactcacccactctacctcataaaattttcaattcaaccttataaaacccacactctttcctcaaccttttattttcacttctttcactccaataccttctctatctttcttcttcctctt

SEQ ID NO: 26194 - DNA, 880 bp, Glycine max
  Clone ID: PAT_MRT3847_123654C.1
gtcgtgccagcatctgccatccctgatggctggatgggattggatattggtccagattctgttaaatcattcagtgaagcattggatactacccaaaccatcatatggaatggaccaatgggagtgtttgagtttgacaagtttgctgttggtacagaggtatgtatgcaagaacacccacccacatatgaaattccattcaaattttatgttaaaccaaagttcaccgtcaatataaaaaatgtccactctaagcgatgcatactcagagggatatgcagtaggggttaaccttcctaatgtgatttgcacatcttgtaaactacatgcttgttcatttatacacgtgtcagatgagggatgattcaaatgtcatctgcagttactacagcatattccattctgtttggctgataaatgtgtgcactgtacataattaatttgcattttgtacccttctttcaggctattgcaaagaagctggctgacctcagtggaaagggggtgaccacaattattggaggaggagattctgttgcagctgtggagaaagtaggagttgctagtgtcatgagccacatatctactggtggtggtgccagtttggagttattggaaggcaaagagcttccaggagtccttgctcttgatgaagccgtcccagtcgctgtgtaagacacttttcatcttggaaaattttcccatcctcaggtgtcagtgttgtcaatcttgtaaaagagcatatgttgtaggacccttcgaagtctgttagtgtaaattttatcttgcttgagttattattggcttcacacataaattgcgtgtaactgtaaaccctggctgagagccataaattcaaataaatcttttagttgctggc

SEQ ID NO: 26195 - DNA, 457 bp, Glycine max
  unsure (1)..(457): unsure at all n locations
  Clone ID: PAT_MRT3847_123655C.1
tcgttggtttccctttccaccaccccttttcttcccttcactgcaaaaaatgcttctactagaatccctcctcccacatcattctcttacagcaagcaacgtagtaacagggatcccaggaaggttgtctgcgcctgcatcgctcctcctcaaaacttcaagagccaggactcttccgccattcatttcaatggttcgtccaaatcagagcaattgagcactgcgcgggatcatgaggatgattctgatgttcttattgagtgtagagacgtgtacaagtcttttggggaaaagaaaatcttaaatggtgtcagcttcaaggtaaggattatgtacttgactatgactctcttttggataaacctctcaataagaattgagcttctctcataacttaaaaccaatttatacacttaactcttatagaagctctntcatctaacttatacaaaagctg

SEQ ID NO: 26196 - DNA, 661 bp, Glycine max
  Clone ID: PAT_MRT3847_123656C.1
ctgctggacttgatcccattgcatctactgttgttgaagatctgattcgctctgtgcacataaaaggacaagatgcacgtggaaaacctgggaatatttcatcttatgtggttgttactccccaacatagtaccattaaaagagccattgatagattgttgtttctacacaagggaaagattgtttgggaaggaatgactcatgaatttacaacttcaactaatccaattgtccagcagtttgcatccgggagccttgatggtcctatcagatattagaacagtactgcaattttaaactagataacatatggattatggctggtcttggctacttccatggagtgtgcagataagaattagcaaaaaattgtttgcaacaaggattaacggtcttgtcaggattttggtattaaattccaatttgacttttacagaatggccgtctgcattggattagaaagccggcaaggacagctttttttcttttttttcatttttaagttagaggacagcttattgttactgatgactagattcattggcaatagaaggtgcatattgcctgcaccccatatatgttagaagagattggtgtaaccccatgtattaaatatttgttttatgcggaaacttgaaatgaagtattaaataattcttct

SEQ ID NO: 26197 - DNA, 523 bp, Glycine max
  Clone ID: PAT_MRT3847_123657C.1
cttgtaaccacaaacaaggtctgtacaacttgcgaggtggcatcacaatcattcctatattggaatatggcacaactagggtgtcctattcttacgaaattaactggagaactacttaaagggactttatcgcgccaaacaacttacgagtaacttcaatggagattagtgattatggaccattaacagccccatcattttctgaacaccatgtgaatgatgtgctgatgtccttcaccaactccatgtcgatcttgaaaaacaaccccacttgtgcatcccatgaagtttccaatggtcaacatggtgaatgttccactgctgctgactcccatgtatagcaatggccagagcttcatcattaatgaacgtatatggtgctacgtgttattaagaacttatcaaacatgggactaaggaatctgaatctccaattgatgacggccatcatcggataaagtctggccaaatcgagatcctgtctgccatattcccaatgaactactaatcgtgcactcacaaa

SEQ ID NO: 26198 - DNA, 767 bp, Glycine max
  unsure (1)..(767): unsure at all n locations
  Clone ID: PAT_MRT3847_123658C.1
ggcctcagccgcatcacccaccactttctctctcctccactccgctacgccttcctcctcctccaccgccacctccgcctccgcctccccctcgcgcgtgcagctcatctcctccctccgcgcccgcccgcgtgcgccgcctgggcttcgccgcggcggacccgctgctcgcggcgagtgtaacggcgcgcgtggcggcggtgagaggaggaggaaagggcgcgaggggggtggtgtcgatggcgaagaagagcgtgggggacctgagcgcggcagacctgaaggggaagaaggtcttcgtcagggccgacctcaacgtcccgctcgacgacacctagaggatcaccgacgacaccagaattcgcgccgccattcccaccatcaaacacctaatccaaaacggcgccaaagttattctctccagccacttggggaggccgaagggtgtcactcccaaatacagcttggcacctcttgtgccccggctttctgagctcattggtatccaggttgtcaaggctgaagacagtattggtccagaagtagaaaagttggtggcttctcttccagatggaggtgttcttcttctagaaaatgtgaggttntacaaggaggaagaaaagaatgatcccgagcatgcaaaaaagcttgcctctctggcagatctgtttgtgaatgatgcatttggtactgctcacagggcacatgcatcaacagagggtgttactaaatacctgaagccatctgttgctggttttcttttgcaa

SEQ ID NO: 26199 - DNA, 211 bp, Glycine max
  Clone ID: PAT_MRT3847_123659C.1
cgtggaaaaagttggtctgacgcagagaaaggtcaggatcaagatttgtatttcaagaatgctgtaaaatatgtggaagagccaatgatccgtttggaatcaattgcttcctctgcggttcgggcagctatcaaagttaatgcctttgttattatttgcttcacttcatctggaatagcttgcatattgattgctgagttcataccaacca

SEQ ID NO: 26200 - DNA, 563 bp, Glycine max
  Clone ID: PAT_MRT3847_12365C.1
ggctcgaggttctaggacatctggatttaagaagtactactatatacatcacgttttgcatccccaatctttgtcttatcaatttgggacggcacctgcagtagcagaagaagaagaagaacgataatagtagtaatggaaatcaaacctggtttgtcagcactcattactggtggtgcctctggaatcggcaaaggtcttgcactagctcttgcagagatgggtgtatttatcacgattgtggatttctctgaagaaaggggaagacaagttgcaagcctcgttgagaaaattaacaccaagtttcattctaagttaggatttccgtctgccatatttgtgaaatgtgatgtgactaatgcaagggatctagctgctgcttttgaaacgcacttgttgacatatggaggactagacatttgtattaacagtgcggggattagtagttctataccattccaaaaggatcaaacggatggcacccaaacatggagacacactattaatgtgaatttcactgctgttattgattccactcgccttgcgattaaaatcatggaagc

SEQ ID NO: 26201 - DNA, 366 bp, Glycine max
  unsure (1)..(366): unsure at all n locations
  Clone ID: PAT_MRT3847_123660C.1
ngttgagtcttaaatgtgctgattcaagctttggggataaaaatagttctcttgggggggatgttggaacaagctgtatggtttttgctccgccacaaaattttactggcggcagttctaccactgataaacctttagatgatgattttctgaaacctatagcaggtgtatgtgccaagagtgatattgctgaagcagatgcttctactatgcctcctacaagtgattcaggggtcaagggcaagtgtaaagcctatgaagaagatgatataggatctggttgttataaggagaaagtaaacaccgcagcaacagcacctaatttggctaatgaacaaaatgggaatctaacgaacaattgggaaa

SEQ ID NO: 26202 - DNA, 568 bp, Glycine max
  Clone ID: PAT_MRT3847_123661C.1
acctcacaaacaaaaagaaactcgtccccatccttcttttgatcctttcaatcatatcaatacttatgcttctcagcctcattctccgctcttcatcatctgctatgtctccacctagttctccacttttttctactcacaacaaaagctgcatcacatgcacctgagtcctcaaagcaccccaattccaccctaactgaaaaagagttcaaagttctctcaaaccttgttgctcttaaatccccatgcaacctcctcatatttggcttccaaccacagtaccttaccctctcctcaatgaatgcacctggaagcaccatctttctttatgatcatgatgacatgatagccaaggtagcaacaaactccaacaacactcaaacataccagcttgggtataatgtgccatctaaaaaggcttttaatcttctcaaacatgcaaggcagaaccaagcttgtgcaccaagttacccaacacagctgcttcagaaatcgaaatgcaagtttgcattgagaaatttaccttctgaagtgtatgaaaagaagtgggatatcattgtggtagatg

SEQ ID NO: 26203 - DNA, 1000 bp, Glycine max
  Clone ID: PAT_MRT3847_123662C.1
aaaaagtaactaattattaacttctccatttacatgctaaagaaaaggcctatagaaaaccaaagacaagcagtataaagaactatatcacactcacctaaaactgcaattcactgatataaataactatatcactagttctatatttcctatctgtgtaatcttgaatgatgagaatcccaatttatggaattctaggagactaggacccaggtcccaggtccagttcacactagcaactcctcaattttgaattttttactcatctgctttcttgaggccatttaacatcccatcaaccagcctgtctttgtcaggtatgaattctgggtcagcaacaaactagtttttttgagatctttgctggtaattccctaggtaccccgggtagacttggcagatgaatttaaaatatcagccaccaaagtcttgttcaagtggccaacattgtctggctttttgacactattctctccttccttcttgttgtgccacaaatccagagcttgccaaagagaaatgtcatgcttattacattttagttttccttgcttttcaggttgagaatctccttcagattcagaagagtcataatctgagactatgggttcataatcaggaagctttggtgtatcaagttcttcagctttctgacttaattttgactccatattactctggttgtaacctaatttctgccatggagattccatgttatcatcttccagggctgaatcagataattcactatctgggttcaagactgcatgatgagcatggctggcattgtttacttgagtttggaggataaaagattctccatcagaagcactaacagcaggaacagaaggaaaaatataagtggactctactttaacttctggcattatctgtagcaagggtgccaacttttggtaaccaagtttctgaaaatcaagatgatagccatacctatcaacaaacaatcttggataagaactgatcttatacccctcctcgt

SEQ ID NO: 26204 - DNA, 111 bp, Glycine max
  Clone ID: PAT_MRT3847_123663C.1
cgattatagattcgcttttgaatgttaaacaatgttgctcggggcgacgatcatgttgatggacaattttgaatggatgcctaacgttgatgactgtccttctcaatttca

SEQ ID NO: 26205 - DNA, 471 bp, Glycine max
  Clone ID: PAT_MRT3847_123664C.1
cggctcgagcggctcgagccacgtatagattgaacatacagtcatacattaaccacgttattctattgtctgtttctgattattggaaaccaaattccacacatgcaaactctctttcattgaaccttggttttgggacagtgcagtgaccatagcagaagaagctgtgatgtcaaacgcagcagagcaagctcgtagtttatttggaatttgtctctcacacagacccaaatggcaacaattcctcatttgttcttctggtttcttctttggatatctagttaatggcatatgtgaggtactatatagggtatatacacaagtacatgtactgattaactggttaattttcttcaatatcatttggtggtttgaatctgtaaaaccactgtaataggccgtggtcttttatgtttccttggagaagagaaaaaataatgagtttattggttctttctgtttgggggaacg

SEQ ID NO: 26206 - DNA, 550 bp, Glycine max
  Clone ID: PAT_MRT3847_123665C.1
caaatttacatcaacagaaatgagttacccacactttcttgttatgccttatccaattctaggacacatgaatccacttctgcagttctctcaggttttggccaaccatggctgcaaaataacctttttgatcactgagttcaaccaaaagagaatgaagagtgaaattgaccacttgggagcacagataaattttgtgacactcccagatggtttggatccagaagatgacagaagtgaccaaccgaaggtgattttgtcactcagaaacaccatgcctactaagcttcacaggctcatacaagacatcaataataataataatgctttggatggtgacaacaacaagatcacttgtctggttgtttctaagaacataggatgggccttggaagttgcacacaaattgggaatcaaaggggctcttctgtggcctgcttccgctacttcgctggcctcttttgagtccataccaaggctcattgatgaaggaattatagactctgaaactggacttcctaccagaaaacaggagattcagcttttacca

SEQ ID NO: 26207 - DNA, 162 bp, Glycine max
  Clone ID: PAT_MRT3847_123666C.1
acggctgaatgtacataggctataaggctatggatctcacttaatagcgctactgagatattaaatgttatgcgtatggttaatatttttgccatctttcccaaggattctgaacgattgagcttgaaataaaatttactgttgtgcaaaaaaaaaaacata

SEQ ID NO: 26208 - DNA, 405 bp, Glycine max
  Clone ID: PAT_MRT3847_123667C.1
ttttctttctttttttttttttttttttggttttattttttatgcgcagagcccatgtatattaccgtgtttgcaaagggagtataacaaaagtacaatcaaattgaaaaaacaaaagttctttttgtagtttaaaaaaactctatattatttttcactggcttggggcatacaagattaatttcggaccccagcaaattcgacggaatgtctcaaaattcagttgagaaaagtgccccctgttgggcaaccttatgagcgtttcccccttaatggccacaccagccattgagcgtccacatgctgtctacgatgaccaccgaccatcaggattctgaaccctaggacacggcttaggaccttgaaccctcgggcacgacttttggagcaccccctaccaggaaa

SEQ ID NO: 26209 - DNA, 460 bp, Glycine max
  Clone ID: PAT_MRT3847_123668C.1
tcctctagagcggccgctttttttttttttttttttttttttttttaatttgtttttttttttttttttttttttttttttttttttttttttttttaaaaacaccttttaaacgagggacttctttgcttggggcaggcgggcctaaagttaaacttgggccctttttaagttttcgttttacccttttccaaaatcaacccttttcaataacaaagaccaacttcgccggctttttcttaaaaacccagccaaaaagattttattttacccccaaatacaatccctccccccttttttctttttacaactgaatgccgctcagctggtttcccccaccctttttaggttggttccccctggcttggggtttctgctttttgggcttctggtccccccatttccttttttaaaaggaacctcccttttgggtggggagggtccggaaaaaaggaaagtt

SEQ ID NO: 26210 - DNA, 231 bp, Glycine max
  Clone ID: PAT_MRT3847_123669C.1
ccaacgatgatgcattataaggttttattgggtgaatcgaacatttgggaaagcaaaacatgaaaaaccattgggggggaagattccttattaaaaaggacaaaccggattctgcctaattgaatgtgtggcatccaggcgcttatacttgggatgacacagcccaaaccatgccttgccttttggaacccctgaaaaacccaatggaggcggatcggcccccctttttat

SEQ ID NO: 26211 - DNA, 471 bp, Glycine max
  Clone ID: PAT_MRT3847_12366C.1
tttttatttttttttttttttacttttatttttttttatttttatttttatgggttctgtgaccttcttattttagtcaatactatttcatatcataaattcacataatgaggcttaaatatccatacgaccagaaacaaaatcaaattaaatatgcccaaacaaaaaaaaaaaatagtcctgtataaacaaaagagcgaccgggggacaaccccaaaagaaaaccccctgacaaaaaagaaagtacccgccacccccctgaataaaaaaggaaaagttcaacagaaatcgttagaaaaaaataagggggaccaaaaaaatacaataaaacccccgcaagccgcacgcattctggggacccatatttaaaaaaaaaaagcgcggggtgccccctggtggaggaaaacaaaaaaaacccccacacatgtaaaaaaaaaaatgattctgacacaggggacccccccccgcggg

SEQ ID NO: 26212 - DNA, 202 bp, Glycine max
  Clone ID: PAT_MRT3847_123670C.1
ctgactgcttggcagatcaattggatagaccatgctgagaagaagaaggcatagaataaaaaaatatggtaagcagccctttttatattgaggggcttgttgggcattcaagtagccatgatctgtaagtatgttatacatcttgtacaagagtcgtgtatacatatgattcattattttaacgtactgcggagcattggat

SEQ ID NO: 26213 - DNA, 390 bp, Glycine max
  Clone ID: PAT_MRT3847_123671C.1
gtgtgtttttaccaaacctctgcctttattcccgcatctacagtgtgggagaggacgatcaataactgtggacgctgtactacacaccctttatttaatcacagcggaattgggacaagttattcttgagatttttcacactcaccgtggaggtcattcttcagaacctttctaaccatctgggtgtgaagacatatctgatgctttttgccaatcaaggtttatatgacatgctgattctgcatatcattactgcccttgggcagacagtccatccccatggcagggtttaaactccttgacttgtatacccttggacgttcagaatggcctggatggcatgccagccactggtttctgaagaggccttggagatgacctctaaggaat

SEQ ID NO: 26214 - DNA, 152 bp, Glycine max
  Clone ID: PAT_MRT3847_123672C.1
cttgaaactggtcatgaatcaagcgactctctttctcgatcctcgtagagccttactacagtcattacgcatgctcatggtttgcactgggtgtcgagttctgatggcatgttgcagagaatattgctgcgtcagaccgtgaatacaatggc

SEQ ID NO: 26215 - DNA, 466 bp, Glycine max
  Clone ID: PAT_MRT3847_123673C.1
atttttctttctgtcgtctttctcaacgaggaccagaagttctcgaaaactttcattcattccatgagatcctagggtgaacttgcgtttgccggaaaaatgagatagtgcaatctgatgctaattggctagagagctatgcaaaatgctatcacctgatgagaactgtattgacagtaccacagagaccttcccgatggggacaggtctagagccaagaccgtgttaaccaggatacgacgccattcgccctactttaagagctgccggacccagatcgaacgttactgagagcagccatgcccgatcctgatgaaatctcaaccgatgatgttcgagccaaagcgttgcctcagctcctccatcatgagaagctgaacgtagtaggggaacacaccctataagactctaagcgcaatcacttcgccatggcaatggaaattcgggatcattgccctggaaagaa

SEQ ID NO: 26216 - DNA, 459 bp, Glycine max
  Clone ID: PAT_MRT3847_123674C.1
acggctgcgagaagacgacagaagggcacccgagaatgtcccaatttataaaaatgaaaataaaagcttgaataataggaaacacattttatttcttcataaaattcaagtcaaacaatcatgacctaatttatctctaaaatagaacaaagacgcccctataccaagagggtagtggaccattcctacatctaagagggtccttcaagaccaccattattattattcctaaaagctaaaagtaacatcaacaaaaactgaaaatttctaacaaatactaaaatctagtacttcctcctctcattggagaccgttgtttgacaaagtgcatcgatcgcaagcctgttctctgggactctgcatccagtaggtccaagcattttctcattaacatgaatagaacattgctgcttgccaagacaaagctacaaaataatagtataccgccagcattaaaaa

SEQ ID NO: 26217 - DNA, 688 bp, Glycine max
  Clone ID: PAT_MRT3847_123675C.1
gttgtaaagctttacttggcaatggtcatcacactctctgttcacatgcaaaaggaagggaggctgagctttactgtaaaacagtatctcaagtgtctgagctggagatgctttttgggaggttgtggacacaagtgtcaggagtgccaaggttcacttcatcaggatgttctctgcacaagtcgggattgtccaattttttaccgacgaaaaaaggcacagaaagatatggctgaagcaaaattgcaattggaccgatggaacttctaagttttgccaaggaatttgataggcaccaaactctcaatggacctttggagcctctagctcatgagatgaagaaaggctcaagggaattgttagtgtattcccgtagaaagaaatgaggggtagaaaaggaataagctagggggcagtttgttagaggagagagtgggagagaatcaggggcagtttgttagaggagagagagggagagaatcaggggcaatttccttttcgttatttagtatccgtatggatagctttggaggattgattctgtcttttctgttttcttgggatagagagaacgaacctacggggtgctctatttaggagcttagctttgggacaagggagaccttctcctttgtaattttctgattttcagtataatacagaattctaacttttcgttttccttaaa

SEQ ID NO: 26218 - DNA, 250 bp, Glycine max
  Clone ID: PAT_MRT3847_123676C.1
tcctgctaggaagaggctgatgagagacttcaagaggctgcaacaagacccgcctgcagggatcagcggtgccccccaggataacaacataatgctgtggaatgctgccatatttggtcctgatgatactccatgggatggaggcacatttcagttgactctccattctactgaggagtattcaaagtaatcacctactgcgctatatttgtctagcatggtccatacccttatgtctcctgacgggggg

SEQ ID NO: 26219 - DNA, 814 bp, Glycine max
  Clone ID: PAT_MRT3847_123677C.1
tcaaaatttcccaaaaaagtcctccctcaacaaaacatagccaaaatccttaaccgaagttaagaaggtttctgtcataaattctttgatgttctgtttcgttgtcaatcatgtgtaaagagttctaataagtgaacaaaacttgccattctcccaaaaattatatgcatttgtattgttatattaagcgcttttggtgatataaaactattggtaatttatcaaattttattaaaacatgacatcatcttctccacctagcaataatgtgtgcttctatttggtaatgagtgtttcttctaggcatgtttcttaacagttcattcctactaatttggcaggtgcctggaggaaggagcagaggattttctgttgaagccagtcaaattgtcagatgtaagacgcttaaaagatttcatcatgaaagggaaagtgaaggaaggtgagaaaatatctcacaaaagaatgaggtcaattgattgcagtccacctctaactgcaacatgctcactattgtctcttccatgcgatccatcaccatcattactctcaccattatccacgaagaaggctagattgtgatcagagattgagtagtagtagtgtgctatgtctccaattttgcctacactagtgttcaaatcaaagcatgtagtgtattttgcatttgtttaccaatctacaccttaccttaggaacgagaaagctaatgtcagagtcactaattttttggcatcttgtttgtctactgatcttgcttatgtacagaggaaatttatcaaaatttataaaatagggcgttattttgaccaaa

SEQ ID NO: 26220 - DNA, 1572 bp, Glycine max
  Clone ID: PAT_MRT3847_123678C.1
tcacaatttcccaaacaagtcctccctcaacaaaacatagccaaaatccttaaccgaagttaagaaggtttctgtcataaattctttgacgttctgtttcggtgacaatcatgtgtaaagagttctaataagtgaacaaaacttgccattctcccaaaaattatatgcatttgtattgacatattaagcgcttttggtgatataaaactattggtaattcatcaaattttattaaaacatgacatcatcttctccacctagcaataatgtgtgcttctatttggtaatgagcgcttcttctatgcatgtttcttaacagctcattcctactaattcggctggagtggaggtggcataatcgcttgtcatggatttgcaaagatctctcagatttggatcctccgaatctatcgcctttattattttctttaaccctttacttttcatctcaccatttattatttattacgcgtccttccttctctctccctttcccatctaaataaaacccaccattttccacttccatctacttgtgttctgttgtgtactttctattctcataagataactaactcactttgtgtgatagagttctcattctcatggctattaccggcgatattttccggcagagcataacggaaatgcttgcggagtccccttccggtgcgccagaacttcacgttctcgccgtcgatgacagcctcgttgatcgcaaggtgatcgaacggttgctgaagatttcttcctgcaaagtgacggttgtggagagtggaacgcgcgctcttcagtatcttgggttggagggagagaacggttctcttgggtttgatagtgttaaggttaatctcataatgacggattattccatgccggggatgacaggatatgaattactcaagaaaatcaaggagtcttctgtgtttagagagattccggtggtgatcatgtcatcggagaatgttttgacccgaattgataggtgcctggaggaaggagcagaggattttctgttgaagccagtcaaattgtctgatgtaagacgcttaaaagatttcatcatgaaagggaaagtgaaggaaggggaaaatatctaacaaaagaatgaggtcaattgattgcagtccacctctaactgcaacatgctcaccagtgtctcttccatgcgatcctccatcatcatcctcatcatcattactctcaccattatcctcaaagaaggctagattgtgatcagagattgagtagtagtagtgtgctatgtctccaattttgcctacactagtgttcaaatcaaagcatgtagtgtattttgcatttgtttaccaatctctataccttaggaacgagaaagctaatgtcagagtcactaattttttggcctcttgtttgtctactgatcttgcttatgtacagaggaaatttatcaaaatttataaaatagggcgttattttgaccaaaaaaaaaataaatataaaaaatattttgcggccgctctataggatccaagcttacttacgcttgcattctacttcataactcttctatagttgcacctaaattcaatt

SEQ ID NO: 26221 - DNA, 829 bp, Glycine max
  Clone ID: PAT_MRT3847_123679C.1
cggtcccggaactccccgggtcgaccccacgcgtccgtaaaatttgaaatgattattttttagtccttgttttttttttttttatcctgagcccacttatttgaatcatgatcttgtgagtttattattatatcttcacattactgatctcgttttggttcttggtactgatttgcagtgaagaaaatttgtcttacataaatgccttctgtagatctgcatacccattcaattgatcaactgggttactaatcaaaattgcatagacagaaagatcagcagaccaaatgtttccactcccatatctcttataagtgggttcctcttctcaatctcaaaatttgaaaaccaattcaataccagttggactctttaaacagttttaaactaatttgaaatcagttcataaccagttcaaaatcaattcagtttagaattggttcacaaccagttcaaaactgatttttttaattcagttcgatttcaaattagtttgaaaactaatttgtagatttgagttaaaaatcaaattggttaaatcagttcgaaaactagtttgggttcgatttttttcctaaccggtttttgcactgccctggacaagactagtgtacgtgttttgtacagagagagcgagagtcacaggctacatacagatgttgctcccgtcatccacaatgccgtgaggacttcatctcatttagcagtcccttctattctaatatattttgagtctggttcactagtggacttaggatagtaatgattaaaaaagtttaaaatatttattgtgaaagttttaaaaaataaaaaattatataaaaataat

SEQ ID NO: 26222 - DNA, 402 bp, Glycine max
  Clone ID: PAT_MRT3847_12367C.1
tttttctttttttttttttttttttttttttttgctttttttttttttgttttttttttttttttttatacccctcccactggggcttgccttggagactgaaaaggggtgtggttttgttttacccaaaaccccaaattaaagggtgggccaacggggctttttctttatgcaacataaatttttcctggggaaggaaatcaaaaattcattctaaataggcccccttttgtttaattgggtgggggccccaagaaaaacccacggtgggatgggtgtccatacggttgaaacaaaccccggcgttttctacttttaaccgtgactagggttcattcgctcacggggggggccaacaaaaagggagcaagagggggccccacagggttgctcccgaaccca

SEQ ID NO: 26223 - DNA, 153 bp, Glycine max
  Clone ID: PAT_MRT3847_123680C.1
gagaggtggtgtttcttaaaaaaataattcttggggccaatgggcccatcggtaaatggtcccagggagaaatcaatcttttggatcaaattagaactttttcttaacaaaggtgaagcaaatatatgtggcttaacagaccattagtggggc

SEQ ID NO: 26224 - DNA, 453 bp, Glycine max
  Clone ID: PAT_MRT3847_123681C.1
gctgactcatctgtttaccaagaaaggctgcacatgtgttgcaatcgtgatacaacacctctcaattcgaaaaggtctgcaaaatatatcttaaaactcaccagacctaggatctcagacattaagatgcttgaacaagaaggaagtatccagaaacaccatcaggcctcaacatctatttgtgaaactagtatgaacttcattgatgaggttcagaaagcagattcgaaaagaagtcaaacttgcgaaccagtgtctaatttagtgcatcccttccattctgataagtgtgaggttgatgctaatgcagcaaaagttaaaggtacgttagaatctgattcgtctgtttaccaggaaaggctgcaaatgagttgcaatagtgttacaacacctctcaagtcaaaaaggtctgcaagaacagaaatatcttctggggattgtttggtggagggt

SEQ ID NO: 26225 - DNA, 386 bp, Glycine max
  Clone ID: PAT_MRT3847_123682C.1
tcgttttcgcgtgcgcgaagggttaaaagaatgcctctatatatagggggaggagctggtgcaaagaatgctgtgctcatgaatatgccaaatgctgttctttcaatgtggagatattttgctggagatcttgactttgaagtttctaagatgacttgtgcctacattaaatgtacagactctttctccatagcatttggaaattgcggatgatgacaccacttattttgagggttttccccacaagctggcgcagcttggagagattcaagaaaaagctgtattgaaattatcacaagcggaattacctccatttagttcaactcatgtgcgtgctgcaacatctcagttggctgatgggcgtccatattggtgtgctttggtgc

SEQ ID NO: 26226 - DNA, 260 bp, Glycine max
  Clone ID: PAT_MRT3847_123683C.1
tgcacgtccggccggatttctggtctacccacgcgccgttcattcggacgccacgcgccgctctaaagcgcggttttctgctcccaggctgtgccagatcttacgaaaatgcggaaacctttgcatgaactggaaattgaatttcccttcggtgtgatccgcagtttaattcacttaagggaattagggcctgcccccttttgttgaggatgctctgcctattagaaaatttccacacctgttttaattgtcttaatgat

SEQ ID NO: 26227 - DNA, 482 bp, Glycine max
  unsure (1)..(482): unsure at all n locations
  Clone ID: PAT_MRT3847_123684C.1
attcccgtggttcgaacccacgccgnntcccgcggnacgtcgtgtggcggnnacgcgtggtgcggaactgcgtgggtcggnacgacgttgggtttctttctttcaacgtaccttcttacgagncagnnatcctcaattcttcctttctccaagtttcaaaacccctttaattcccttcatttcccattggcnctcagnaagaaggcccacttgtcgcggttgggaaccccgctttcccgaaccttgccaacccgcccgaagccttcccccgggaggtagaaaaggaggcagtctccaaacccttgaagcccaagggctaaagaaaaaccaaggtaaacccaaaaccttaaaaaggtttttccagtaccacgncaaacccctcccaactcaatcctttccttacgaaggagatggaattaaagaacgccaattaccctcgcttgaaaggagaaaaaccggttcgagccaacacgcggattgcg

SEQ ID NO: 26228 - DNA, 266 bp, Glycine max
  Clone ID: PAT_MRT3847_123685C.1
ggagttgtccactaagagcatggctgtacaagctcttgtatcatcagcatctctgaccttcgcagccgaggttacaagacaaagtcttggctcaacatcactcgaatctcccattggcgtctcaagatgagccacctttcgtgtcatcgcagctgggccacgccatgtcaaacaaggatcagctagacccttgtggtttgcctcaatctcgagtctgtctcacgtgcatgggagccttccgggtgcctacggctttgagcctccgg

SEQ ID NO: 26229 - DNA, 511 bp, Glycine max
  Clone ID: PAT_MRT3847_123686C.1
acggctgcgagaagacgacagaagggaggtatcccaatctgttctaagcaaaggcacaaatatgaaactcggttaaacaactggatttcatgtgtaaattggaattatcacaaggatacaaaatgaatagaacaaaatgcctctggtaatagtcaagtagtctttcatcaccactatgcctagctatgacagcaccaagagcacaaacaccagcacgcccacagataaatgtcactttgctgcaactcaattaaaccaaaataatttcattttcaggtttcaacactgggccggaaccagtgttattaaacggcagatggcagatcatgtcaacaagccaaagatcttccttaaaaaaatatggctgagggtcttgcagattatagcagaaacatggtggctataaaaaattatacatagagacacacacccaaaatgtatactagaaaaccgcaactgtttagtttaggtttttccaaatactattttgtagttctgattcaattaaacc

SEQ ID NO: 26230 - DNA, 422 bp, Glycine max
  Clone ID: PAT_MRT3847_123687C.1
atcaaacacacactactcttctcttttcttctctacattttctgtgggtctcactttcttttctctaatcttgtaatctcttattgtcttaccccctctggtactccccgcttgtctgaatccctttctgttaatcatccgtctttcaactcgtgattgtatgggtttgcctcaccaaaaagatgcaaacttggaaaatttttctcgaaagccaggtgtttacagaatcgagaaccagctttttttttgggtggttttaaaaaattattattttctttcgctcagccgacagggttgattctgatccctgaagagctctatttctttttttatttgttgggttgaaagggttgactatgataaacctgtcccattcttttttggtgcaatatttaaaaaccacaggttgattttcttaatct

SEQ ID NO: 26231 - DNA, 240 bp, Glycine max
  Clone ID: PAT_MRT3847_123688C.1
gacgactgcaaggacctcttgcaatcagccatcgagagcctccagctcagcactgacatggttcacaacaacaacgtccaggccgtgcataaccaacaggctgatttcaagaactggctcagcgctgtcatctcttaccaacaggcctgcacggagggttttgacgatgccaaagacggtggtatgtctctgtatggattttgattgtttcaagttttaatttaattgactgtagttttg

SEQ ID NO: 26232 - DNA, 480 bp, Glycine max
  Clone ID: PAT_MRT3847_123689C.1
ggactttgcattggaccgaacaatgataggtcgcggaggaagagagccgtgaggagggggcatacttacacaagcgacccgcggagccccccgagggagctgaggcacgccaagagaggcatccaccatgaaagccccaaccttgatagctatgtgtacaccgaacaccatgacaccgcccgtcaatgcggaagggctcgtaccctcgatcggttagaggtcacgctcctctcttgtgcaaagggggttctttgggacaggagaaagcggagtgaaaagactacttatgcgcactataccatgattggtcaaagggtgggctctgtggacctcgcatgggaggcttcatgcaagctaaccctagtgtaatactttgacacatgtggatgtgcttgtacatacccactagctcggacgaatggatgcaaagttatttgccatacacatgatgcgactatcacctcagacatgttagctcgt

SEQ ID NO: 26233 - DNA, 1132 bp, Glycine max
  Clone ID: PAT_MRT3847_12368C.1
ccggccgggtcacgtctgatggaaaggacataaggaaatacaatctcaagtctcttagaaggcacattgctgtggtacctcaggagccatgcctatttgctacttctatttatgagaacattgcttatggacatgactcagcttctgaagctgagatcatagaggctgcaactcttgccaatgctcacaagttcatatcttctctgcctgatggatacaagacatttgttggtgagaggggagttcaactatctggaggacaaaagcaaagaatagcaattgctagagcttttgtgaggaaggcagaacttatgcttcttgatgaggcaacaagtgcacttgatgctgaatctgagaggtctgttcaggaggcgttagaccgtgcctgctcgggaaaaactactatcattgttgcacacaggctatcaactattaggaatgctaatctcattgcagtgattgatgatgggaaggtggcagagcaaggctcccattcactgttgttaaaaaattaccctgatgggatctatgcacgcatgattcaattacaaaggttcacaaataaccaagtcattgggatggcctcaggttcaagttcttctgcaaggccaaaagatgatgaaagagaaggctaacagctagctactcaaaatgaaaaaaaaaaggagtaatatgccatataccaattataattgttggcatttttgttttgaccatagtatggtttgtgtatcttccttcaactcctccaatttaagaatgtatcttcttgtcttcatgaatcttactaaggaagaatattacatcaatgagattgaaacagataaatagaagtccatatttatgaatttgcaaggcctccattttgcatctttgttccctttgctctaaagcatctgcaactgcaatgaacactgtcattaggccgtcaaggatagatcaatgtctgtagttaggctcaaacatcatcttcaaaagggttcgaattattgaagaatactatcaataaaattgaagttctgtacaaaagatacttttagatgatgcaaaggacttaatttcaatatatatgtagtgataagtacctcgtataattataaattatgttatgaagtgttaactttttaagtaa

SEQ ID NO: 26234 - DNA, 228 bp, Glycine max
  Clone ID: PAT_MRT3847_123690C.1
acaccatctaagacctatgactgcacgctgcacgcatgcgtgaactcggattgcggcgagggccaagcaacatttattccgagttccgcatcaaacactgcttgaactgtgaatttctattgccggagggcgggtcaacctaagcgtgtaccaattgcaatggtgaactcttttgtcacttttgtgacttgaacagctacccaatatttcattcgtagtctggtccat

SEQ ID NO: 26235 - DNA, 399 bp, Glycine max
  Clone ID: PAT_MRT3847_123691C.1
gttcagcaccacatcactgagttgtctttatctcgttctgctaaaaaagtatggcctcatttgtacgggtagccgtatctctaacccggatcgggctttccacttacaagactcccctttcactcatatagcggcgtgagactcgcacgatcaccatggaacctcccaaagttgccctgctgacaaagatccaatgagaccatctaaatggaaggaggagcactttgtgattgtctctttaactggacggggactactcatctatgggatatacccgctgttccacgaggcaaggccccgagagaagacgaattgacaaaagcataaccctgaggtctggagaatattaaaaatacaacgcgctcttagaaataatgctgctaccgcccagacttttcc

SEQ ID NO: 26236 - DNA, 128 bp, Glycine max
  Clone ID: PAT_MRT3847_123692C.1
atggctgcgagaagacgacagaaccgggatagtagtaaacaacgtaataatttcttgcggtcacattatatgtagcacagttagaacacaaccttggactgaggagcacatagtcaagtactctgtgt

SEQ ID NO: 26237 - DNA, 467 bp, Glycine max
  Clone ID: PAT_MRT3847_123693C.1
aaaaaaaagggcccaatttggtaaaagcaaattaccggcccctgggcttttattttttggtttatttggcccccctaacaaaacaaacaaagcctaaagggggttcggccctttgaaaaagccattaatttttttaggcatctctggacttgcaagggttggaacaaaaatcggtgggggcaaaaaaaccaccctggcctgggtgggagcgggggcccaaacaggttttacaatttgggggggatgaattcaacccaatatcttcacagctgcattggggaggcattgagcgggggcacatgccaaaaacacaacaggggtttgaaaacccatcatcatcaaaacctggggaccggacacttttgaaaaaacccaattccatgcgggcaggtggaacccccacaagggaaaaaagccacaaacacccctttaacaccaccatggtggtttttaaacccaattttatt

SEQ ID NO: 26238 - DNA, 161 bp, Glycine max
  Clone ID: PAT_MRT3847_123694C.1
tatttcagtgagttattcttgttcacttgatctcatcataatcgtcggcttctatttaataatatgccgatcataaacatctccctcctaaagccttaataatctactcacccctacacctttaaatcttctttcgcttatttcatcttaacctttatctt

SEQ ID NO: 26239 - DNA, 398 bp, Glycine max
  Clone ID: PAT_MRT3847_123695C.1
aactagatcatctcacgtccgatttaaaacaaaaaaggaaattgggctacctatatgggaatattaagatcggtattaattgtattatataatgattttaaacatataaatgaaactatatttaaaattttataataaatatgtttaaatatataaactaaatatattttaaacttatatgaaataatttatatacaattaatacaaggttattactatttattatatttgttttacaaaatctacttgttgggatgttggttacaatagagatggcactaggttgggaagaagaaaattcgtacttacaatcggttcattaactattaactattgggtatataccagcagatttattttttaaacttatgggtattcatgcatatctgcgatacttc

SEQ ID NO: 26240 - DNA, 251 bp, Glycine max
  Clone ID: PAT_MRT3847_123696C.1
aacgttttcccattcgtctcccctaagaaaacaactcgggctgaaccctcaaaaacaagccggccatacccattcactttaacccccccccccaaaaccaccggcctggttcaccgggatgggtccaccatggacaaatcataccaatacccaaaggagaattaccttaacgaccaaaccctcccgagaagagtctactcatactcgacctcttgcacaacgagcgaccacgtgacagccctagacggcct

SEQ ID NO: 26241 - DNA, 1284 bp, Glycine max
  Clone ID: PAT_MRT3847_123697C.1
cccacgcgtccgcttttattttttttttttttttggttctcaactattggtcctctttattccctacatagtttaagtcaacatagcaaaaattgccacgtaatatcagctattcatcctcattccaaagtcttcaatatagccatccaaggttgttcaagtttgggttttgagagtgagctcaacaatcttattgtgattaaagtctcatactttgggagttttctaaatctgggtttttcaattcacggcttctcaacatccgtttcaagagtagtcaccaagtctttttttttcgatttctgagatttccttggaaacatgattgtgtctgctctattgacatctgttggtatcaacactgctctgtgtgtgttgttcttcacactgtattctatattgaggaaacaaccaagcaattatgaggtttatgtgccacgcctgctgactgaaggaacttctaagaggagaagtcgtttcaagttagaaagactaattccttctgcaggttgggttgcaaaagcctggaggctttctgaggaggaactgttttcattatcagggttagatggtgtggtgtttatgcgcatgataacctttagtttgaaaacgtttacctttgctgggattattgggatctttgtgcttcttccagtcaattgttggggaaatcagctaaaagatattgatattgcagactttgtcaataactccttggatgtgttcactatatcaaatgtaatggctctcattggttatgggtccacttcagtgctgtatatattgtcactggattcatatgcatactacttttttatgagtataaatacatatcttctagaagaatttcttacttttattcttccgaacctcagcctcatcacttcaccattttagttcacagcattcccacttcctcctcaggcagcatcagtgacagtgttcagagcttctttagtgagctttacccttctacatatctgtcacacgtggttgttcgccgaacaggcaaaatccgaaaaaatgtacaaaagggttactcaattacgatctgattccactcagcagaagaatacgcagcgtggttttcctggactttttagccgaaaaaacagtgttatatattatgaaaagaactcagaggacattgcggagaatgcgagattgaagcagttcgaggcttcattggcaggagaagaggctcgagcagcttttgtgttctttaagtctcgttttggtgctgcaactgcttttcatttacagcaatcagtcaatcccacccat

SEQ ID NO: 26242 - DNA, 456 bp, Glycine max
  Clone ID: PAT_MRT3847_123698C.1
agaaaggtcaaaatcatctaaaaaattagattagagaagtacactaaaagcataaatgattgtcatatttgcaacaactgacaactaaaaggaaggattgggaattgtcattgttgactagttccatggataataataaatataatagaagaaaaacaaaacttaacctaaagaacaaatcctccttatattttgtctgtaacgtttgatctctagtgagtatactgaaaaagaacatgaatctaaaactgaaaactcctagcagatagatgcatgatgtcagacttaaaaaacattagacatgcgccgtgccttccgtgaattttgggtcctaacatttgttcttgccggcaggtccaattccaaaaccttttggatcagctgagacattctctataagctggctgcagtgtggatgagggctctcatctggaaactcaacagcatgctcaacaa

SEQ ID NO: 26243 - DNA, 301 bp, Glycine max
  Clone ID: PAT_MRT3847_123699C.1
atgattaactgttttgttttttttctgaaaggaaagattttttaaccaaaaaacacccgagggaacgcgcccggggccacccaggaatccccggcccgtcccagaaggcatcccagatttccctatggggagtaataaaaacagtgggggatagaacggaacaggagcttccggagccaaatggctccccgatgaaacatccaaaggaaggacaagcccaccccaaaaaggcggacccggggggggcccaatgagcgggcccactcacattaaaggcggggacgccagggcccactttaca

SEQ ID NO: 26244 - DNA, 178 bp, Glycine max
  Clone ID: PAT_MRT3847_12369C.1
tccaacggaagatatcttgtatacgggcgaaagaggctgctggctggttacaacccgccagtttgaggatgaggggctggatttaaatcggaccaacctggaatgtgcaactgcgtgcacagaagcatattgcctacctgaagagcttgatgctggcgatcttgtctcagaagaccga

SEQ ID NO: 26245 - DNA, 383 bp, Glycine max
  Clone ID: PAT_MRT3847_1236C.1
gtacatttcgttggatgaaattcagaggatctttcctgctcggcggggcatatgtaagtggaagacttgtgcgcccagcgaaacttcaataagggtttagtatacgcaagattcctgttctgagataagaaacagaatgtacatgtgcgtgctgtcgggtgtgatggctgggagaaaacagatgcattgaaaacagattctttttttataattataaaagaatttgcagggtgcttaaatacttctcccaaggataactttgacgctttatgaagcaatatgacctgaagtgtgtgggggacactctattactgattatcacccacgctgcacaacgggaacatatgatttgagccttaggcgctgccgagatctttgagaag

SEQ ID NO: 26246 - DNA, 284 bp, Glycine max
  Clone ID: PAT_MRT3847_123700C.1
ccaaacattctaacaaattttcaattttaaaacagcatttcttctctagcaacctttacttctcttcggccatctactatcaatggcctttctctaaattccctctcttaaactaaactctctttcaagccctctcgccacactttcaaatccaataacttcattagtaactccttcttaacaaattattgtcacaacactgtgtacttttatttttatcatcttggcaacactacatatccttcttacttatatacctcatatgcaccttcaccctacaaccc

SEQ ID NO: 26247 - DNA, 280 bp, Glycine max
  Clone ID: PAT_MRT3847_123701C.1
caaaagcttatcacaatcgaagatgtcttcttattatgcctgggattgcatgttaaatctttggatatgggttgagaagatttatgtgcacctagcctatcagaaattcgatggggaggcttggatgcctggttttgaacggcatggtgagatcttttgcgcattaaattgcacatactgtcaaagcactcgcttggtattcaggattcgtgctgcatttgatgaacaagccccatcttcttcaaaatttttcggcattttttccccaccttaacatgtt

SEQ ID NO: 26248 - DNA, 2941 bp, Glycine max
  Clone ID: PAT_MRT3847_123702C.1
cgattgttaaatctttacgtttgactggggacatgaattacgggtctgtatagtaaataggggtttttccaacggtgtcaagacaatgggagaatgcactggtaccagtctatgtcacatccctcgtcacacacccaacttcacgttagtgcctttccatttacaaaaacagagttttttttactaacactggatattcttcaaaagaaaatattggaaggaattgtcgatttcctcaggggcctgagaccgacaagaatgaagtggccaaaattcgggatgcaactagaaatggaagaagttattgtggcagacttttaaactacaagaaagatggaactccattctggaatcttctcactgtcacccccatcaaagatgaccatggcaatactatcaaattcattggaatgcaggttgaggtgagcaagtacacagaaggcatgaatgaaaaggcattacgaccaaatggattacctaaatcattaattcgttatgatgctcgtcaaaaggagaaagctttgggttccatcactgaggttgtccaaactgttaaggacccaaaatccattattaatgataggaatggtgatactgctaccatgcctgaagagcaagagaaattcaattttgattttgttttgccaaagtctgctgatattgggaatacaagcacacctggtagacaagcttctccactgaatatccaacgcatgagttctagtcatgataagagcaagacatcatcacgatcaggacggatttctttcaagggtttaaaagggatatctccgagttctgcagaggagaagtgaataatttgccctgaaatcatgatgaccaaggatatagagtggtctgaggcttttgagctttgacagagaatgagggacataaggaaggtatttaatgtatcgacaaaatttgacgtgactgaaaagactgaaattatcttagatcagatagatcctgatattcgagtagtatttgcatctgatagctttcttgaacttacggaatatacacgagaagaaattttgggacgaaattgtcggtttcttcaaggaccagaaacagatcaggcaactgtttccaggataagagatgctatcagagaacaaagggaaatcactgtacagttgataaactatactaagagtggaaaaaagttctggaatttgtttcacttgcaacctatgcgtgaccaaaagggtgaacttcaatacttcattggtgttcaactagatggaagtgatcatgtagaacccttaaaaaaccgcctgtctgagacaactgagcaacaaagtgctaagttggtgaaagccactgcagaaaatgttgatgaagctgtccgagaacttacagatgccaacttggtgaacagactatttctggtcaaatcatacccaacctgtcttttcaggacaacacaaagacgtcaaatcctctacgatagtcatacaaaagttaactgcaagagttgattaatttggcatgcaacattttcagagcataaaaagtggggatattatagagtgctagagagttctattgatatagatattttttgacggtgtgcaatgttcactcaggatctttggtcagcatctaatctgatttcatgctgcaacgatcacggggtctatgtcattcaagtgtaatagtgtctgttgatttggttatggtccaatactaccatcatgtgatctgccaatagacaacttcaaacaaattctaagttatgtaggattagcagaaaagtagaatgtacattgaataaagtcattttccgatagaaacaagcatcctagttatatgctcatcgacgatacatcaataatacacttttgtatatggcttattaaaaaatcaaacataatacaaattattaaaatatcttacttcagaaggatggtcatgttgtgttagctgattttgatctatcatttatgacatcttgtaaaccccaggttgtgaagcaagcagtacctggtaaaagaagatcacgaagtgaaccaccaccaacatttgttgcagagccagttacacaatcaaactcatttgttggaactgaagaatacattgctcccgaaattataactggagctgggcatactagcggtatagattggtggacccttggtatcttgttgtatgagatgctctatggtcgtacaccattcagaggaaagaatagacagaagacattttccaatattttacacaaggatcttacctttccaagcagcattccggctagtcttgcggccaggcagttgattaatgcactactgcaaagagacccaacaagtcgtataggttcaaccactggtgccaatgaaatcaaacagcatcctttttttcgtggaatcaattggcctcttatccgcaacatgactccacctccattagatgttcctcttaaattgataggaaacgatccagtggcaaaggatataaagtgggaagatgatggagtgctagttagctcgattgatatggatattttttgacagtttgcactgtttactcaggatcttaatttggtcagcatcttatctgattcatgctgcaacagtcggagtctaagacaatattcaagtataatagtgtctattgatttggttatagtcaaataccatcatgtgatcttccaatagacaacttcaaacaaaatctaagttgtgtaggaatagcagaaaagtagaatgtacattgaataaggacgttttctgaaagaaacaggcatcctagtcaagcacatcgacaatacatcaataacatatacttttgtagatggcttaaaagaatcgtacatgtaatcaaatttatttattaacagtctaataatcctagtgtagtttgtagggcgtttaagttcacgggcctaatgattttttatgccaatattagtgagaaagagaaaatgggaatatttcgg

SEQ ID NO: 26249 - DNA, 2565 bp, Glycine max
  Clone ID: PAT_MRT3847_123703C.1
gaaacacattacagaagaagcttaattattcaactgaggcaagacactagacaagactatttttaagcttctagtttcaatgtttatcttcccaaaaagagactgtggtggtggtacctttggtttgtacataaatggagaaactgaaagtgtctgctaagaatgatcctgctggcaagcctgaagaacaagagaagttcaattttgattttgttttgccaaagtctgctgatattgggaatacaaacacacctggtagacaagcttctccactttacatccaacgcatgagttctagtcaggataagagcaggacatcacaatcaggacggatttctttcaagggtttaaaagggagatctctgagttctgcagaggagaagtccatagttgaacctgaggttttgatgaccaaggaaatagagtggtctaacaatttggagcattcactaagagagagggacataaggcagggaattgatctagcaaccacattggagaggatagaaaagaactttgtgatttctgatcctagacttcctgataacccaattatatttgcatctgatagctttcttgaacttacggaatatacacgagaagaaattttgggacgaaattgtcggtttcttcaagaaccagaaacagatcaggcaactgtttccaggataagagatgctatcagagaacaaagggaaatcactgtacagttgataaactatactaagagtggaaaaaagttctggaatttgtttcacttgcaacctatgcgtgaccaaaagggtgaacttcaatacttcattggtgttcaactagatggaagtgatcatgtagaacccttaaaaaaccgcctgtctgagacaactgagcaacaaagtgctaagttggtgaaagccacagcagaaaatgttgatgaagctgtccgagaacttccggatgccaacttggtaagagaccagaagatttgtgggcaattcattcccaacccgtctttccacgacctcacaagaaggaaaatccttcttggatagcgatacaaaaggtagctgcaagaggtgaaaaaattggcctgcaacattttgtgcccataaggccgttgggttgtggagacactggcagtgttcatttggtggaactcaaaggtactggtgaactatatgcaatgaaggcaatggaaaagtctgtgatgctaaatcgtaataaggttcaccgctcatgcattgagagagagattatatcattattggatcatccttttcttccaacactatacacctcatttcagactcctacacatgtatgtttgattactgacttctttcctggaggagagttgtttgcattgcttgacaagcaaccaatgaagattttcaaagaagaatcagcgagattctatgcggcagaggttgtcattggtttggaatatctccactgtttaggtataatttaccgtgacttaaagcctgaaaatatcttacttcagaaggatggtcatgttgtattagctgattttgatctatcatatatgacatcttgtaaaccacaggttgtgaagcaagcgatacctggtaaaagaagatcacgaagtgaaccaccaccaacatttgttgcagagccagttacacaatcaaactcattcgttggaactgaagaatacattgctccagaaattataactggagctgggcatactagcggtatagattggtggacccttggtatcttgttgtatgagatgctctatggtcgtacaccattcagaggaaagaatagacagaagacattttccaacatcttacacaaggatcttacctttccaagcagcatcccggctagtcttgcagccaggcagttgattaatgcactactccaaagagacccaacaagtcgtataggttcaaccactggtgccaatgaaatcaagcaacatccttttttccgtggaatcaattggcctcttatccgcaacatgactccacccccattagatgttcctcttaaattgataggaaacgatcccgtggcaaaggatataaagtgggaagatgatggagtgctagttagctctattgatatggatattttttgacggtttgcactgttcactcaggatctttggtcagcatcttatctgatttcatgctgcaacgatcacggggtctaagtcattcaagtgtaatagtgtctgttgatttggttatggtccaatactaccatcatgtgatctgccaatagacaacttcaaacaaattctaagttatgtaggattagcagaaaagtagaatgtacattgaataaagtcattttccgatagaaacaagcatcctagttatatgctcatcgacgatacatcaataatacacttttgtatatggcttattaaaatatcatacatattactagttattttgataatggtacatgtaatcaaatttatttattgcccccaatattcgaactgggggagagtgaaaatgttggacagaagagcagtagaagagacgaagatgatacaaaagctgtaagattggatggagattctgtaattgctccctctaattctgc

SEQ ID NO: 26250 - DNA, 220 bp, Glycine max
  Clone ID: PAT_MRT3847_123704C.1
ggtattacctggaaaactgaaagaaatggtgctggctcacattatgcagaagaacatcctgaaacggaggatgaacaaaggcccagaaagattgatgccagattgagacagacaatcgttcctcactctgatgaggtttacgctctaatggaaacaaatttgttgaacgtgactcttgatgatgttgtagctggtaaaggttgcatgaaggatactaaaa

SEQ ID NO: 26251 - DNA, 128 bp, Glycine max
  unsure (1)..(128): unsure at all n locations
  Clone ID: PAT_MRT3847_123705C.1
ctctttgtgttttggctgtggacgtaaaataatggctctgtctttatggttnntgggctcttgtcttctatcttcttctncttcttctactatgtgntctcccnccatcagaaacccacactttcatg

SEQ ID NO: 26252 - DNA, 474 bp, Glycine max
  Clone ID: PAT_MRT3847_123706C.1
aaagatgattctataagggctgctaagtacacagaaagtcttgtttcgcttcataggggaaatgagtttagtcacaagtgtttttcgtgtagtttggttccagaccctctgctacatgatactgaatatcttgtttcattttaattttgatcaattttatatttttgaactttaaaaaaaataatgatttttgtcctttttaaggtgaaaatggtttatgatgagggatgaaaattactttttttttttaagttcagaaattaaattgatcaaaataaaaatataaggattaatactaatttttagttaaagtacacgactgaaaacatgtattaacctaaactatgttggtcttagtctgagactatgtttttggtttgctgtgttgctagtagatcagccttgttagttagttgtcacacattgctgtaatgggctgattacataattagataaatgtcatctttctttttc

SEQ ID NO: 26253 - DNA, 231 bp, Glycine max
  Clone ID: PAT_MRT3847_123707C.1
atcgcgagctgccgcccttttttttttttttgggcccaaatgactgccgacgtcttagactaattcaggctttcgacttaggtttccgaggcaacgtaattccggggaatatttggggtaaggttttattaatttccaaaaatttttttccattaaggaatatttagtcaaccataatttttgtggcaaaatcataaccatttcttctcacccttaaaattttgggaccgg

SEQ ID NO: 26254 - DNA, 128 bp, Glycine max
  Clone ID: PAT_MRT3847_123708C.1
aaagccctaagaatacatcccaaagcctgcagctcccaataaatcaaataagccacataccaatgcgccttgccaacagtcgggcagccagaatggaaaacgggacgccccctggagcaatcaataag

SEQ ID NO: 26255 - DNA, 493 bp, Glycine max
  Clone ID: PAT_MRT3847_123709C.1
aactcatcaagaataatttcttattgattaagctcttcccaaaattaaggagtagccaaacaataaatcatatgttcatggtggcaaactgcactggaaaacataataataaacaaacttttcttttgctatttcatcttttctagaaaattatcgctacaaagcacactaattctcataactggattttcccctaacacttatcaacatatattagtttagactaatacaatattgcagttccgaaatgctagcaatgcctaccttacctagcttcagcttttttggtaggtcacctttcaataactgcctagccctagtacacacagataatcattatacaaaaaaacaacccttccagggcttccactggactcaaatattttctgatactgattccaagcaaagctactaaaacttatgaacatcaaacctttgctgcaatatgtaccctatagttagttaattgtagattgatatggagcatactctc

SEQ ID NO: 26256 - DNA, 371 bp, Glycine max
  Clone ID: PAT_MRT3847_12370C.1
ggttaaaaaacttatttagtgcattttaccattaaacaataataacccgtccaagacctcaagcacgaacaaaaaaaaaaaaatgaggggggcatttaatcaaccaacaacaaaaagagggcgatctttagggaagaaacacaaacataaaaacccaagggaaaaaaaaacaaagaaatgtctaaggaaaaataccgctgaaagaactccacagggaaaagccaacaaaccaaggtgactacttctttttcggagcaaaaaaaggccccaaatgagggagaaacaaactcaggcccaatggtccacagaacgtcctttaagagcttctaggcattattacggacgaacctgtcccccaaaaacaacagggg

SEQ ID NO: 26257 - DNA, 189 bp, Glycine max
  Clone ID: PAT_MRT3847_123710C.1
gaatttatccacgcgcccgggttttttcaaggtacttcaagccccaaacacaaggacattaaaggcatggggggaaaattgaacggcgcagcaagttacgaccctcttaaagcaactacattgctaggccaaggcaagggtaccaaagccaatgctcttaaggacgtagtacccatcaacactggaaag

SEQ ID NO: 26258 - DNA, 401 bp, Glycine max
  Clone ID: PAT_MRT3847_123711C.1
gtttaaagacttaaatgaaacaactggactggatattttagggtattgtttggaatttctttagtttcaaaaccatataagtctaaaacatatgtttttttatttaatagaaatacattgataatgtgaatgttttttatactatcattcaattatgagtaattgttgacttttgtagtaacttctttaaaagtaatatctagagtgttttctaattgattgacaatgtaaaatcaatgtatcaaacgtaaaatcttaagatattccaatagaagtttgacccctccctataatggcttggttttcttttctttttatttaggagcttatatattccattttttttattgtgccttgatttgaaagaattttggggggagggtcattttatttttcaatct

SEQ ID NO: 26259 - DNA, 265 bp, Glycine max
  Clone ID: PAT_MRT3847_123712C.1
tacaggacaagtgaatagggaactcttgagtgtctgcactgccttcttgcccagtgagcctgcgaaccatctacgatcacaggaactgcgtgaactcataactgcccttcttgatctcatggatgttggtacacgtgccatccatgtacatgtcatattgcattggggtaggaatatcacgtatttccccccaccagttgcaagtggcttccacccactgacagcaaatttatcacattacattcctgccattctctcacaccta

SEQ ID NO: 26260 - DNA, 255 bp, Glycine max
  Clone ID: PAT_MRT3847_123713C.1
aaaaaaaaaaacctgattgtgctcttctcttcgaattgaccacaaaaccaacaaacgagaagaggagtgtgagaatatggggttggcgttcacgaatctgttcataaagttgtttgcgatgaaagatattaggattctgttggtaagtctcgatgctgctgttaagacaaccatgttgtacaatttcttgcttgtatatataggtgccatcatccccacccctagatttaatgttgacactggggagtacaagaa

SEQ ID NO: 26261 - DNA, 407 bp, Glycine max
  unsure (1)..(407): unsure at all n locations
  Clone ID: PAT_MRT3847_123714C.1
tttnnnngagaagttnagggcgcctncaaaanaaaagacctttattctttacaacactattaaattacaacaaaattggcagactgagttaaatgagagcatcttctttagataaaagaaaagagaaaacaactagaaaaagaacaaattttcagcctgccttctctgggggggggttgaaccaanagggaaaaattcctggataaaaacactcaattgggggggggaggggggggaacataaggatgccaccctccctagagattggactcagcaataggccaaagcctaaatagacatacctagcccaatgggatggatgcaaaacaggagaaagataaatgcagaacttacacaagggaagccagaaagggggggtgaaaagctgggccattttttcaaggact

SEQ ID NO: 26262 - DNA, 268 bp, Glycine max
  Clone ID: PAT_MRT3847_123715C.1
gcctgacccggccaagtacttgtggccattctcggagcagattccatcatacctgaccggagaaatccctggtgactacggatgggacactgctggattattaactgaacacggaaaactctctccggaacccggagctggtgggggaatcacaaaaaaagggcaagtgctgggcgctttgggcttcctcttccagaaatcctgaaaagaattggtgcaaaattccggggaggtcgtgtggatcaaggccggtgccacaaatcttttc

SEQ ID NO: 26263 - DNA, 421 bp, Glycine max
  Clone ID: PAT_MRT3847_123716C.1
cggctcgagcggctcgagcggctcgagacggctgcgagaagacgacagaagggcagcaaagtgactaaagatcggtcattcatggaggacagcattggcacatggagaactttgaaagcttaaaatggtgttccctcttcactattgttaagacaacagtggcttttgaagtaaatacactcatatgaaattaattaataattttactttttaagacaatatgtgttgtatgtgatcaattaggctaattctgattaggaataagacaatatggttatactccctataatgctatcttttttaaaaataaaacattattgcgcgaataaacccaaataggctattttgtatatccaattacattaatatatttaatttttatatttcaaatggttgtgtttcgcttaatcattaattctat

SEQ ID NO: 26264 - DNA, 229 bp, Glycine max
  Clone ID: PAT_MRT3847_123717C.1
tgtgcaaccctcgttcaactctgcaactcataaagaaggcagggtgtgttattatgaagagacacgtgcatcggatttgtgatgacctaaccctgggttctgtggacgagtcgtgtctattgtgacaccgtgatctggtgctgctcacccatggcgcgactcaaagagcgggtctggagcatcagcagaatgtaactgtggggttgaaattggccagggcagtaagggc

SEQ ID NO: 26265 - DNA, 409 bp, Glycine max
  Clone ID: PAT_MRT3847_123718C.1
aaactacaacacgtttttgacccaaatctgattctcttccttaaaacaaagaaaggccacgagttccaagtgtatacacctttttaagttgtttgttcaacaaaaactgccactacatttcttatttgaacaaagaaaagcacacgacttgaaacaaaaaacaccaacagcattgtgctgctgcttaaccagagatttctatggccgtaacattatgattcctaacctctgtgttaggaacagtgccaataggaaccccttttgccctagaaaccttcacttaaatgacttttgcatttgacggcaatacgaacctcctcatgaacttgacactgctacgctccacgcgatgccgcaggtcatacttatcttcattgcaaaagtgcctgtctcggatgatctgaagcac

SEQ ID NO: 26266 - DNA, 374 bp, Glycine max
  Clone ID: PAT_MRT3847_123719C.1
aggggcacaagtttgttgagatagctcgaaacaatatgatgaaaatgaatgtgcttgctttgcttgttgctacagttttggtagcatatgaatgccatggatgacactaccagaagtttcctctgcaaatgaaaactgggtttggtgggcaatacattattgatgtggcatgtactatttggaggcttggcgtgaaagcaaacaacgtactctagttgcaaactgttgatgcaccttgcggagagtacatagttgactactttctacgagacctatatagatcacattgcaaaacagatcaccaacatgcttatttatatgctaaattcgtcaaactcaccaacaaagatgtctttgtcttggacgtagacaac

SEQ ID NO: 26267 - DNA, 362 bp, Glycine max
  Clone ID: PAT_MRT3847_12371C.1
atttaagctaaattttattaagcacttttcaaagttttaagacataactgttctatctttgttaattataacttaaattattggcaaggtctttatcacaccaagactaatgtttatcaattattcttaaaaatcacaccaaaaaccgtgcacacaaaactcaatgctcaaactggagtggaccccccggtttaatccacttgaaaacttttgtggggttcaacgggggtacggtagtaggctccggtaaaaactgcttcaaaacaaagctttttctaaatttttaagagcagggaatatttatcaagacgctcagaaatggatggagccccccccttaatttttcccgtggccccccccac

SEQ ID NO: 26268 - DNA, 233 bp, Glycine max
  Clone ID: PAT_MRT3847_123720C.1
ccactggtgaacatcatgatgcatgctggtcacctctttgcctcgtagagatgcttcactggttgattaagagcactgaccatcctcgtatggctcacgatatggaaaggttattctacgcctgttcttgctgccaccatggcagagggttgttgttggaatatctaccctggtgcctaagacctgcggatgaattcttggtcctccagggtgctgcgatgtctatttggata

SEQ ID NO: 26269 - DNA, 272 bp, Glycine max
  Clone ID: PAT_MRT3847_123721C.1
tgtgtatcaacccatcaaacaagatcacgatgttgttaaacatgtctggtggagaggaataaaactccctacatctcaaaattgcacacaagttttttaacgcaaactgcttaatgaactgtgaatttgcattgattctttatcacaactatcatcaactttaacatacatccgattatcccatgaatcaaatttctcatgtattttaaaagtcactacattatgttaatctcttcatccactttataaatccctattcttttatacaattt

SEQ ID NO: 26270 - DNA, 527 bp, Glycine max
  unsure (1)..(527): unsure at all n locations
  Clone ID: PAT_MRT3847_123722C.1
cccacgcgtccgacaacccatcggtgaaattcaaaagccccgaaagcgtgacgcgcccactctcctcacagcgcgtaaacgacgacgtcgtcgtcgtcttcttattactactcctcaacgacagcttcccagcctgcgttttcttaaccgttcgatccgccgtcaagtcaacggaacagtcaatgtcttcaatcactataattgaacggttcgtcgtttggatcagtaatgagcgtaactcggagttatcagagactttggttagttccaagtcgtaaacgtcgtaacagagaaaattcgccattgccgctattaagctcgatttacccgagcccggtgggccgtggagtaaatacccacgcttccaggcccggcccacgcgcttataaaactctntaccctctgcaaacgccgttaagtcgttttttatgtttttcttgagttctggctccattgctagggtttcgaaggttgaagggtgacggaaggggacggagacccaacccgattcgaacgagcccgaagag

SEQ ID NO: 26271 - DNA, 492 bp, Glycine max
  Clone ID: PAT_MRT3847_123723C.1
tgccaggtgctgtgcacaacatccgcaaaatgaataggggtaatgggaagataaggtacacgaaagcaaagccacaacaggcgcaacacacgcagcgacgcacgacgcacgcgaaataaccgggccgtgggctgctgcatcggtagtatgctaaccgggttctagggcccgggtgtgttcaggcaaaaaacgaccagcctgggatatgaaagggcgtgctgggtatggtgtattaagtgcagctaggtggccaggggggggggtgaggggaacgggctggtgttgaagcgcgagcacgccgggtccacggtatgcgagaccaagcgcgaagcccgggggagcaaacaaagtggggtgggggggcccgaaagaagtacacatttggggtaactgggactgacaggctgtcagtacaggggctgtgcccgaagatttacagtagcgcgatacggcatggtaagctgctaggggcacgcgggcagcaagatgggg

SEQ ID NO: 26272 - DNA, 442 bp, Glycine max
  unsure (1)..(442): unsure at all n locations
  Clone ID: PAT_MRT3847_123724C.1
aacaaactgaaattatagctcctctctcgcgttctcgttctctcacaccacaccacatcggagtcttcacccgcacaaacaacaaaaccctattttttctatttccacactctctctgtctgtctctctccatcaacgccattccgtttttctccaaaatcacactcccctatttgcccctaaactcttcgtcttccgttttctctctgctccgcattcgcacaattgcctataccgctgctacgttgaggcggttattgaaacggttgcgtctcggtatcctcgtcaatcacttgccaataccgcttctagggttagtttcttcccctctctttctttcgctttctaattccccgaaaatttcccctctatctgtaaccctagcttcgggaggattttttcccctcacgtgcgtgtctttntagggcttcttttctctcga

SEQ ID NO: 26273 - DNA, 246 bp, Glycine max
  Clone ID: PAT_MRT3847_123725C.1
ggctattcaaaagtataggtgtattatgaatttttgtgcacaaataacacttaatattgttatgtgttgagattgtttaatatattatgtactatttgtgtagtgtgtacacacatattatctcttttccttcacctaaatcttgtaagtttaacatatctcgccttctgtttgtgctttgttacagttaaacatgagaatgagccgttcacaggatccacacccttcccgatctttcttcccttt

SEQ ID NO: 26274 - DNA, 220 bp, Glycine max
  Clone ID: PAT_MRT3847_123726C.1
ggattcgcgaaaatcctatccttcaggaccaaaaggaaaaccgttaaaagcttgcttggttatggccttaaatttaaaaaccttggttaaaaacctcccccagaaccattaccggaaaacccccccccaacccagtgcccagcatttccaacggtggaaccccaaataggacccttccctttacacccttgtcctttcctttcctttcccaaaaggagct

SEQ ID NO: 26275 - DNA, 343 bp, Glycine max
  Clone ID: PAT_MRT3847_123727C.1
agtgttgtggaaatgtggttggtcctatgatggcttatgggcctgtgattgatattgcttcatcttgtactaatgtagcttatgacaggcttcccttggtatgaagaggaatctatgcagatgcatcaagggcaatcatctgctggcagtggtggtagcggctgtagcatcattgattactttctatcggacacaatttctgggctttcattcttcaattggtaccttaacatgcctaagcctcctgttaatggttgttctgtggactctggtggaaggacctcttactgatccagcttcttgtatgcctcagaggtctacaattgaatacatcttatatata

SEQ ID NO: 26276 - DNA, 1432 bp, Glycine max
  Clone ID: PAT_MRT3847_123728C.1
gctcactgtcctttttgaccttgaatttaatgcacttccactttcacctcactcacatcattttctccctcattttcaacctttctaaagcacaatcctccatggagccagttcccgcctacatcacccaccacagctgggagccttccgtcgccatcaccgtcgccgccatcatcttcgccctcctcctcatggctatcatctcagtctacctccgccgttgcgcccagtctcacatcatcatcaccaccaccaccttaccctgctcctgctcccaggggatcaacaaggacctcctcaacacgttcccaacgctcttttactccaacatcaaggacctcaataaggccaaccaaacgctcgaatgcgccgtctgtctaacggatttcactcacaaagactcgcttaggctgctgcccaaatgcaatcacgtgttccaccctcattgcattgattcctggctgacatctcacgtgacatgtcccgtttgtcgcgcgaatctcagccaggaatcatcatgccatgtttccataaccgtccctcctcatggcgaggagggaagtttgggaaacatgacgacgacgacaacaacaacagaagccacccaagttgagcaaaggccaagcaatgacatcaaccaggattgtgttggagatcccacatcaactagtgatactaccaaaataatatatataagcgaggaacaacattcgtctagtgagctagcttgtgaggttgagttaggttcaaagacgaatgttaggaattctactatcactaatattggtgatggggttgttgcgtcggagagaaacctttcgaggtcgaactcgacggggcattcccttgtggaggagcaagggaagggtgtggagaggtacacgttgaggttgcccgaagatgtgaggaggtacattctagtgaaccatggaagaagtgttcaacgttccgcgagtgttaaaggggggtgttggagtgacagcgaagagagttacgtggggaagagggtggagaagaggtgggtgatctgcacgccgccatttgtggcgcaacatgattgaagaatttcgtcgaacaattggtctgcgttctgcgttgcgccttctataaagggtcgttgtcaattcttgcaagagattgtgagagtttggtgttacagagatgaagcagaggactgaaatggaagaagagtagagttctcaatgatcgagtcaactcgttatgtttcaaccctattggcttatgagtcaactcgttttctttctttccttttttttgcttattttttggggtgagagtgtgtgggatcagtggctcatttgcacattgtgttatttattcatttataatatacctagtattgttagtctaattattttcttatcatcttgactatatgaatttaagggcacttggttttgtcggactttgt

SEQ ID NO: 26277 - DNA, 683 bp, Glycine max
  Clone ID: PAT_MRT3847_123729C.1
gttgttgtgtccgagaggaacctttcgaggtcgaactcgacggggcattgcattgtggaggagcaagggaagggtgtggagaggtacacgttgaggttgcccgaagatgtgaggaggtacattctggtgaaccatgggaggagtgttcaacgttccgcgagtgttaagggggtgtgttggagtgatagtgaagagagttataagggaaagagggtcaatggagaggtgagggtggagaagaggtgggtgatctgcacaccaccatttgtgggacatggctgaggaatttcgtcgaacatttagtctgcgttacgctttgcctcttctctctgcgtctttgctgagaggaaaaggttgtgaaaaagtgaaggtttgagatgtttgggttgcttcaataaattggtcgttgtcaattcttgcagagattgtgagagtttggttgtacggagatgaagcagaggactgaaatggaagaagagtagagttctcaatgattgagtcaactcgttatgtttaccctattggcttatgagtcaactcgttttctttctttctttttttccgcttattttttgggggtgagtgtgtgagatcagtggctcatctgcacattatgttatttattctattttattcatttataataatatacctagtattgctagtctaattattttcttatc

SEQ ID NO: 26278 - DNA, 280 bp, Glycine max
  unsure (1)..(280): unsure at all n locations
  Clone ID: PAT_MRT3847_12372C.1
caccgaaaccgtagaaagtcctgcctttccttttgagagcataaacaacatccatagcgggaacggtctttcttttagcgggctcggtgtatgtaacagcgttccgaataacgttctcgaggaagatcttgaggaccccacgtgtcttctngtaaatgagaccactgatttttttaacaccacctttggggaccaaacgcccaattggcggtttggtgataccctggatgttgtaacaaaacacctttctgtgctctttgcttctctcttttccaacacc

SEQ ID NO: 26279 - DNA, 369 bp, Glycine max
  Clone ID: PAT_MRT3847_123730C.1
aaaacacaatatgccagcatacagttgataattatttttcagctccccaaattgataacaaacggtggtaacattaaggggacaatagagttcaacacaaaccaaccttattttcaagggtcattacagacccattacacataaaatttttttttaaaaggttggggaaaatccaacatcgaacatcacacagaaatcagctccggtttaaaaccccccacgaagacgcaacaccaagggcagagttgactccttttggatgttggagccagggggggcccttccatcctctagctgttggccagcaaaaataagcctttggtggcccggggggattccttccttggccgggatcttcgccttcacatt

SEQ ID NO: 26280 - DNA, 268 bp, Glycine max
  unsure (1)..(268): unsure at all n locations
  Clone ID: PAT_MRT3847_123731C.1
cgncatggaggccttgaaagagnaaaatggccacnntgatggaggccatgatgagcataaaggagataatggaggtcaatggcggcttaccgcacccgtgctaganctagagtaatgggtgaagtagaggaggtgcaagancagatgaaggccgacatgaaggccatgaaaganaaaatcgccacaatggtggaggccatgatgagcatgaagaagataatggnagccaatatggttgcnnttgccgctaccagcgctgttgctaagg

SEQ ID NO: 26281 - DNA, 406 bp, Glycine max
  Clone ID: PAT_MRT3847_123732C.1
gtaaaatcttttgttttcttttagattcctttcattcttcattctctttttcacctttcaatctcaatgcccagctataattcgatttgcctcaaatctcatttacgcacttcattatgcatgtcttaaaaaattatattcttgtttccacacactctcactcttttactagatttttatgctcgtggttactgtgcaaaccctaattcactatattttcccctttcttgatttattttaacgtttgatatcctggtagttgctctttttttttttttcttctttctgcgttttttcttcttctttttagttttttgcattgcctattgttggagactcccctttcattttgtataaagtaatctggaattaggtccaagctagtttgcatgctacacttacacat

SEQ ID NO: 26282 - DNA, 347 bp, Glycine max
  Clone ID: PAT_MRT3847_123733C.1
ggggaaaagaaagccctatctttttatatatacccctgcctgaaaaaaccacccagggggccaaatttttatttttgaagaataagggggcattggggactcgattaaaaaaatatttggggtctggggcaaccaccagttttgggtgggggtcaaaccacctctatatggcaacccctagggggaaaacctccctctttggggggaacttttttgggtctccagctttgacccggtttccataagcgggggcctgccctccaaggggtggtttacccaatgggtcaagggtggtagaccaaacagcatcccccttaaaaggtttgggtgggctacaagcaaaaatt

SEQ ID NO: 26283 - DNA, 235 bp, Glycine max
  Clone ID: PAT_MRT3847_123734C.1
cgaaactaaagtataatttaatggaccaaaagtgacggtaagtctttatatgtaggacttaaagttttacttgaagatatttcttcatcgtcatgattcttttcttttttccttgtacgactttgcagttttctttaactacttccggcgcatcttcaaaaatattttcagccatgcagagcaaattactcaggtttattttatatttacattgtcttcttgctttgccattttt

SEQ ID NO: 26284 - DNA, 565 bp, Glycine max
  Clone ID: PAT_MRT3847_123735C.1
ctgtcgcgtaccatccaacacacggttgccttcgcaacagaatacatcactgtctgttacctctttttaatcttctttatcgattgattgattattagacttgcccccaccaaagaacccctctctatagatgccagagcacgagtctatctttacaatcttcgatactcttatctaccacccaatacagaagacagaactttcatgcatcatcacaaagccaatcatgctcttcaactgcgtataattcatctgaacaaaacatataaaatgacgtatggagcgctcatcattcgcaccatttatatggaacaggtggtatggatctcctaactttcagaaagaacctcacgatcatgtctcaaaaggtgttaaataaaacccatccttcgcaaaatctcggctacgcttaagccatagcatttgcaatagatgagattgaactgctgtagaccaccgactcattgttgccttatgcggggtcctaacaaaaagatactcctgtaaatatatacgctcaaaagaaaaacgtcttaagggccttggattatacaaccacagcggc

SEQ ID NO: 26285 - DNA, 412 bp, Glycine max
  Clone ID: PAT_MRT3847_123736C.1
caattcagctcgcgagaggattatcatcctgtcttccatcaaccacccgaacctcgttattcttcacggatactgaatccacccgagggggctatttttagtctacgaggacgtccttaacggagccctcacgctacacctgcataacaccataggcacactcacgtgcatgtgaggctcgacatcgatttccaaacggcgttagccatggagtatccaacactatatctggcatagccaccaaattgtgcacatgcacataactctgtaaaaatattttcaaggagagggatatagcgattaacgatgatccatttaaaactcccaatgctttgggagcaccactattatatctcaagagcatacactttatgacaaggagtggactttccactcagagagatgagaatta

SEQ ID NO: 26286 - DNA, 180 bp, Glycine max
  Clone ID: PAT_MRT3847_123737C.1
tcggaaagttgggggctcgaagacaaacagatcccgcgctacccacaagactaagactatgcctaaagggatcaggggatgctagatataagactccgttggccccgtatgagaaatcaaagggttgggactacgaggggagtatagccgcatggctgacacttatataaaaaaacaagg

SEQ ID NO: 26287 - DNA, 128 bp, Glycine max
  Clone ID: PAT_MRT3847_123738C.1
aactgacttttaaaaaacaatacttttacactcaggacaagcaaactgtgagaactggcctcaacaacccagttgcccatatcaaatttgatgactattcattgcaaaagaatttatgcctctatctt

SEQ ID NO: 26288 - DNA, 325 bp, Glycine max
  Clone ID: PAT_MRT3847_123739C.1
cgtattcttggaagatcagaaaagcgcatataagacatattgactctgcttattagtcataccctcgctactataaaactggatttcaatgaggaccattgccactgatcattattcatcaatataaggacaccatagagttgaagtaatgactagaggcaaatgcatattcgattttctatcgaataggactagattctaccaagctggatatatgggaacataaatacagctgggataaatgtgctacaacaaaaatatagacaatctgcatgcttaaagaaaagagccatctgagacaattcataattatgactagccacaa

SEQ ID NO: 26289 - DNA, 457 bp, Glycine max
  Clone ID: PAT_MRT3847_12373C.1
aacaattgtggataatttatactgattaacatatttatacttccatactatgtgacataggattaagtggattatacaaccattcatgcatgggaaccaatacaataactgcatttttaaactgtgtacttaccctacattagtatattatacactatcgagcttaggatgactcggccttacttgctccaataaatttcttgtttataggagaggagttaccttgcagcattttatattgatactgcatttgaacttgcattgacactacacatcttgttgacttgcgttattaacatttcgccactgctcttatagctatgtgtacgtgttctacttgatgtggagcatacatttgcatagtggcttgtgtttcaaacatgtgactcactgccgtaggaggttcatattgtgcttgactttgggctgagagacgcactcattgaaacagacctgt

SEQ ID NO: 26290 - DNA, 418 bp, Glycine max
  Clone ID: PAT_MRT3847_123740C.1
aagcccggcccaacccacacgtcagcccacgcgtccgcccacgcgtccgttacggcgccaaaaaaaccaacaaaagggggcacctgaaaaacatttaatttccgaattaaaaaatctaaaccaggtcttggcaaccttacttgaatatatcacggcgtgtgtaatccaaaggtacccatcacacacacgccgataatatgggacaacagcgcagtttgtgcgcacagagcgcaaatttctcacaggtcgcttctagatactccgatatctgagagtgttgattatatactgtgcaaccatgtttgagattggtgtagttcacagctgatgaaataactgctatcatgaataactttaacgagcctggatcacttgctccaactggattgtttctcgctgccaacaaatacatggtcat

SEQ ID NO: 26291 - DNA, 388 bp, Glycine max
  Clone ID: PAT_MRT3847_123741C.1
aaaaaaaaaaaaaaaaaaaaaaaaaaaaattaaaaaaaaaaaaaaaaaagaaaaaaagagaaaaaaaaaaaaaaaaaaaaaaaaaaaaaaaaaaaaaaaaaaaaaaaaaaaaaaaagggggcgccccccatttagggacctcgccaccccggaaaaaaattccgacccgggccctgaaggggacccatttttcctaaaaggaggccgtataaaacctgggcgaaaaaagggcaaaagcttttcccggggaaaaattgtaacccgttaaaaattccaaaaaaaaaacggcccggaaacaaaaaggtaaaacccggggggcccaaagggggggccaacccaaaataaattgcgtggcccaaactgccccttttccaggggaaaaaccttt

SEQ ID NO: 26292 - DNA, 260 bp, Glycine max
  Clone ID: PAT_MRT3847_123742C.1
agcataggaacatataatgggacttctgcatactaatacagtcacaggcattccaaaaaaaacaagagaaattaatatgtaaagcagcagcacagtagcaggcccatttagcttgacgcgattattctttaatccgctgacatcctatcaccccgagcagaaaggaaatcggacgcatctaacttctatgcaagaaagaacatgagaatggcgtaggcaataatgcgaaaatactccaaacttaaagcagtgaacacctt

SEQ ID NO: 26293 - DNA, 573 bp, Glycine max
  unsure (1)..(573): unsure at all n locations
  Clone ID: PAT_MRT3847_123743C.1
ggctcgaggacaaaagcaggaagccgaagagtcgtctaaatatcatctggttttatgattttcttctctatgtttggtatggtagaccaatatgatcttataccattcataatttcagagtcttggtagtatattagtgttggagattcaacatagagttgtaatatgccccaaaatagtgtataggagaagggtgtaactttcaccttatgagctagatgtttaggttgagttagtctgtctaatatgataggattagaaactaatgttcatgaaccaatgattagaattattcacgaaccattgttggctgtcttatactatttataatttcagagtcttggtaccatcgcaactctcaccttatgggttgagttagtttgtccaatatgataggataacaaactattttcatgaacaaatgaatatcttttcttttattaataaataaaaatccagtatcgaatttctaatgcttacctagctnntgtattctctntactaaattatatgatatctcacgttgtacgcttttcaattttttttttcacccagcaaatttggatcattttt

SEQ ID NO: 26294 - DNA, 2116 bp, Glycine max
  Clone ID: PAT_MRT3847_123744C.1
cccacacgtccccaagtaacatttattgcattcgagaagcaaaaccaaccatctctatccaagatgggaaactttcatcactttttttcttgcataatgaattcttatggctcactcccttctctttctcctcttctctaccttctcttccgttatgttacttttgcagatttagtttgttggagctaggccatagtactctcatggagaacattatccaagaataggtgtgctgaaatttctggcgtgcagaagaccaataatcagaccataaagtttttaccgttttcaaatgataggcgtaaaaatggccttaacacattcaacatctttcccacaaatgtttcagagggctgcttcagctcagtttaggaggcctctccttcatcttgtgtccactcaagaatccaggcacaggtacctcacccaatgtgttccacttcacaaagcagcactaaaaggagactggaaagaggccaagaaaatactagaccaagaccccacgctagagctcaactccgccataacaaaaggatgggcaacagtgctccacattgcggtcggagcaaaccacgaaagcttcgtggaggagttgctgaaactaatgtcgcgcgaagacttagaactgcaagatatcaagggtaacactgcattctgctttgctgcagctgttgggaacgtgcacattgctgagagaatgcgcataaaaaatgcatcattgccaatgataaggggtggagaaggagtcactcctcttcacttggcagtgttacaaggaagaagtgaaatggctcggtatctgtttgataaaactagagaaacactgtacgatgatgattggtttcaactgtttctcatttgtgtaaactctcggctttatgaactggccctggaaatgctaaatcagaaggaatcgctagcttttgctcggggtgataacgatgagacagctttgcatgttttggctcgaaagcctttggattgtggttgccgaagtccgctacgatatccaaaacacgtcctgcatttgtgcaagaacatgaaggaccctccggtcctcaaacttacaagacgcgtgtgggatatatttcttaccctcgatgactctaagatgatgactgcaattagagaaccatctcaagtaacatttattgccgcagaagttggcaatttcgagtttctatctgtgattatgagcacttatccggatttgatttgggaattgaatacgatgggtcagagtataattcacgttgctgccttgcaccgccacgctagcatattcaatttgatacacgaaattggcccaagcaaagatctcctgttaacattttgggatgatgaaggcagcacgttactccattctgtcgcagaaatagcaccaacagatcgacttaatgtagtttctggagcagctcttcaaatgatgcttgagttgacatggtttgaggaggtaaaaaagaacatgcaaccatcatatatagagaggccaaatcatgaaggaattgttcctagagaactattcaccgagaagcataaggagttgttgaaaaagggagaatcttggatgaagcgaacagcaagttcttgcatggttgtttcaaccctaattgccacaggagtgttttctgccgccttcagcgtcccaggtggtaccaaagacgattcaggatctcccaattatttgaagaaacatttgttcacggtatttgcaatatcagatgccttggcattaactctttctaccgcctcaaccctaattttcttgtccatactcatctcaagatatgctgaggaagattttcttaggtcattgccattcaagttgatatttggactagtgtcactatttctctcaatagtcagcatgatgggagcattcagtagtgctttcttcataacatattaccatgctaaaacgtgggttgttcctatcaccattgctgtatttgtgttgttcccaatattgttatttatatatctacagtttcgtctctggcacgacatagtgtattctcactacatgtgtggttctttgtttagaccaaggaaacgcatgattcattagaaagattgagtacaagctcaataattattttttttttcttttgtctgc

SEQ ID NO: 26295 - DNA, 119 bp, Glycine max
  Clone ID: PAT_MRT3847_123745C.1
cttctacagcttgttctatcagaattgggcgctcacagtgcagagtatagatccaagatcagtttgggatggaaagtaggttttggagttccagcagcacttatgttcatgtgcacttg

SEQ ID NO: 26296 - DNA, 384 bp, Glycine max
  Clone ID: PAT_MRT3847_123746C.1
gaagaacatgggtttgacgaacaccatggtagtgctaacggtgtgtatggtgctacttttccttgtgaggggtactacaagtgccaacttgatgctaagtaaccttggcctgcgcatgaaaagtgatcatcatcagcactcaaatcatgatcagtcctcaaaaccatgctgtgatcaatgcgcatgcacaaagtcataccctcctcaatgccgctgttcatatatgaggctgaattcgtgccattcagcttgcagatcttgtaattgcacattaacgtctcctgcacaatgtttctgtgctgacataagcgcattctgctatgaagcttgcagacccagtgaggatgacaacgatttctactaatgaacaagtgttacgcatgt

SEQ ID NO: 26297 - DNA, 118 bp, Glycine max
  unsure (1)..(118): unsure at all n locations
  Clone ID: PAT_MRT3847_123747C.1
gccattgcggttgtngcnatccagaatcnccnaaccttnggagctcaccanccgaaanattcaccaaaggtttgccattgcggttgttgcgatccngaatnctgagatatacatgttt

SEQ ID NO: 26298 - DNA, 564 bp, Glycine max
  Clone ID: PAT_MRT3847_123748C.1
aattcttgcaaccttcttagttctcatctccttaggtattggccaagcaaccattacttccagctttttagggtctgcagatactccttttactgagatcatgtgtactaagtattcaaacttcttgcaaccaaaactgcattttttcctgttggcaccaactttgcttccttaaaggtttgtaggactatcttcaagtgtttctcatgcttcccctcatttatactatatataaggatatcataggaaaaaaaacaaatttgcataggaagggctgaagtaactcagtcatcaaagcttggaaggttgagagaacatttgtctattaggatatcatcggaaaaaaaaaattgcaaaggaagggcttaagtaactcattcatcaaagcttggaaggttgagagagcatttgtcaaactaaaaggcatcactaagaactcatagtgttcttcatgatgagtaccaaatgctgtcttaggaataatttggtgataaccagatttgagaaagccatggcagcacccaattcatctaataattcatcaatgataggaatgggaaattt

SEQ ID NO: 26299 - DNA, 391 bp, Glycine max
  Clone ID: PAT_MRT3847_123749C.1
ataattttttttttttatatttttttttcataaaaaatataatattcatataatagcccgcttttttttaaaaaattaatattccccttaattttttaaccatttatattatctaagcttttattaccaaacccatctcaataattttctatatttaaataatatacataaattacatttaaaactaaatttattcattatatcattccaactataatataccttaatctatcactctcaaaatttctccctcctctccatttttttcaccaaaatctcataaaataattccccctattctaaacttccaattttatctttcccccttcaaattttaataatccacatttttaatttgttaccctaaaattttctccacttcacctatttt

SEQ ID NO: 26300 - DNA, 285 bp, Glycine max
  Clone ID: PAT_MRT3847_12374C.1
gacatcatattcacatgtggtgcgataaacacaatggatacaagggctttctataaagtgctcgtggctttggtgacccgtatggttttcacatttgctatgtaccaccgcttcaccatcaagaccaatatcaactccaccaccgtgtggatcaattcatcgacgaatctgcttgctacttgccttggcacaactcctctaacgtcgtagaacacttgcaatcattctaactgtcaaattactcacactcatgtcacagatactgctgacgcccttgtttctact

SEQ ID NO: 26301 - DNA, 185 bp, Glycine max
  Clone ID: PAT_MRT3847_123750C.1
atgcctctctctgtggcagcactgtgtttagctatcttcactgactcagggcttcagaatcctctcacctagagatacagactcgtaccatgagatggtggtatttcaactaaaccagttttggatagcaaaaagttttgggcgttgctgcccccccatattgattgacacagaaccggttttta

SEQ ID NO: 26302 - DNA, 418 bp, Glycine max
  Clone ID: PAT_MRT3847_123751C.1
gtttatttttcacccatgaatactatgttaacatatgggcttaaagatggtaatgacagtactggtgaatatagcgcgattctaaaacctcatttggtacagaatgtgtaataatctaagtagtagacaacagaacactctacaatacagatattatcaaacaatgtttacgacaactctatatttacctattcgtagtagacaactgggctgaaaaacctgaagtatttagaaaacataaacacttttttgcatattgctaaaaattaatgtgttgtatttgcgaagaaaaagtttttctaaagaataaaaaccttcacgtacaccaatatagaaaatatgtgttgtaaataggttggaatgagtcattgtttattattcaaacacaatcaagttcaaaacttttttcaacatatca

SEQ ID NO: 26303 - DNA, 533 bp, Glycine max
  Clone ID: PAT_MRT3847_123752C.1
cccggctcgacccacgcgtccgtttatgccccactactgtacaactgcaagtcatagaggaagtctgggatttactcaatgaggatgaggtctctgcaacagtggaaacgacgtctgagcaattgctgatggctatatccaatgcagcatggtcagggatcggttccattacgactcttcgtctccaaggttccatacagcagcatgagttgatgattctcatcgattctggatcttctcacactttcattaatgacaagtggctgtcagaattaaaaggggttcggccattacacaatcagctcaatgtcagagtagctaatggacaaatcctcacatgctcccatcatttaccccaggctgtatggcacatgtccggtcaccagtttgtcaatgatctcatttttctgcctttaccatcagtcgatttggtagtgggcatggattggctgcaattgcatagtcctatgagagttgactgggccacaaatggatgattataccttatcgtggccctttggtttgcttacaag

SEQ ID NO: 26304 - DNA, 518 bp, Glycine max
  Clone ID: PAT_MRT3847_123753C.1
ctttgtgtttttgtctcttagaattatgtgaggtttgtaattgtttattttatagcttaatctttaatttttgcatctttatcttaaaatcaaatatcctttgcctagtcattgaatttaccgagtagcctaatacaaataagtcattgtgaatttaactttgtactcaaattgtaaaaatactacattgattgatatacttgtcatactatgctaaacctcttattccaaaaggggaccaacccgatcctacaaaaagaaaccaagtaaaactacatgaatcccactcagccttatcccatatgtttacactaaatgtaacactatcctttggcatttgaaaccaaattatctagcatatgaaaaaaacaagacaaatgtatcctataatagtttaagaaaggaaggatggacatacattgcatttatgttaaagaagacacaaaccacaccttaccacaattcaaaacatggatcttctaacatggatttgtcacactaatattaccttggtaata

SEQ ID NO: 26305 - DNA, 412 bp, Glycine max
  Clone ID: PAT_MRT3847_123754C.1
ggcaaacgccgcatctggtatggcaggccatgatgactgcaagttaaggtttttggagctgaatacaaagaggacactccggttcatatttgtttagattgaggagcagcagaagcaggtcattgtggagaagcttggtgagtcggcccatggctatgaagatttgactgtcagccgttctgctgatgagtgccgttatgctgcctatgatgttgagtatctgactgaagggaatgtccctaaaagctgaatgtttatcattgcatggtcctctgactcatcaagggtgaggagcaatatgatctatgcaagctacatagagatatgcatataggagctggatcgaattcaagaagagctgcgagcgaccgatcctactgagacgggtattgatgtgttcaataaccggacc

SEQ ID NO: 26306 - DNA, 328 bp, Glycine max
  Clone ID: PAT_MRT3847_123755C.1
gcttgaaccattatgctctattaatttccactgtgcagagtgatttcgaattacttattcactctgggcaagccaaaaatgactgacacaaaacactacgctgttgaccaaaggccacaccacctgctataaacaaattttatttgcgcaggggactgtgttgaaaccgccccacccagactataaactgggacagtccctctgctacaggggccgacatgtactcgctacaagcacaaccccaaacaagtgtcggaactggatcatacaaactacgctgtcttaacagggaccgtttttcccccacccaccgaaaatccttttgggc

SEQ ID NO: 26307 - DNA, 317 bp, Glycine max
  Clone ID: PAT_MRT3847_123756C.1
gccgcctgctcaaaattcaaaacccacatcctccctcctttttttttactaaacttctaatttaccttctgcccttttaatctctaactccaccttcaaaattctacattatccctcaatttattcatctgcatttcatatattcagttctcatcgaaaaatgtactttcaccaaagacccattccttcttcctgctaacacccacaaacccagaatcttaagaccaccaccaccaccaccacctattcgaaatcacaatctcatgctcttctccctctctacctcaccaacaccctattcttctgaatactcttct

SEQ ID NO: 26308 - DNA, 668 bp, Glycine max
  Clone ID: PAT_MRT3847_123757C.1
ggctcgagtactctcgcagtctagctagcctgcactacctaagtacttttgtgcccttaagctttgtctttgtaagttggttgtcatcgtgaagcacaccagcagtgtcgtcgtgaagcacgccagcagtttcatcattgtcatcaaccattctccatcattgtcgtgggtcattttccatcattgtcgtcgaccattctccatcactgtcgtgggtcagcttccaggtcatgttcctttctccctttctttcttatacatagtctctaaggtaaaagggctttgtggtgcccttctttgaatttggttgtatctgcacccctgttctttgcgcaaccatatagcttactgcatttcaaagaaactagcactcgattagggttagaagtatgatggaactgtgtaaatgcaacgaggcatccgttctgtctacgaaatatttaatctttattggagactaaaagtctagattcccttttgatgagattcaaccaacaatctgcgcaaacatatatgactcttggagaacttgttaaaatactaattagttggacttaattttatttaacttaggcttatacctgtttgatgaggggactgacaacatcatatagctttgatcctcagtattgaaaaaagttggatcttggtctggcttattagtcttt

SEQ ID NO: 26309 - DNA, 1003 bp, Glycine max
  Clone ID: PAT_MRT3847_123758C.1
aaggagagtcaagatgccaatttttagtaatctaatacaatttaatcgctggagcgactcgtaatcattacaagtggaagatccaattgcatattattgcataaaaaatgcagccctggattaaactctgcaaatgtgtgactgactctataaacttggttaggaacctagtagacatatgggcttaattaccacttgtttccatcaaatgaaagatttctacgacttcagcgaagctttactctatcagaatgaagcatttttggggctcaaattcagtatagcctacatcaactagacataaaccatcagggggtgctggaggagcagtagcacgcctacatgtggcatccatgagctttatcaatgcatcatcttcagcaccagcagcagcttctctaattgaggtcgccacaagcactcgaaccatcttacgcaaaaagcgattagctaccagctcaacgcacataacatttgtttcttctccatgatcagttgcaggcagtttgacttccatagctcgagcatggtaaacaaaacactcagttggtggaccatcatttcttgaagcttttgtatcacgggcaaacattttgtaggataacaattttccttctaattttcgcaaaagccgatttaccttgcttatgctgaacgcataggatttcttttcgttttctaactcatccttgctggcagaatcatgaatttcattatatttaaaactgtcataaaactccccattgtcactactttggtcagtataccctccattggtgagtggaaaaatataaaggtaacgcctccatttggcagagaaattaggatgaaagacacgtgacacctcagaaactgatatgaccctaagttttcctggtgctgcatgattgatagcatcctcaatatctcttggtttaacatccttcttccaagtgtagaaagaacagacttgttgaaggcctgtcactcctttgtctgtacgaccagcaacaatagcacaacc

SEQ ID NO: 26310 - DNA, 2156 bp, Glycine max
  Clone ID: PAT_MRT3847_123759C.1
gggtcttccccggtatagatatgttaatgaagccgttagcggaacaatgaaaccatgagggttctgagaaattggatagtggagacaatgattgtatcaagaccaaaatggaaaataagtcagatatgggttcttcaactccacaagatcctcatggaagtgatgatattagttcaagtcttgctaatgagatgaatgatgaatgcagtgacgcttctcaagaactaaacaaccaagttttggttgatggcattatctgttccaaatctcattctggggaaatgatgtctgatccagtttcagataaatgtatttctccttctagaactagtcacagtgaactagaaatgaagaataaagtagtggctgctcctccttgtggtatttgtggagatggaggggatttaatctgttgtgatggctgtccatcaacatttcatcagagctgcttggatatacagatgcttcctcctggtgaatggcattgtccaaattgcacctgtaaattttgtggcatagccagtggaacttctgataaagatgatgcatctgtgtatatcctacagacttgcatcttatgtgagaaaaaatatcacaactcttgcactaaggagatgaatacccttcctaataaaatcaattcatcaagcctttctttttgtgggaaagagtgcaaagagctttctgaacacttgaagaaataccttggtaccaaacatgagctagaagccggtttttcatggtgtctcattcatagattagatgaagactcagaggcagcttgcagggggcttagccagagggtagaatgcaattccaagttggccattgcactgactgtgatggatgaatgttttttacctgttattgatcgaaggagtgggatcaatttaatccgtaacgttttatataatagtggatcaaactttagtcggttgagctatagtggcttttacactgctactttggagagaggggatgaaatcattgcttcagcatctatcaggttccatggaactcagattgcagagatgccattcattggaacacgccatatatataggcgccaggggatgtgccgccgacttttttctgccattgaatcggccctttgctctctgaaggttgaaaaactagttattcctgcaattgctgaactcacacatacatggacaacagtttttggcttcacatatctagatgaatcactcaggcaagaaatgaagtcactgaatatgatggtcttccctggtatagatatgttacagaagctgttagtggaacaaggaaaccgtgaaggttctgagaaaatggaaaatggaaacaacgattttatcaagaccaaaatgggaaataggtcagatatgggtttttcaactccacaaggtcctcgtggaagtgatgatgttagttcaaatcctgctaatgagacaaatgatgaatgcagcgatgcttctcaagaactatacaaccaagttttggttgatgggattatctgttcccaatctcattctgaggaaatgatgtctgatccaatttcagataaatgtgattctccttctagaactagtcacagtgaactaaaaattgaggtgatccatgtcccgcagaagaaaaccttgacaagaagtgtcactcgtccactgctatgaattgtgattcatcggccaggttggattctgaaatggcagtcaatactctgcctactaaagaggtttgtatgaatgacgctcttgaagttgttccccctttaagccccttttccttgctgactcttttttgagatttctgaccttttctttagggcaaactgcagaaacaatagaagttgggagagtgaaaggtttttcagttgcaattggattgaaagtccacccactttccagatctaccttagagaagtgagggaactaaggaaaattgaaaagatgttgacacttgacaagggactccttgtaccatgtgccttcattcaccactactccaacgaacccttcactgctcggtccgacgccttcttcttgccggcggcagcgaggccctcttcgccacgtccttcatcccggtcgaaacggcgccgcttgcgcctcctcgccagtcctctagcgtgcctggtaggatgcactccctcactggcttggtggacgcgatgatcc

SEQ ID NO: 26311 - DNA, 155 bp, Glycine max
  Clone ID: PAT_MRT3847_12375C.1
aaaaagacaacccattttttttaattcaactaaacctggacgctgcaagacagaagtaaaatggccaattacctgcttaaccaatttaccatacaaagcggtgtgatacaatttgattgacgagaggacagccctcggacatgatcaaatttaat

SEQ ID NO: 26312 - DNA, 711 bp, Glycine max
  Clone ID: PAT_MRT3847_123760C.1
ccacgcgtccgacttaacctccttcaaatcctccatctctgccaaccccctccatgcccttctttccctcagcccctacctcccccgtgaccccttcaacgtcgccaccctctgccgtgcccaatagtttggttccgcgacgacctatgtctcctcgacaacgagcatccgtagaggtacataacagagaatgtctcggaacccaaaaggaatatcgttgttctgttcctgttggtggagattaactcgagaaccgcattcacttgcaacacctttttcaaattcaaagaatgatttacacgaaagagatgaaggagaggttaagtggacaggacaaccgctatgcatttatgaaccttattttgaaggattctggtcttttccacatcaaaaatctctttatcgaggaattggcctggtaagttgtgtgtgctttgtattttctgtaatattttttgttttctattcagaacttataatgagtggcttctgatttcaatatgatgcaatgaatgtactggatgtttgtggtccgataaagaccgaagactagggagaaatgatgttgatgctccttcttgtcctccactgcttaataatagttactatcaagatttacttggtgaatatggagccttttttgaattgcaaacagattgaacgtttacacaaaaatgcttggattggatttcagtcttggagagcaacaac

SEQ ID NO: 26313 - DNA, 190 bp, Glycine max
  Clone ID: PAT_MRT3847_123761C.1
ccacgcgtccgaattttaattccggcgaatgaaataaagatttatacgggggaaagaagattaactagaagagagaaaaattattaaatggtattggtgatttgtaagagggacagaactgattatgttttaaaagaaaccataatttatgattaacaagaatacccctttaaaccaaaaaaagaaattt

SEQ ID NO: 26314 - DNA, 2590 bp, Glycine max
  Clone ID: PAT_MRT3847_123762C.1
aaaaatgtccgtgttctgttttcactagcagcaaaggttgctccaactattatttttattgatgaggttgatagcatgcttggaaagcggactaaatatggagagcatgaggcaatgagaaagattaaaaatgaattcatggcccactgggatggaatattgacaaaacccaatgagcgaattctggttcttgctgcaaccaacaggccatttgaccttgatgaagcaatcataagacggtttgagcgcaggatcatggttggtcttccatctgctgagaacagggaaatgatcttgaaaactatcctagctaaggaaaaatatgaaaatatagactttaaagagctttcaaccatgacagaaggatatactggaagtgatcttaagaatttgtgcacagctgctgcttatagacctgttagagaggtacttcaacaggacaggttgaaggaaaaggaaaagaagaaagcggaggtagaagttcaaagatcagaagatgcttctgatgctaaaggagataaagatgaagtgactactttaaggtgtttaaacgtagaagacattagacactgtagtcaggaaacccacgcgtccgtacggctgcaaacgacgctcacagggcacacaagtgggacaaggaaagtttgatgattccgtgatgatatcttttcccatgaacatgaaagtactgagatctggattaaaaccaggtggatgcaagttttgcaacaaagaggatgcgataatgagtgagttgaaagagagcggttgtgcctgcaaagccaggaagaaacatgtggcgaacgcctttcctccaatagatgaggttcgtgacagcttgtttgtgttgatctatatgactatgattattcatgaaaaggatatacaaaacagagtagattgtattgaattaagaagatgacaaacccattagattgataccaaaaacttgggctaagtgagtctgtaacgaaaccctaaatataaccaattgagtgcatggagctaaactttactttgaaggcagcatttaaacagagaaataaataccagtaacgcataaacatggcgaacatcctacacgtgcaaaagctgctgttcctcataaagagtatgagaaaagtgtataaggccagaagctatcgttgcagatgagataggggttacatttgcagatattggtgcgttggatgagattaaagaatgacttcaagagcttgtaatgcttgcccttagaaggccagaccacttcaaaggtgggcttctgaagccatgaagaggtaaattgtattttgggcctcctggtactggtaaaacaatgctagcaatggcaattgcaaatgaagcttgtgccagttatataaatgtcctcaaagtgatacatatacatcaaaatggttttgtgttgatgataaaaacgtccgagctcagttcacactagcagctaaggtttcaccaaaaattaaattggattatgctggtaaccgtagacacggacagaagaatagagtaggagagcatgatgccatgaggaaagattagaaatgaattcatgacacacagggatgggctattaactggacctaatgcgcaaattttggttctcgcagcaaccaacaggccatttgaccttgaagacgctataataagacggtttgagcgcaggatctttgttgctgtggcatttgttgagaaaagggatatgatagtgaagacctcagttgcctaggagaaacatgataacaaagactctgaagagaatgcattgaagacctaaggatgatttgtatggtgaatgaggaactaggaagaaaacaacagctcacttacttcctttgaactgttaaatcatgagttaattaatgacattgtaaccaagaatacagaatcataaggacaaagctctgaagatgctttacataatcaaaaaaaggaagctcaagaaatgaccctgaggcctttaaacatggaagacatgagacaggccaagagtcaggtggctgcaagttttgcgtcagaaggatccgtaatgaatgagttgaagcagtggaatgatttgtatggagaaggaggttcaaggaagaaacaacaactcacttacttcctatagattgtggaatgctacttttatttttggttttgtgaccattcatcctcaacgatacatttcaacaaaggaaggaatccttcaccagagatgttgaattgaaagcatgccgaaatgtcagagatcttatgattcccagaaaagctcgagttctggcacacacttctaatctctaaaggatgtgtagaccatcatgcactatgtttaggaaagggttctcggtttttgcttgggttgactagaaacaaatgagcacctatattaggggatttatattatgtcatgcacggttttggaagatgcaatggctttgtaggaagtaggaatattttacacccaacattttaggtatgttatattatatatgatcagaattttcagacagtagagttttgtaaattgattgtgcaactgtactgctaatacagtttggctcaattattcatgcgatttgtctttgcattgcaaaaaaaaaaaaaaaaa

SEQ ID NO: 26315 - DNA, 259 bp, Glycine max
  unsure (1)..(259): unsure at all n locations
  Clone ID: PAT_MRT3847_123763C.1
aaaacaatggaaatggaaaaatgatgacgaggttacaaacttgaatgtagagacacctctcccccatcttgacaggaaatgaataagcatgcatcaagtaaatatagggggactctacagtatacgagagacgctaagatcaattttgtaacctcgtcatcattaaaacaatggaaatggaaaaatgaaccaagcaatgatttcaagttgaaatttttgttggtgnnnnaaaannnnnnnnnnnnnnnnnnnnnnnnnn

SEQ ID NO: 26316 - DNA, 394 bp, Glycine max
  Clone ID: PAT_MRT3847_123764C.1
attgcagctggaggaattgtggatgctcggggttatgttgctgctctagcacttggtgctcaaggggtctgtctaggcactaggttttgaaatattacttttacattaatcatatttgaggaaattgttctcatattgctgcagtaatttcttagcatatgcagtttttgtgttcaacttaagaatagttgttgcctacgtagaagcctctcatcaggctaataaattgcacagtttattcctcatgagactataattgtattcacttggttgtgaacagatgtacacagttcccccaacatcatcaccatgtccaacctaataatctcaatttatattcgacattttttctggaactattacaccttttcgtatatgtgtttcatgccaagat

SEQ ID NO: 26317 - DNA, 766 bp, Glycine max
  unsure (1)..(766): unsure at all n locations
  Clone ID: PAT_MRT3847_123765C.1
anctgnnntagcatgngatgnnnnnattaagannnnnnnttatgctaggcattnnngannnnnncatatagagaattnccatgaattaggtatgattgttggtgatgagcaaggaagtggaaattggtctgaaaactttgagaggtttgatgtaaatcttacacctaactatgaagagcatgcagaagctcctgcactggtgttggctgatgtacagataagccctgatgctaatgcaagtgatgaagtgcagggttcatctgagcagacaagggcaaggccttcatcatcacaatcacattcaaagcaaccatcaaaaagaagacgcaccagtgatgttatgctagaaatgatgagtgttatggctgcagatatcagtcgaatcgccgatgcattgagtgaaaataacaagaccgtgtgcttggaggaagtggttgaaaaggtacaaaatatgccggactttgacgacgatctcatcattgaagcttgtgagtatttatgttttgacgaaaagagggcattgatgtttttgaaattagatgagagattaaggaaaaagtggttgttgaaacgattgcgtggtcaaggtagttaaatagatcttcttttggtgtgtatgtaggtagttaaaatagatgtttgaagatgttggcatgtactttaggtacccctagtttaggttgttactttctgtaataagaaactaacattgaggggaaatgggaaaaagttatggaaagacaagctgctttagctttccttctgc

SEQ ID NO: 26318 - DNA, 1622 bp, Glycine max
  Clone ID: PAT_MRT3847_123766C.1
ccgggcccccccatgacgcgtacgtattcggctcgagcccaattcttccccctccacccacccagcatatctctctattcctatttattagcacccctcacattaccttgtgtcaccaactactttgactcctttaccataccattacaataattatcaaacctaaccagtaaaaatggtgaccgtggaggaaatccgcaacgctcagcgttcccatggacccgccaccatcttggccttcggcaccgccacgccgtccaactgcgtctcccaagccgattaccctgactactacttccgcattaccaacagcgaacacatgactgatctcaaagaaaagttcaagcgcatgtgtgaaaagtccatgataaagaagcgatacatgcacctgacggaggagtttctgaaagagaacccgaacatgtgcgagtacatggcgccatcgctggacgtgagacaagacgtagtggtgatggaggtgccgaagctgggaaaacaagccgcaacgaaagcgattaaggagtggggtcaaccaaagtcaaagatcacacaccttgtgttctgcaccacttcaggcgtggacatgcccggagcagattaccagctcacgaagcttctcggcctgaggccctccgtgaagcgcctcatgatgtatcagcagggctgcttcgccggcggcaccgtactccgcctcgcgaaggacctcgccgagaacaacaagggtgcgagggtgctcgttgtctgctccgagataaccgccgtgacgttccgcggcccctcggacacgcacctcgactcgctcgtgggacaggcactgttcggagatggcgccgcagcgttgatcatcggatcagaccccgacccagcagtggagcggccgatattcgagatgatatcggccgcccagacaatcctgcccgactctgacggtgctatagatgggcaccttcgggaggtgggactcacgttccacctcttgaaagatgtgcccgggatcatctcgaagaacattgagaagagtcttgttgaagcttttgagcccatcgggatcagcgactggaactctatcttctggatcgcacatcccggtggtcccgcgatcctcgatcaagtcgaggagaagctccggctcaagccggagaaactccagtccacccggcatgtgctgagtgagtacggaaacatgtcaagcgcgtgtgttttgttcattctggatgaaatgaggaagaagtctaaggaggaagggaagagtaccactggagaagggttagagtggggggtgctattcggattcgggccgggtctaaccgttgagaccgttgttcttcacagtgttcccttggagggataaatcatgctgatgcggtgactagtgatttaagagtgatcaataaggaaccctcggaaataccagggaaagtttgttattattactagtttcacttgtggatttatcgtagcataatgttgtacaagaataatttaatatgaacaagatcgtgtgtttgttattgattttttcaaagttatatagtccgtacttattcggcattgcatttcgtttaaacaggacagagcggctctagatctacagagtctcacgcatgcgtgcatgtgaagtc

SEQ ID NO: 26319 - DNA, 726 bp, Glycine max
  Clone ID: PAT_MRT3847_123767C.1
cttagtgtgcgtccaccccaacgtctatataaaggattacggatgggaaatattgaaactgtcctttccagcagtattgctgctgtcttttttgcagcttttgtcgttgctggaactatgtggtatggttcagcaacaacccctattgaattattcggtcctactcgttatcaatgggatcagggatactttcagcaagaaatatatcgaagagttggtgctggactagccgaaaatcaaagtttatcagaagcttggtctaaaattcccgaaaaattagctttttatgattatatcggaaataatccagcaaaaggggggttatttagagcaggttcaatggacaatggagatggaatagccgtcggttggttaggacatcctgtctttagagataaagaggggcatgaactttttgtacgtcgtatgcctactttttttgaaacatttccggttgttttggtagatggggatggaattgttagggccgatgttccttttcgaagggcagaatctaaatatagtgtggaacaagaggtgaaagggtggagaaaagctttaaaaagtgtagggattggctggcacataaggataaggatgaatggttgaaggacatgaggggagtgctgagtttggtgtctacggtgatcgcaacaatgacctttcaaagtgctttaaatccaccaggtggagttagacccgtaaacgagagtggtgttgtttttt

SEQ ID NO: 26320 - DNA, 449 bp, Glycine max
  Clone ID: PAT_MRT3847_123768C.1
aggataacaagccttttatttataagcactatcacatcataagcaatagcaccatggaaaaggagcacaagcctgcataactcacggcacgtgcagttctcctaaggcgcaaattcacacacagaataacagaaacaaaccaaacactgaaaattaaacacagtagatagaagcgaaccaagaaatagtaaggggtaacaaacactgcagagcacatcagagaaacaccaagctaattaaaagcttcaatattcaattaattatccccaccattggtgaaccgaaactccttcatccctcacccttccatacaaagccaagcactcccaataagttctttcgttcttcttcattggcttccccctctgccaccactcattcttacactctaagaagagttcatccaccaaccttattggcctcgtgttataatctcctccaccacccct

SEQ ID NO: 26321 - DNA, 242 bp, Glycine max
  Clone ID: PAT_MRT3847_123769C.1
tcggtcctgaattcccggtcgatgacgcgtacgtacactcgttctatgacaacacaactgattgttacgcttatatcgttacttcagggattacggccaaaaatctgatcacgggagggcccaaacttatttctagtcttaagcactctatattcttaacatatccaaatacttgacaacttgactattacatattctttacattccatttttctataaaactgaaaaattcgcaaattcta

SEQ ID NO: 26322 - DNA, 120 bp, Glycine max
  Clone ID: PAT_MRT3847_12376C.1
ttcgatccgagttaacttcgtgcctatatacagaagagtcataggaaggtacggatgcgagctatcaagcaccactgtaataaagatgcattcggctagagcattggttttgatgctaac

SEQ ID NO: 26323 - DNA, 458 bp, Glycine max
  Clone ID: PAT_MRT3847_123770C.1
tggaacctttgggctgatttatgtgcttgatggtcgtgagaagatgtagaagggggaggctcggttgggccaaaaagaacagtagtggggttatcggggtagaggaggaggaggaggaggaagaagactaataatatactattaaataattccacggagacccgggttaatacgccccccttttctaggtgcgctcggtccctctctctcgtctgttctaagttctgtaaaaatggagtagggtcgtctaagtcctaggacgacgcatagatccgcggacactaagacgcataagcgacgcgggaaacgtcatagagaattgaaggcgaagccacagaaaattattacaagtgtaagtagccctttcctcggaggactcccgcacggcttaattacatctaactcgtaaactatgtcctaagccaaaattagatataagccctaagcccataaacaaa

SEQ ID NO: 26324 - DNA, 146 bp, Glycine max
  Clone ID: PAT_MRT3847_123771C.1
tcccaacaactcaatggccaaacctcatacacaaacaatactcaccctcaccatttagaatacacatcttaaacatactactcttctatatgaccaaccagtttacgtacctaaaataacccattactatcaaaataccaaaatat

SEQ ID NO: 26325 - DNA, 359 bp, Glycine max
  Clone ID: PAT_MRT3847_123772C.1
agaaaccatactttttatattaaattttgcataaccccatgcacccaaacataatggagttgacaattctcacaacaaaaacacgtgaaaattgatcgggataaatgatttcgaggctttgaaataaaaacaaatgaagggggcacaccttcacatgctaaaacaatttggaataccgagtttgctggagaacaatattttaatattctaaacggctttataagggaaaattacgggccattatgaaaaaaggcctgtaaaaaacgccttctaatggagggacaaactaaaatagcccaggacatccacaatttgtaacgaagaacatgaatgcccaaatgttcaaaaccccgagattt

SEQ ID NO: 26326 - DNA, 1093 bp, Glycine max
  Clone ID: PAT_MRT3847_123773C.1
cccgggtcgacccacgcgtccgccacgcgtccgtacggctgcgagaagacgacagaaggggggcacagaatgaaaatagtttcgtcgaattctagcttgaatatacacaagtgcgttaggtaatcagaagtgtgaattggagtgtatggattcagaagaatcaatctggagaggtcgataaacataaactccaattggttttgttttgtcggcaatgagggttctgcaacttggattgtttcttgctctggcatctggattcgcagccatttccatttacatcaccggcctctcagatccttttgtatatcccagttatcacctcacagatgaagacacccaagcattgctttcgctgcacgacactttccagaagtgtgtgactgcaaatggacttggcctaaaagcaaccaggggcacagattattgccaaaccacaataagtttccccagtgacaccatccccaaatggagagatcccaaaaccggtgaacttgaagccctgtcttttgattttaatctatgtgaagctgtggctacatgggaacaggtgcggaacagtaccactatactcaccaaggaattcattgccataattaagaagcgatgggagagaaatgcatggcgcagtatcaaagctcagaaagggctcacttgatcatttcgggtatgtgaagagaacacccatgtatcctctagagcatagtcctggacatgggtcgctttgcactgtgccaactgattaaactgtacttagattctgtgttcagcttgtgctgttgggaagcatccaaccccatgatttacaaaattatccgtttgtttaccttttccaaactatgtcattaacatgacaaaatggcaatgaagcttcctactcaccagcgtggtggcaaatcaaggaaatttatttaatctttctcattcttttcttctttctgttttgaaactttttaaggacttaagatttggttagggagaggattacagaacagcccggacaaaatttttagttgagttataacaaattgagctgtaatgaataccttttttcttttctttagacaataaatctccataatttttgtgagtt

SEQ ID NO: 26327 - DNA, 506 bp, Glycine max
  unsure (1)..(506): unsure at all n locations
  Clone ID: PAT_MRT3847_123774C.1
aactagtctctggttttaggcttggtccgccatttctttggttgctagatctattcattagcgcatgtgttatggatttaggcatacaatttcatgttctgctacctcctcaccattttgcatttgtttggttgagattatttttagaattttttttttcaaaatccctagaagctggcaattatttatctaaaataagttgaactaagcgtacaattagactttaataccagttaagattaagaacactcgtaaccagttttttttcccctcctaatttgtgccttttgagtcataatataaagattaatgaccaattgtaacttcacaccacaaatatttacatcattggattcacctttttgcctctagacaattgtctcatctagtaaggatggttaagcatgcatgttgattcttgggcatactagtagaggctntctgctnttattgtatggttgaaaacctatatatgcgctattttggaatggaaatgttttccccct

SEQ ID NO: 26328 - DNA, 767 bp, Glycine max
  Clone ID: PAT_MRT3847_123775C.1
tcgacccacgcgtcccgcttcgagtgcaatgcccacaagggtgttgggcgaagcattttgaaaagcttatccagtgtgacgcacgtcttaatttcttaagccaacaaccggagataatcttggattcacctcattttgatacacagcctgctgcttttgagaaccttgacaatccagaagatcatgatctgcatctagtcaatggtaaaggatctaccacatcttgtttgcaggtcatagaatcacctcaggcatcccagtcaccatcatttaaggttgagcataatggtcgtctaggcattaactttgatttccctccggacattgggacttttcattcattcgtcaatctcccaaacatccaccccctaaggttatatttgtactttgtatgagatgtaacatggaaaattaagtagtaggagatggagaacaagctgctctgctttgttgacagattatgaaattcatctccaacatttgtcaattgcatggttattgttgaaattacacacattgtatgggtagttgttccaactaagaatagttattaatgtacctagttagtcacatatttatgtatctagaaattcacatgcatgtacataggtactagagcttcattaatattcttgtaaatttcacattgtatttactccctaagtctatataaatatagaacagctgagtgggttaagcacttaagcatttcacaacctctagtctcttcaattagtataaaatatcaatgatggctcataaatcca

SEQ ID NO: 26329 - DNA, 453 bp, Glycine max
  Clone ID: PAT_MRT3847_123776C.1
gtaaccccaccaactttcgactttggaagcttggggaagccaaggaggaaaacttatttgcctgggtgtatatgcccccgtgacatgggttttttttaacatagtgggggaccctaatgacatttttaacaaattttcccaatcttttttttaaattttccgggcttttaaaattgcgcctgcccctgccttttagtatttttcccacctaaatatgcaattcccgttttaaaaggtacccccatccacagtggaaaactaaatcacttttttgaaaacggccaaccaaaaccttttttacccgaaccttaatttcctagaaaatacattattaaaataaatttactttcccaaaataaaccataaataaaaccccctcctggccattttataagaaataagttgtaccatattatacactaaaatttattttttattaaaagaaccaaaaag

SEQ ID NO: 26330 - DNA, 346 bp, Glycine max
  Clone ID: PAT_MRT3847_123777C.1
cgccgcttattcacaacatgttgatatctcgctctcggggcttcagcccacagatacgcgcttatgcagccgtgtcctcgcggccgtccaggccaagcggccggagaaagctgccctcaattggactcgatcatttcatccaaagacaacgcgtagtgtcgttatggagagacatagtgagagctctcaataaaattcctccatcgcctacccgagacgagctgcgtcgctatgctcgcactgagtttgagaggaatcggaatgtcactgatattacacatataagatacctcatttcgactgggaagaccgaattcgactcgatgaaacgttacatagaggagca

SEQ ID NO: 26331 - DNA, 391 bp, Glycine max
  Clone ID: PAT_MRT3847_123778C.1
gtcattcttcgtttcaacctcgcaaaatgagcacatttgatttagcaattataataattcattgctatcctggacttgttgagatgcgaaacaaagatggagccactcctctcaaagttcttgcctgtaagccttcggccttcaggagtggaatcaatctcccatggtggaagaaaattctttattatggtatactcgtagaacatctagacgctgaaaaagcaataaaatcctatatggataaagttgaaaaatatgatcaggacaatgaactgaaagtcaatatacatttagaaagtagtgaagccaagaaagcacaaatttttgtggaaaaacagtatgccatttctgttcggtttgtaaagagcgcggttcgattagcattcaaagt

SEQ ID NO: 26332 - DNA, 209 bp, Glycine max
  unsure (1)..(209): unsure at all n locations
  Clone ID: PAT_MRT3847_123779C.1
tttttnttttttttaaaattttaacacctaaatcaaaaggacacttgttaaattttttatagcacataaactacacccaatagtttaaatttaagacacacctttcctccatgcataacattaataactcccgtataaccaatctattaaccctacataaactcatataaaaacaattaacttttttaataccaacttacatactttta

SEQ ID NO: 26333 - DNA, 406 bp, Glycine max
  Clone ID: PAT_MRT3847_12377C.1
gtcccttttctttttttctttttttttttttttttttttttggttttttttttggttattacggcacttccctccattgtgaaagcccattatacgaatgccattgggctcgcaatggttacggaacaaatgtcaaaggcagaattaaccaataaatggccggggctccacaaagaattaatcgacccccctgccaaaaaggtccggggtaatgaagcgagattggctcccagaatttaagaaagctccgggggggaaacaaatgcgcgggccttcccaaactaaacctataaactgtaacatggggcttggaggggcaacccctcaaaaatgggttaaacttgctgagaaccttgaccgggcataccgaaaccccactctctggggggaaagctccaaaaagggc

SEQ ID NO: 26334 - DNA, 511 bp, Glycine max
  Clone ID: PAT_MRT3847_123780C.1
taataggtaatgcttgtttattaaataagaaatgaatcgcatagtagtgataaaagacgacttataaaaatatgctcgaaacatgcatattatccccacacctaaagattactattatgaaagatgccgcaagtggagattgtttagaagctgccctaactcagcgtattcctgaaacgccttaacatcaatctgacaccgtatgaactccggcaggaacaggctaatgccggtggctaagacaaatccgacggtcaatggccccgacacaaacctcggcaaccggcacctggctgtgagggccctcttgaacgcaaaaaataacgtcaggaagatcccatgtaggacaaagaaccacgtcatccagaaggtgggctgcaacctccccatgtagaacagtatcaactcatgcatcaaaccagaaaccacaaaggttccaaacaccgctggtagtggggcccacttgggacccacgacattcactgcagctttcaatgtgggatcgtacacc

SEQ ID NO: 26335 - DNA, 471 bp, Glycine max
  Clone ID: PAT_MRT3847_123781C.1
tggaacctttgggctgatttatgtgcttgcatggtcgtgagaagatgatagaaggggatctaatacagaacccgactagcgacaaaaaagaaaagagagatgaacagagagaatttaacacgctcaaatcagttatctctccgatcccggtctcctcatcgagtcctaacccaactcacgttctttgcttaaatttcctatccactagcgctctcctcccgtacggggacgccgtggtcataaaggtagaagagacagacggcgagagccgcgaagaagggatagaggaacgcccggtaagaaggatatccgtcgtgtactctgaccacactcatatctagaaggacaaatcgggctagtacctccaacggtactataggtacacgaaccgtaacatcacaaacaaaccaacgcattatatacacacgcacgcgcgcatccaccctaccaataaataaacgtcccgtcggt

SEQ ID NO: 26336 - DNA, 291 bp, Glycine max
  Clone ID: PAT_MRT3847_123782C.1
aaaaacaagtagttgagaactaagaagaaggaaatggcttcctcaatgatctcctccccagctgttaccaccgtcaaccgtgccggtgccggcatggttgctccattcaccggcctgaaatccatggctggcttccccacgaggaacaccaacagtgacattacctgcgtagctagcaacggtggaagagtacgatgggtgcgggtgtggccgccaattggcgagagggagtgggagagtgtttgctcgttgccgaacgtacctgatcgcgcagtgcggggggacgtgcag

SEQ ID NO: 26337 - DNA, 200 bp, Glycine max
  Clone ID: PAT_MRT3847_123783C.1
gcaccagattaaaaataatctccttcagaaaatattacttactgagatttttttttattactttgtagtatattgttggaagcaaaattatgtgttgcaatccatgccttataatacactcgttttgtattaaataaacataggaagaaaatagaacatggtggaacctgcagtgtttacaacaccaaaaaaaaaaaaaa

SEQ ID NO: 26338 - DNA, 581 bp, Glycine max
  Clone ID: PAT_MRT3847_123784C.1
ccacgcgtccgcaaagacacagtggtcaaccgtcttcctctaacaaataagagagtgtctgtctggcacctttgactccgagactatcttcgcttcgccattccttgatttgacttcactatccattccattccgattccctttccctaccttcatttcctttgcttttcacttttcgctaaatcactacaagagagatgcatcgccgctaacctaaaacaacctccacgcccaccgaagcaatgaaggcgcaaccaccagacggtgccgccgccgtcgcacccaacgccggcgaaggaggagagaagaaaaccataaacgctgagctatggcaagcttgtgcggggccgcttctcaacctgccttcgcctggaactcacgtcgtttacttccctcaaggccacagcgaacaggtagcagcgtctttgaagaaagacgtggatgctcaagtcccgaactataccaatctcccctccaagataccctgtcttcttcacaatgtcacgctgcatgcagatccagacacggatgaagtatatgctcagatgacacttcagccggttccttcttttgacacggat

SEQ ID NO: 26339 - DNA, 296 bp, Glycine max
  Clone ID: PAT_MRT3847_123785C.1
tggatctcgcgggtcgacacaagactctatacagactcgtattaagcagagaaagggctacattttgggaggttttcgtatagagaattgttatcatttgctccgagtacataactaattacatccttcatagtcatgaatctgtgatggttttccaaaatcgccggttctgttacaattgggggaatcggtaacatgacaagaaagaataaggctgtccacagcagacgcaccaacaggttacaagctgcttcaaaccagcctggcaagtctaagggcgactgccatctcagcta

SEQ ID NO: 26340 - DNA, 354 bp, Glycine max
  Clone ID: PAT_MRT3847_123786C.1
cacgtagggtgtttgaactggccttgtgctcgtgttcaaaccaaggaccttccttttggtttaagactaaatgcatagaccaaaagtattgcgcttcttaagtggagtcgctgaggaccactgaaccgaggggcggctcattgaggggtccaaggttaaccactcgagcaggcgacgcaaaggctcgcttatagggtcacctatggtgacaacaggggccctggtacaacactttggaactgcgaaaacccggacatttcgcatgtttattattcagtagcaaatcaccttttacaatgccgaccacattgcattaagggccgtacctatccctcgctgaactacattctacca

SEQ ID NO: 26341 - DNA, 446 bp, Glycine max
  Clone ID: PAT_MRT3847_123787C.1
ccaaacttgactagttttttctttcctttgagtcaatttctggtaagttgagactaagtagtaattggcgtagacttagaatattcgatgaattaattaattttggttcctaactttaggccagtttttttaaaaaataatgaataatccaaatattttaaataaaaactcttggttgattttttttcatgtacaatacaaaacaaaatgattttgacatatcaattaactttttatgatattaagcgtttaacctatatatctgtacaaaaaaaacgtttaaccttatataatctaatttgctttttgctttttctacaatttttatgaaatattcaagttatcattaaaaatgttatttattagtttctttaataataataattaatagtaatagtaattgcttttttagataattttacttcaataaaaaatttggatataga

SEQ ID NO: 26342 - DNA, 424 bp, Glycine max
  unsure (1)..(424): unsure at all n locations
  Clone ID: PAT_MRT3847_123788C.1
cacaatagtttcacatatacgtgggttttcatattcactatataagtacatgactttatctatagggcatgcttgatgcaggtccctctgtaaaaagggtttattgtgttttggtgatacaatagttttgtattgtaaactttaatcttatctgtagaaaaacagtaccaggcagtgtgctgatatacacaatagtttcacatatatgtgggttttcatattcactatataagtacatgacttcatcaattaggcatccttgatgcaagtccctctgtaaaaagggtttattgtgttttggtgacacattgaagctgagatagaaagagggatggagggttcgcgacggctacggagacattctatangagttttcagcgaagggattggattagttttatttcgctggtcgactcttataacg

SEQ ID NO: 26343 - DNA, 2391 bp, Glycine max
  Clone ID: PAT_MRT3847_123789C.1
ggatggctagtattggctactggactagcatagcagtgagtaagtggtggtcgtatcgtttggtaccaccacagttctaaaactcaatcatctcataaccctcaccgcgccaatcacgctcccaatcaccaccaaccaccttaaagcgcaccaccattgcccatggtcctcagccccaccgtatcattcaacggagaaaagaaaaagcgtcctctgaaaccctttccttttcccctttcatggccgaatctcgagacgccgccgccgccgccgccgatggggttcccggaacgcccgccataagggaagtgagacccgagtcgggaacccatgcgggaatcgcaactttttcactctctgaaacccgcttctcattgtttcagtggaaatggccgaaactcgagacgccgccgccgatggggtgcccggaacgtcccgccatacgggaaatgagacccgataccacgactgaagattttgacttaaagaaagtagaggaacaagcagcagagttggagaaggatttgattgtcaaggaacttgaaacgcttgacgtgcttgaagaattaggagctaccaagaggattgtggaggacttgaagcagcagttacaaaaggaggctatgaaatgtttagcaactcgagatgtaaattcatatgaagaagctggaactcctgttattaaggagaaggatgaggacaattgtggaaatattgtcaatgatgaagaacaggtgatgcaaattccaagcccatgctctatgtcatcatcacctgatatgatcttaatggagttgaaaaaagccaaattgaatctaggcaaaactataaatgaacttggggtgatacaatcctctattgaatctttgaataagaagatgaagaaggagaaaaattttctggagaggacacgtgaaaagctagcatcaaagtttgcagcagaatctgctcaagagagggtccaagagcaaacaagattgaatccaccggcccctcatgtagagttcacctttggtaaccctgcaaataatttcaattctgattctgggcagtgcaatggaatggcagagacaagaagacctgaaccttcaaagcccttaagtgtatatgaagaatatggatttagtgttaaaactgctgagataaggtggcttgcggctaaaaagatggaagaagctgcaagggcagcagaagctattgctcttgctgaaatcaaggctctatctaatgcccagagatctttaggatttgttctgccagaacctgagaaagtcacttttgcttttggagagcgctctcccctaaaccccaaggctcagatacccaaggaatcaaccttgaagaaggtaatagattccaactttcaagttgatgaaacaaaaatttctaagctgacaattttgaagaagttggaggaagcagctgaagaagttctacacagcaaacaagtcttgacagatgctttaaacagaattgaaactgcaaacagaaagcaacatgctgctaaggaggctctaaggagatggattccagaggatgatatgaaggagtatagcactattaattgcaacaagtttaatcaaactggaatttatcaagattctctgcaggatgtaaccaggtcaacaacagcaaacaatgatccaaagcctgctttaaggcccacaatttcaatgagagatgtacttagcagaaagcaggttcctgaaggatatgctacaagaaaggagatggaagagcacactgaacgacaaaaggtagcattgagtcaaatgcttcaggcattgagggaagatctaactcttccaccgaagaccgagaaagatgggagcaatcagaagccgtacgtagcacagaggaagaaatttggattcattcaaatatcactccccttggcaaagccaaataagaaaaggggatgagatttcaatccttaatccctatgcatggatgaatagccactacccatgcatcttcatgtcttcccatgccattctttattggttcatgtgttcactttcatttatatatgtagatgtttgagtgggtgtttgattctgtaaaatatatgttgtgcttgagtgattggcttataattctgtagctagctttaatggagctagtagattatgttgctattgttggatgcattggagtgatgaggaatttatccatagggtaggaaggtttttatcattggattgataattttattgttagaagtatgatctatcatgtggttgtaccaatatataaaattatatttgttgattagtgtacaaattgataatcattgggcgggctgcaaataaacgctctctgtcacttggaaagtaattccgtatcggttcctgcacgcgtacattttttgattatagtgagaccaattac

SEQ ID NO: 26344 - DNA, 701 bp, Glycine max
  unsure (1)..(701): unsure at all n locations
  Clone ID: PAT_MRT3847_12378C.1
acattcacttttctaacatgtataataaaacttgttcaaataaataataaatcatctcggctcaaaaaaaggtcgtctaagacttcatgcaattaatatagaaacttatactcaaatctcacatcctatcagagcattgtgtttttgtgtcctctagcatgatgttcttcatagtcatccacctaaccatctgctcccacaaacacaaagtttgagatcatcacaggattcaaacacaaatagcacatggggagtgagccatcacattcctaaataatagagagaagcaagacaacatgtaggtataaaaatcatataaacaaaatataacttacttaagaataactcatgttatttcaccactttgtcgtgtaacatcacatcacaacaccacacatctcattcattttcacaacattcacgtactcaatgatcaaaacacagtatcactaaatcaatcaatattgatcaatacacaagcattatgcaacatatatactaagactcaatcctatatgcaatgtggtaccatgttagtgaaaaacctcgtcaggcgcctnnnagtacatgacaagacaaaccacacactagcaagtcagntaattttcacttggtgaaatcatnnngagactagtcagggtcacgctattttnngagaatgctnnnnccatgtggaatcggcacatgcttaannnnncact

SEQ ID NO: 26345 - DNA, 989 bp, Glycine max
  unsure (1)..(989): unsure at all n locations
  Clone ID: PAT_MRT3847_123790C.1
cacgcgtccgtggcatctggacangcatagcagtgagtaagtggtggtcgtatcgtttggtaccaccacagttctaaaactcaatcatctcataaccctcaccgcgccaatcacgctcccaatcaccaccaaccaccttaaagcgcaccaccattgcccatggtcctcagccccaccgtatcattcaacggagaaaagaaaaagcgtcctctgaaaccctttccttttcccctttcgcttactcggccacgcgacataatcatcacgtacttctatcatcctcggatcgcataaattcccccaatggggctttcgcggaagtccaagcttccacatttaaccaactttttcacctctgaaacccgcttttcttgtttcagtggaaatggccgaaactcgagacgccgccgccgatggggtgcccggaactcccgccataagggaaatgagacccgagaccgcgacccatgcgggaatcgggtcgggtgggattcggagggtgaatttccgagcggagattgatacgtcaccgccgtttgggtcggtgaaagaggccgtgacccgttttggaggtagcgggccttggataccgtttttttaacaacattgaagattttgacctaaagaaagtggaggaacaagcagcagagttggagaaggatttgattgtcaaggaacttgaaacgcttgacgtgctcgaagaactgggagctaccaagaggattgtggaggacttgaagcagcaattacagaaggaggctatgaaatgtttagcaactcaagatgtaaattcatatgaacaagttggaactactgttattaaggagatggataaggaaaattgtggaagtaatgtcaatgatcaagaacaggtgatgcaaattccaagcccatgctctatgtcatcatcacctgatatgatcttaatagagttgaaacaagccaaattgaatctaggcatatctataaatgaacttggggtgatacag

SEQ ID NO: 26346 - DNA, 581 bp, Glycine max
  Clone ID: PAT_MRT3847_123791C.1
tcaacgcttttccggaaccgcgccaatcacgttctcaatcacctcactctttatcttacgtgtcatcctctcattggctctcgctcgcaaccgcagccaccaaccaaccacgccctctcttccacttctatcatcctcggatcgcataaattccccaatggggctttcgcggaagtccaagcttccaaatctaactgactttttcacctctgaaacccgcttttcttgtttcattggaaatggccgaatctcgagacgccgccgccgccgccgccgatggggttcccggaacgcccgccataagggaagtgagacccgagtcgggaacccatgcgggaatcgggtcgggtggtattcggagggttaatttccgagcggagattgacacgtcgccgccgtttgggtcggtgaaagaggccgtgacccgttttggaggtagcggtccttggataccctatttttttactttctgatgtagaagaagattatgattagcagaacaacattgaaaattttgacttatagaaagtagaggaacaagcagcagagttggagaaggatttgattgtcatggaacttga

SEQ ID NO: 26347 - DNA, 454 bp, Glycine max
  unsure (1)..(454): unsure at all n locations
  Clone ID: PAT_MRT3847_123792C.1
cccacgcgtccgcccacgagtctagcgaagggataatgtgggtgacaaccatggctaacacatctcttcttcccaaaccatattattaccgtaatttccattatcaacatcaaagatgcttcaagatcaacctcccaaaatggacaactagagcttcctctgctgcccctggggtcgacctcaacactctcgaatctgccatttccaagaaagacagtgatgctgttaaagaggcacttaatcagcttagtgaagttggttgggccaagaaatggagttctcagccatatgtttcacgtcgtacgacatcactccgggagctgacaagtctaggaattaaaaacgcagagaatcttgcaatttagtgacagaaacgatgcagcttttctttttacattcttgccaaacaggatttctgggtgttctggctgggcaacttnccggggattggggc

SEQ ID NO: 26348 - DNA, 1430 bp, Glycine max
  Clone ID: PAT_MRT3847_123793C.1
ctaccaactacgtttgaagtccttatctacaccaagctccaccctccaataatcaaacagagtagagatagcaaagggataatgtgggtgacaaccatggctaacacatctcttcttcccaaaccatattattaccgtaatttccattatcaacatcaaagatgcttcaagatcaacctcccaaaatggacaactagagcttcctctgctgcccctggggtcgacctcaacactctcgaatccgccatggccaactagggctgcctcgccggccccggggctcgtcctcagctctctcgagtcggccgggcccaggaatggcagtgctgcgcctttaggggccccgttgcaccgtcgggctgctggttcggccgtggcatggtgtcctctgtttttaacgattcctgcgtattctcactgcttgttcacaaagacaccgatgctcgttaagaagcgcttaatcagcttagtgaagttggttgggccaacaaatagaagtttcagccgtatgtttcaacttcgtacgacatcactccgggagctgacaagtctaggaattaaaaacgcagagaatcttgcaattcctagtgtcagaaacgatgcagcttttctttttactgtggttggaacaacaggatttctgggtgttctggctgggcaacttcccggggattggggcttctttgtaccatacttgattgggagtatttcattagtggttttggctgtaggtagcatatccccagggcttctccaagctgctattggcagcttttcaacactttttcctgattatcaagaaaggattgccaggcatgaagctgctcactttttgattgcttatctgcttggcctacccatttttgactattcactggatattgggaaagagcatgtcaatctcattgatgagaggcttgaaaagcttatctatagcggacagcttgatgccaaagagctagatagattggctgttgtgtcaatggctggactggcagcagaaggtttaacatatgacaaggtggttggtcaatctgctgatcttttcagtctccagagatttattaacagaaccaagccacccctcagcaaagatcagcaacaaaatctcacaagatgggcagttctgtttgctgcttctatcttgaaaaacaacaaggtgactcatgaagccttaatggcagcgatggcaaagaaggcaagcgtactggagtgcattcgggtaatcgaaaatgcagcatagttccacatttaacggttttgagccaagacatcaaaatatagtataaccaaagtttaagaacttacaaattacaattttaagctgtttcttgttcataatcactcatgatatttgatcattcaactttccattattttatgagaaacatgagagcctctttggtaaaaaaaaaaaaaaaaaaaaaaaa

SEQ ID NO: 26349 - DNA, 261 bp, Glycine max
  unsure (1)..(261): unsure at all n locations
  Clone ID: PAT_MRT3847_123794C.1
cctcccgccgccgtcaaagccggcgcgttttctctcttctttctcctcggaatnctactggggattactgacaacataccctggggctctaggagtcaatattctccatcacctcatgggcaggccaaggtttgtctctgggagtgctcaatcttgcaattgtcataccacatatggtggtgtctgtgataagtggaccatgggatgctctatttggaggtggtaacttgccatcgttcttggtgggtgctgtagctgctt

SEQ ID NO: 26350 - DNA, 223 bp, Glycine max
  Clone ID: PAT_MRT3847_123795C.1
cagagaaatattagccgcttcattcaaattggagagtacataactgttgggcctacactttgtgctccgacaaaatgtagctgagacgtgagtagtcctctagtctaatcactcactcacaccaacacgtaatcaaggaatattctattgcgaacctattatcctaaaaataataaaggccccgcaggaacaccaattccgaggtccagatggtcaatgacaa

SEQ ID NO: 26351 - DNA, 250 bp, Glycine max
  Clone ID: PAT_MRT3847_123796C.1
catttatgtctaaacaaataataattagtaaatttgcatgtgttcacttggaatgtatttcctctcctgcaccattatattttcagaattaaaaaagtcacctttgtagttcagtttaaagcaaataaataccgtcatcaagtttagaaagtattgattcaaacagtgttgttttaaattctttgatttttaaaattaaaactaaaataattaataaaacactaaaccaaactattagtataatcatgaa

SEQ ID NO: 26352 - DNA, 190 bp, Glycine max
  Clone ID: PAT_MRT3847_123797C.1
tgcctcgggccggctcaggaacgccaccggggcttcttacgtcgccgcctcgtaggaaaaattcgtggagaacggcggggctagagttattccccttatctagaatgagtaagctgacaatcttaacaagaagttcgatttggtcaatggagagctcttccctggtgggggggctgtttctggtcttttt

SEQ ID NO: 26353 - DNA, 181 bp, Glycine max
  unsure (1)..(181): unsure at all n locations
  Clone ID: PAT_MRT3847_123798C.1
caaaattcagtgctgaaacatggcttcggctactctctctgtagccaaaccagcccttcaggnnnatnggaaggctctcnaattctcggctccgaagctcatcagcnccttccctttcagaaaatctcgagatttcattctgtcacgcnccaannagaagcgctanngagatcanannagg

SEQ ID NO: 26354 - DNA, 368 bp, Glycine max
  Clone ID: PAT_MRT3847_123799C.1
aaatattattaccaatttacacgaacgtcctttcttgcgtagaatgaagccccactcggcacagtaattaaagttatcgcactttccaattaaatattttgcgacctgatttgttgacacctcaaccttcttgacttgaggaattggcacattagcgattctagtagacacattgcttgctgtctcaatcacaggctcaagaccactactttggtacaagatccggattgacaaagtcaatagtatggccatacagaacctgaacctccgttggctcctggaatccttgcggcctgagggctccctaaaggatatacacgaccctggtggcatagggcccacagaaacccaagaacctttgggagcgc

SEQ ID NO: 26355 - DNA, 460 bp, Glycine max
  Clone ID: PAT_MRT3847_12379C.1
ttatttttctctcttttttcactgttttttcttcttttttttttttgtaaaaaaaccacccccttcgcacatcattcccacaattaagggggggggggaattttttaattgggcggagcttcctcacaagggggggcatgcctaatttccttttttggcttaaacaaccgaacttgcgaaagaaaccccaatttccaaatcttgcggaggattccgctttttaaaaaaacctggcattaccctgtggaacaaaaaaacctggcttaaaagttttcccggcaattgcaaaatcctgagaatttcccaagaaaatttcaaaaactgtagactgttggggtttgtaattaaggaaactcaaccgccatgaagtttgatttcccccctcggaactccccatttcaaaacctttgttgggcccccttccctcttttgggaaaaacaattcccaggaatggggttc

SEQ ID NO: 26356 - DNA, 309 bp, Glycine max
  Clone ID: PAT_MRT3847_1237C.1
ttttcttatttttttatattttccccttacggaaaccgatctcactgcaaggattcctgtcagtttgccgctcaaggagtcggttcgcggaacttgcggtcattgctagggctgtttgaggtgctgtctttgcatctccatttccgcgtgctcactcgtgcccgcaaggtgccatcctgagtgaggtaattcaaatcgctttgtgtcctttgaatggctaatggctaggtagcttggcgtgtgttgtaatgcgtctagcacccttaaaaacgttacaaagtcttgcttcttcttttactcgctgtgtgt

SEQ ID NO: 26357 - DNA, 406 bp, Glycine max
  Clone ID: PAT_MRT3847_123800C.1
attataaactcggatggtgaacatgcttcaaaaaattagaaccatccacaaaggagctttgacaccttccacaatagttggtttggaacacaacaatgtaggtgatcctacctaaatcccaccctttacagggaaatgctcaatcggagtctctagctatcactccgcataagaataccagaaagccagatttgtgttctaatgaaaggggcgggatttctaggctgcaacacctggtgacttgcctttcacaataataacctcgccaacgtgagagaaacctgcctggaatgggaccggtgcgattcagcgcgatcaactggagaaagcataatgtaacggttgtcacgatgcactccacctgaccttgcagcagaatagcgcgcctatggaaaccttaaatgga

SEQ ID NO: 26358 - DNA, 400 bp, Glycine max
  Clone ID: PAT_MRT3847_123801C.1
caaaatatagccgcgggcacatatcacttcatcctaatgacatggttcttttaattacttttgagatacatgcattttaactgaataaaccaagttgatagctactctaatgaatatataaatgatttgttcattacgtatgtatgtgtaggcttattgggattggtcatgggatgaattagctaggtatgatcttcctgcttttgttcagtatgtgtacaatcaaaccggccagcgaatgcactatgcaggtcattccttggtatgttcctaatttctttcttttgttttcaggttttgtaaagtcaggttaaacaatttaggagcctatatttttactgaattttgtcttgattccatatgctttaaaggttcgattaccagtacccctagactttca

SEQ ID NO: 26359 - DNA, 368 bp, Glycine max
  Clone ID: PAT_MRT3847_123802C.1
actgggttggtatgtttaatgagcagaacgattacacttttgatacgccctgggtgagtcgtaggataacggacccatgcctgaatacaaaaagctttgagataaggagcagaaactgagtttctccatcaagcgaaaacacaaaataggcaacccgaccgggtgtggaataaaggcgaaagataaaagcgcggcccctacacatggatgaccccaggaactccgatacgagagagaatatcctcacacctcggccggtcatgggggttcgaccaacactgtgaatttatcctgcctaatgggccgccggggatttcctatcgagcacacccataaataacgaggtaaaccaccctctccggggggac

SEQ ID NO: 26360 - DNA, 416 bp, Glycine max
  Clone ID: PAT_MRT3847_123803C.1
tcgctctcgcgtccgaataggtctagtttggagtacaagttgttccttcaacgttgccaaagataccgtagtgctcatgatggtatattggtcaatagcttcatggaattggaagaagaagcaacaaaagcaataacccaacatgctaaagggaatgggaattgtagctaccctcctgtgtatccaattgggcctattacacacactgggcctagtgatccaaaaagtgggtgtgaatgtttattgtggttggataaacaaccacctaattcagttctttatgtgtcatttggaagtggtggcacactctgccaagagcagatcaatgaacttgctttagggttggaattgagtaggcacaagtttttgtgggttaatttgagggcaccaaatgatagagcaagtgccacttattt

SEQ ID NO: 26361 - DNA, 242 bp, Glycine max
  Clone ID: PAT_MRT3847_123804C.1
agggggctcaggtgaagtaaaatccttccactgtggtgactctgcgatgggtgcctagaagtatgtttcagagctatagcgcaagaagcagtctgatgtcatgcgcttcttgcagcgggtgaagtgctgggagtataagcagcagccttccattgtgcatttgacaacgtctagtcgacctgatcaagatcgtcgcttgggcttcaaggctaaacaaggctatgtgacttaccgtgttcgtg

SEQ ID NO: 26362 - DNA, 401 bp, Glycine max
  Clone ID: PAT_MRT3847_123805C.1
ccccaagggcatggaaaacttttgggttgccaaaatttttccaaaccccccatttaattaaaaaccggtttccaggatgatcaaatttcaattttttgacccattaccaaggcaccctaagccaaatttgtagggtggtcaatttgggtttagggggcttaaaaattttaaaacattaccaaaacctcctcattctttaacaggagcaagaccttcaggtgggaaaccgagctttttttaagaaaccttttaagttttcaccctaaattggtggagtggcttctttttttggaaaaccaccgtggccttctcctttttttttttctccagctccctaagggtatcatagaggctccatccaacttaaaatgacaacctgcccagcacacaatacttgtgtc

SEQ ID NO: 26363 - DNA, 243 bp, Glycine max
  Clone ID: PAT_MRT3847_123806C.1
ccgctccggaattcccgtctcgacccacgcgtgcactgctacaagacgacagcaggggactgtaaaccatttattacaatgcacatcaatttcattgtcttgttatatgagcaaaaatccatcttcaggtggatcaccaggaagcatttacctatatgtgcgatcaaatgctatatctgcatattgatcagaatgatctggatccctatcttctagttcatataggatctggtgatctcatga

SEQ ID NO: 26364 - DNA, 292 bp, Glycine max
  unsure (1)..(292): unsure at all n locations
  Clone ID: PAT_MRT3847_123807C.1
angataaagcatctttcnggcatgatcataacttaaatttctcnntctccaactgacaatggcccctggaagaattatttgataaagtgnaaagaatgttagtatgggnaaccaaaatgatgctatagactgctaactgcnaattatgaagtggtgaaagagcgcntaatgcannnncnaaaggcacagaagaagctgtaactttggacatcatagcaccaggttacatggctgttggagacttaaaatttgctggatcctgttgaacatggtatcccccnttcccctctgt

SEQ ID NO: 26365 - DNA, 506 bp, Glycine max
  Clone ID: PAT_MRT3847_123808C.1
gagctcggatttcggctcgagtgcacttccatgactgcattgttagtttatgtgcagcgtcagtccttgttagcgcaacagcctaatgttgctgagaccaaacccactcctgatatgagagtaggacgctatcactccgtggccggaggatacagactgggggctaccgagtgccctgcaggcgagatttgcggtgctacactgacttctactgctatagactgtacccaacaaccacgcagccccttcatgagagggaaatcactacgccaaggtgaagaggggaaagttaactagtcggtacacatacataagatggctgtttcgtgaccctgcgttaccaaggtacaagcgcgttgctctttacaaggtctatgctggagaaagtagactcatgggctctgtgatgaagacgatgaggtgggtcaaggactggtgctacagagatgtgtatggctggttcatattacaaggacaacaacaactatgggtgtgttatataatgt

SEQ ID NO: 26366 - DNA, 232 bp, Glycine max
  Clone ID: PAT_MRT3847_123809C.1
tgggatacaaactcacaccgctgtagtcaactttacccaatagtgtcgtcgcaggctgcgactacctccccgtcgtccacccagacgctgggcacgcacgatcccaataccgcgatcaccaggtctgcaatgcttgttggcgtgatctctcagagccttgtcatccctgacggagccatcactgttgaagatcagcagaactactacaccccagatgcctcatcctcaaata

SEQ ID NO: 26367 - DNA, 609 bp, Glycine max
  Clone ID: PAT_MRT3847_12380C.1
cggagaaggcgaggaggagcagaaatgcgagcgctgctgtggctcgagcaggagcactgggtgctgtcccttcatgagttcacgcggcctataccacaccgactactgctgcggcggcgctgccggtgaccgcttgctcgcccactgcctcctcttcatggtgcaaccggttgatatctgttaccctggagaataagatccttttgatctctgacctattaaaaagaggctactcctaatactatgaaaagaagtgcatgatactctacccatctggaagctaataaagatgtatgttatggaggctcactccacccagttaagcagtctaagatgcatgccgtagaagtcagccgttcaagctgtgccgatgggtggattagatgcgacggccatagctaactctacgcttgaagattattggacgtcgtactctgatgcttaatggctcggatgttaacaagccacgcgccatttgaaggtgtctacctgatctttctttcacagagaggttcatatgtcagctagatgcttgaaatgaagactggtgacatggagtcccacatgacagctcttcagaagtgttgggaaagaaagaagaatctctca

SEQ ID NO: 26368 - DNA, 298 bp, Glycine max
  unsure (1)..(298): unsure at all n locations
  Clone ID: PAT_MRT3847_123810C.1
gnnanccnganncccgactcggnagncggcanagtaanaaanaanctttctttcactttggttgnctctnctacacnactttcccttcaccttccgtgtcncanancactactactancatanattnnaaacacgaccatnaanagnaagcccannnncaatnatcggtttccactacccacggatcagnngaagaagatgaacacatcactganataagggaaatccgngcgttaacccngnnngnngacacgtggcagagnctgggagacagtgcatacgcacaggtcaagctctn

SEQ ID NO: 26369 - DNA, 305 bp, Glycine max
  Clone ID: PAT_MRT3847_123811C.1
ccaaaactataatgtacgcactgcttttaaaacttagctgaaagcgaacagaatgttaaaaaaaagaaataacaagcatttttatgctaaaacacgaacgacttagcttcatctccaagaatctaaccgatttatatgaaacagctttttttataaaaactatttatatacaacacgaacaaaatcaccacagtataattcgcttccaaaacagcccctactccgcaatcaaactcaaaaacgccaggaacctccccttaccaccggaagccccaggggctcttcctctcctatgtacagttccg

SEQ ID NO: 26370 - DNA, 228 bp, Glycine max
  Clone ID: PAT_MRT3847_123812C.1
cacgcgtccgatgggcccattttgtaacccctcccctctctcacacacacacaaataaaataaaaatctgcaataactttgtactgccattagatgaaggtcccacctgcttctaagaatccaagtgctggcatgcaaggatttgggaaaatgacgaagaagaataatcctattttgccccaaattcgacagaaggatgggggtagaaggagagaggcatgtaagtga

SEQ ID NO: 26371 - DNA, 317 bp, Glycine max
  Clone ID: PAT_MRT3847_123813C.1
atttgccatcccttctagcagaatcaagagataactcagatcttctgttgtccattttggccaagcacttggatcataagagtgttgctactatgcctatccttcagattgatattattaacaccaccacgcagcttgcccaccttgtgatgcatcaggcttcatttgcattagtcggggcactatgtgacctcattatatattcacggcaattgcctgcaacatttatctgaagcgtgcagcaatggacatgatgcatatcagtggaatgctgaacttcactctgcattagacatgtgtctattacaactgtccca

SEQ ID NO: 26372 - DNA, 3730 bp, Glycine max
  Clone ID: PAT_MRT3847_123815C.1
ggatgctttgcccacgcgtccgagaagacgacagaagggtacggctgcgagaagacgacagaagggggccttttctattttctagtaactttgactcactaccattgtgtttctgcttgaggagatcactgtcttcaaccacagtaaccaagccaagagacacactttatcttccttcatgggaatatgagaatgaaactcactgtgccaccactcatatcaacttggtggtaggtagggcttgtgtgtggttcagaaagaagctttacttgtaaaaaaaaggagtgagaaagatggccactagagaatagagagagaaagagccacccgacctgatgcgccgttcgcccccattcctaagctcactctttctaagtttcttctatcatctctccaccatggttctctccaaaaccgcctccgaatccgacgtctctgtccactcaaccttcgcttctcgctatgtcagaacttcgcttcccaggttcaagatggcggaggagtcgataccgaaggaggcagcataccagatcataaacgacgagttgatgttggatgggaacccaaggttgaatttggcatcatttgtgacgacttggatggagccagagtgtgataaactcatcatggctgccattaataagaactatgttgacatggacgagtaccctgtcaccactgagctacagaatcgatgtgttaacatgatagctcatcttttcaatgcaccactagaagagactgaggcagcagttggtgttggcacggttggctcatcagaggccattatgttggctggattggcattcaaaagaaagtggcaaaacagaaggaaacaagagggaaagccttatgacaaacccaacattgtcactggagccaacgttcaggtttgctgggagaaatttgcaaggtactttgaggtggagttaaaggaggtgaagctccgtgatgattattatgtaatggaccctgaaaaggccgtggaattggtggatgagaacactatttgtgttgctgctatccttggttccacactaaatggagagtttgaagatgtcaaacgcttaaatgatctcctaattgaaaagaacaaaataactgggtgggacactcctattcatgttgatgcagccagcggtgggttcatagccccatttatttacccagagcttgagtgggacttccggttacaactagtgaagagcatcaatgttagtgggcacaagtatggtttggtctatgctggaatcggttgggttatctggagaagcaagcaggacttgcctgaggaactcatctttcacatcaactatcttggggctgatcaacccaccttcacccttaacttctccaaaggttctagccaagtcattgctcaatactaccaactgattcgccttggttttgagggatatagaaacgtgatggaaaactgcagggacaacatgctggtgctgaaagagggactcgagaaaacagggcgattttcaattgtgtccaaagacaatggtgtgcctttggtggctttcacactgaaagaccacacccactttgacgaattccaaatctcagactttttaaggcgctttgggtggatagtgccagcatacaccatgcccccagatgctcaacatgtcacagtgcttcgtgttgtcatcagggaggacttctcaaggaccctcgcggagcgtctcgtgtccgatgtggagaaggtgctgcatgagcttgattcacttcctgcaagggtcatcagcagcaccactgtgacactcagtgcagaagaaaatggcaaggtagtggttgctaagaagaatcctatggagactcagagggaaatcactgccatttggaagaagtttgtgttggagaggaagaagaacaatgacaagatgaatggtgtttgttagtgttagcttcaagggggtgttgtgcctatgcctctgccttattgtacttctttattatatatataatttgggcagtaagtacttttgattgagtcaagctatttatctgtttcagttgtttattgatgagaggcaaatattaaattgtgttttcgtttgtacaagtatgattcactgtattttgactattttctctgaatcatgaattatatttatctccccttatgattgttagtcctatgttgttacaggtataatttcaagtctatgtacagctggatcattacccagagataaaagcatgcatagataaagtggtaaaaccgtaaatgcgaagttgtataactacaaggctgattgagatccccccatgatgggtaacttgagtttggaggccagaagtgaggaggggagtgtataattgtcaatcttagctggattaaagttcaaagtggagatatttagcttggatctttatgttttcatcagttaagtttgtagttctacttagttgttatacacagttatcaacaacccagacagaaaagagaaaacaagaattagaaagaagaatcaaaagtgagtttttagactaattggtctatttgcctctcctcttgtgttttgctttttgattttgaaggagaatttgtctcattgttccttcaaggaagtgatggtctctggcgaggatggatttggtgcaggcaatggcttgcagagctctggtcatgaccattgtgattaccaagaatggtgggagcataatctgcctaatagcccttttgcttccccaacaaaagctactggtcctggaggcttcatggctcccttctcccagggaccttatgaggccattgatgcagatgcctcggctgcatctgccaactccacatttggcactggcacattacttcctccagcagcggctcttgacatgggaactttcacatcctttaactgccaaataccaaggttctcttctggtgaagagaaccttggtatgtttgctggcaccggtggaccgattggcatttagtttcccaagttcaggaagtgaaagatgactaaacaaatctgttgagaatcaccaccaccaccaccatgacggccatcaccatcaatcaccaatactatactatttactaccatacaaaatgcatacggaaaaagaagtttagtaaaggaagtggggcaggcattcccccttcttttgttagcattattattgttgtaccattttccttcttctcatatctgtagtagctgaatgaaccacaggttaaaataacacacaaagaatcacccgagttaatgtgtagtaggaacactcccaggcactgtaatttcatttcctacccttggatatgtagtagtgtagattcttagtcctttattgttacagatataatttgaagtcattgtacagctggagcattacccagagaaagcatgcacagatgaagtggtataatcgtaattgcagagttgtataactacaaggctgtttcaaattcccccgtgatggataacttgagtttgaaggccagaagtgaggagggtagtgtataattgttaatcttagctggattaaagttcaaagtgaagatttttagcttggatgttatgtttgtagttctacttagttgttatacacagtttatcaacccagacagaaaagagaaacaagaatcaaaagtgagtttttagactaattggtctatttgcctcttctctcctgtgtaccttttggttttaaaggataaattgtctcattgttcctgcccccccaaaaaaaaaaaaaaaaaaaaaaaccaaaa

SEQ ID NO: 26373 - DNA, 1446 bp, Glycine max
  Clone ID: PAT_MRT3847_123816C.1
gtgtggttcagaaagaagctttacttgtaaaaaaaggagtgagaaaggtggccactagagaatagagagagaaagagccacccgacttgaaaaaaaaaatacaattgttttttagggataataatcatgtagcaatctcttttgttcacacatggatagttacgaagctacaagaattgtgttttcaaggatccaaaacttggatgctgaaaatgcttccaaaatcatgggtttacttctgcttcaggaccatggtgagaaagaaatgattagattagcatttggtccagaagcacttgttcactctgtgattctcaaagcccgcaaggacttgggtttaccttcgaactctccgcccacaccctgcactcctccctctccttcacccttcatttctaggcaaaactcaaacacttcttcaagactcagtgtcagtggtatcaacctccctcctcctctcactatcccaaacccttctgcttcatggcctactatgtctgagcttcaaaccgatttggttgctggctcttctacttctttatcttccttacccttctatgctaacggaggctcggatccaattgatgagttccaacttcaagaccagctttctttcctgaatgatggttctaatactagcatttctcacaagaacaacccagatttgttttacccgacactattggtatgttcgcaggcaccggtggaccaattggcatttagtttcctgatgttcaggaagtgaaagatgactaaagaaacccggcagatatattgagaatcaccgccgccaccatcatgacggctatcaccatcaatcttcagtactatactacttactacaatacaaaatgcatacgtaaaaagcagttcagtaaaggaagtggggcaggcattcgctttctttagttaggcattattattgtactattttcttttatctgtagtagctgaatgaaccacaggttaaaataacacacaaagagtcatccgagtcaatgtgtagtaggaactccatggcactgtaatttcttctcattacccttggatgtagtagtttagattgttagtcctatgttgttacaggtataatttcaagtctttgtacagctggagcattacccagagaaagcatgcatagatgaagtggtaaaaccgtaaatgcagagttgtataactacaaggctgattgagatcccccccatgatgggtaactaacttgagtttgaaggccagaagtgaggaggggagtgtataatgtcaatcttagctggattaaagttcaaagtggagatttttagcttggatcttatgttccatcagttaagtttgtagttctacttagttgttatacacagtttatcaacaaccctgacagaaaagagaaacaagaattagaaagaatcaaaagtgagtttttagactaattggtctatttgcctctcc

SEQ ID NO: 26374 - DNA, 521 bp, Glycine max
  Clone ID: PAT_MRT3847_123817C.1
ggaacacgctgatctcagtgttctctcaatactttcatgggatccgctgtcttagtacggatgtggagatgtgcaatctggggtttaagcccaatttcatgacttatggcagtgtactcagtgcatgtgccagcatttctgatctgaaatggggtgcccatttgcatgctcggattcttcgcatggaacatagcctggatgcgtttttgggaagtggtctcatagacatgtatgccaaatgtggatgcttagcactggcgaggcgtgtgtttaacagtttaggggaacagaatcaagtttcttggacttgcttgatttcaggggttgcacagtttggacttggtgatgatgctttggcactatttaaccaaatgaggcaggcttctgtggtgttggatgaattcacccttgtgacaattcttggggtttgttcaggtcaaaattatgctgccactggggaactacttcatggatatgcaatcaaaaatgggatggattcctctgttcctgtggggaatgca

SEQ ID NO: 26375 - DNA, 1259 bp, Glycine max
  Clone ID: PAT_MRT3847_123818C.1
ctgtatgcctccgagggttggtttatgaaactaatggaggaaaataagcattttgttttgaaggatcctgcaaaggcccatctattttatatgccattcagttcacgtatgttagagcacgccctttatgtacgtaactctcataatcgaacaaatctccgtcagtttttaaaggactatacagacaaaatttctgcaaaatatcgttacttcaacagaactggtggtgctgaccattttcttgttgcttgccacgattgggctcctgttgaaacaagacaccatatggaatactgcataaaggccctctgcaatgctgatgtgactcaaggctttaaaataggaagggatgtttctcttccagaagcttatgtccggtcagttagagatcctcagagagatctgggaggaaagcctcctcaccaacgacccattcttgctttctatgctggaaatatgcatggttatttgcgtccaatattgctaaagcactggaaggacaaagaccctgatatgaagatatatggcccaatgcctcatggtgctgcaagcaaaatgaattatatcaatcacatgaagaacagcaaatactgcatatgccctaaagggtatgaggtcaacagcccacgggtggttgaagccatattttatgagtgtgtacctgtgattatatctgacaattttgtgccacctttttttgaggttttaaattgggatgcattctcaataatcctggcagagaaagatattcccaacttgaaacagatacttctttcggtgtcacaagagaagtatctcaagttgcaactcggggttagaaaggctcacaaacattttttttggcatgtaaaaccctatgcagtatgacctcttccacatgacccttcattcaatgtggtatagtagagtgtttcaactaaaggtgagatgatgatgcatatgagccctctgaactagaaagcagaagcaaacatgacaaaagagcttatgaaaaagaagggggaatttctgagtatgagaactcgtgaaagaatataataggaacttggaatttgtattcagagttttagattgttctgtatgtataaaagctgtatcatttgaatgcataaaaaagaaatcataattaaccaataagaccctctccccctcccaacaaaagttggaattgttatattttgttattggccgtatgttgaaagtttaaaattttctattgtacacatactggttgtcaggttgcggttgtaaataccagt

SEQ ID NO: 26376 - DNA, 390 bp, Glycine max
  Clone ID: PAT_MRT3847_123819C.1
aaaaaaaattgggaaggtgaacataaatatcaccaattggacctgaacaacacaacccgtcaccaccctgcccataacacacatgcaaattaatacaaatacaccatatgcgatctgcacaacctggggcaccccatctaacgagacccacaagttatcaacgcctgacttcacagcaacaatccatctcacagctgcggtggtctccgcagccttcgcaacctgaactagacatatgtcagggccactcgcttgagacaatgcttgttgctaaacccctacggtactagttcaagaccaagaccactacgtttaacgcccatgcaaggagcttgaatgacccctgggtgagcacaaagcatgcatacaatccctgactgtgtacccctc

SEQ ID NO: 26377 - DNA, 363 bp, Glycine max
  Clone ID: PAT_MRT3847_12381C.1
ggggcggtggcgttcttatcgactttaaactgcgcgtgaagttcaagagtgtttgacgatggtttcaacgtccttggattgttgttcaacgttctttcgtgtcttgttcctatttggttattgtttctggcggtcggcaaatactactctagttaccaacaactttgatgtttttatgcattgaattttaataggataaaacttagtccaagtatgttttaaggtacttcaatctaataatatttgaaaatttactttaataatttatgtaataaaaaatgttataaattaatattaatattagttattaaagtaaaatttaaaagaaaaaacaaaaccacaaaaaaaaaaaaaaagcggccg

SEQ ID NO: 26378 - DNA, 637 bp, Glycine max
  unsure (1)..(637): unsure at all n locations
  Clone ID: PAT_MRT3847_123820C.1
gtccggnaatcccgggtcgacccacgcgtccgtgtttatgggccaggtagtgtcattacagttcgctaacatgcgcatgggcaatatgcgtgactatgagacacgcgaacactctactcggatgaagtgggaaagcagagaacggggcttattgcaacatatccactgagatgacgcatctctactatgctaacatgctgaaactgacgccacgagaagaaattccactggatgtgatcttatggggctgtcaaaccattttatttagtggtcgagcattttgcaacatgactctttgttggtatatcaatgggcactccctgtctcatgatgaactaattgcagatagaattgatggtgcatgtcatgcagaaagggcaaaatttgacaccgaactgttggacatatataataaattttatcaaaatcatacaccgcaacctatgttaaaacttacctgaggacataaagaacatgcactatgctcatattgttcatgacataaacaaaaggtgacgattttttgtcaatgttgagcgataagacaaaacatcctgggcaatggcttacacaagataagcatgctcttctagatcaatacatagatgcatcatctcttggatgggcaatgacacta

SEQ ID NO: 26379 - DNA, 178 bp, Glycine max
  Clone ID: PAT_MRT3847_123821C.1
tacgggtgtgaaaagaccaccgaaggggaataaggctgttagctgcagccgttaaaaataaaaccgagcctcttccccacaggatacacagagctgagatagaatctgaacaaaaagcggaatccggactaagttgtctctacgatttgagccatggcaacaacaacaccctgaaacc

SEQ ID NO: 26380 - DNA, 551 bp, Glycine max
  Clone ID: PAT_MRT3847_123822C.1
accagggaatactcaaagatggtcaggttgttgcggtgaaacagttgaagtttggtggttctcaagcagatcttgatttctgcagggaagttcgggttttgagctgtgcacaacacagaaatgttgtgctgttgataggattttgtatagagagcaatttgaggatattagtctatgagtacatatgcaacggatccttggacctctacttatatggagatgagagtatgcctttggattggaactcacgcttaaagatagcaattggaactgcacgaggcttacgctaccttcatgaagattgtagagttgggtgtatagcgcacagagaccttcgacccaaaaatattctcgtaacacatgactttgaacctatggtggctgattttgggcttgctagatggcactcagaatggaatatagatactgaagatcgcgttataggaacttcatggtatcttgcaccggagtatcttgacgctggataccttacatataaagtagatgtatatgcatttggaattgtattatgagagttaataacacgtcga

SEQ ID NO: 26381 - DNA, 504 bp, Glycine max
  Clone ID: PAT_MRT3847_123823C.1
aaaaatgaaatagataaattaaatggacttctgtcctctttttaatattctgattctgactcctcgtttgtcttgtattttttgtttcttcttgttgaaggaatgtgcattgatttcacagatgtacagcagtgaagattgttaggttaaggattttaaacgggaagaattggtgtggaaacttgctgctttgttttgttcccggaagtcgaccgaaactaattatagaaaaatatttttcaaattaggatgatatggtgctaaaagtcttgtcccaatatggacacgaggatataaatgggaagagtaattcaaccattctgatccctcttttgaggtgaatgagtaaatgcctctgtgtatcctgcacgcgatgcaatccattcatggattggatagtggtggagaaggggagaattaaagaagaacaaatacaaaaggagaaatttttatacatacaagctaagcatatatcgagtgtgatatggtcactatgatggaata

SEQ ID NO: 26382 - DNA, 146 bp, Glycine max
  Clone ID: PAT_MRT3847_123824C.1
cataacccgatagaaagacagaaactttaggggtgtgtgtgacattataagtctccattgttccctcttgtaacgttcttggcgtaattaattagtactagtcgttacccttattaatagagtacgtactacctgctagctctgtt

SEQ ID NO: 26383 - DNA, 1013 bp, Glycine max
  unsure (1)..(1013): unsure at all n locations
  Clone ID: PAT_MRT3847_123825C.1
tcggcttcgagccacgaaggaaccggttccggctcgaatagaaccagcaccgctcgatagcaaaatgaccaagttcacaatcctcctcatctctcttctcttctgcatcgcccacacttgcagcgcctccaaatggcagcaccagcaagatagctgccgcaagcagctccagggggtgaacctcacgccctgcgagaagcacatcatggagaagatccaaggccgcggcgatgacgatgatgatgatgacgacgacaatcacattctcaggaccatgcggggaagaatcaactacataaggaggaacgaaggaaaagacgaagacgaagaagaagaaggacacatgcagaagtgctgcacagaaatgagcgagctgagaagccccaaatgccagtgcaaagcgctgcagaagataatggagaaccagagcgaggaactggaggagaagcagaagaagaaaatggagaaggagctcattaacttggctactatgtgcaggtttggacccatgatccagtgcgacttgtcctccgatgactaagaagttaaaagcaatgttgtcacttgtacgtactaacacatgatgtgatagtttatgctagctagctataacataagctgtctctgagtgtgttgtatattaataaagatcatcactggtgaatggtgatcgtgtacgtaccctacttagtaggcaatggaagcacttagagtgtgctttgtgcatggccttgcctctgttttgagacttttgtaatgttttcgagtttaaatctttgcctttgcgaaaaaaaaaaaaaaaaaaaaaaaaaaaaaaaattctccggtcctcgcggtgatgcggcaacttcatttgggggaccgaaggaaaagacgaagacgaagaagaagaaggacacatgcagaagtgctgcacagaaatgagcgagctgagaagccccaaatgccagtgcanagcgctgcagaaagatatgggagaccagagcgaggaactggaggagaangcagagaaa

SEQ ID NO: 26384 - DNA, 266 bp, Glycine max
  Clone ID: PAT_MRT3847_123826C.1
ggcagcgtgcgtgaagggagcaccttctcgagtcgtaaatgaccttctccattgattactatttctcactgagaattcgctactatcttccatgcgcgtgacgttcaattctactttcaaggctgcgcattacatgaatcgttcggtgcaagcaagttgactagcgttacaagttccaatatgggagtcggcgctgtgcaaaatttgggcagatggatgaactgacttctagactatcaccatcttctgaagctggaaaataaaca

SEQ ID NO: 26385 - DNA, 267 bp, Glycine max
  Clone ID: PAT_MRT3847_123827C.1
aaaaaacgtacgtgccatgtgctagcaatgcaggcagatgcaaatcaagagcagagcaagctatgggagtatgagcaatagcaagctatgcgcgtgcaaatacagctgaaatgaacattgttctaacgcgccaggacgttaccctcctaatgcacgtggtggctgttgtcctggtgatcggcggccatagaataactacacacggtacatgagaagtgcaccataacaccagatcatggcatggtttcaacacaatttaggatggac

SEQ ID NO: 26386 - DNA, 390 bp, Glycine max
  Clone ID: PAT_MRT3847_123828C.1
cggacgctgactctgacactgaggctcaacccgacgctggtgaggacgcttactcgtgcgaccatttcctcatgtacgagtttaaggtccgtctatgcgcacgtgacatgacacacgactggacggaatgtccgtacgcacatcccggcgagaatgctcgacgccgggacccgagaaagtttcactacttcggcgcggcttgcccatagtttcgcacgggaaactgcaagaaatgcgacacatgcgagttcgggcacagcgttttcgagtgctggcttcacccggcactctatcgaacttaaacttgcaaggacggcactacttgcctgaggcggttgtgcttgtttgagcacacgccggagcatatgcgcgtgttgccgatgcataatt

SEQ ID NO: 26387 - DNA, 292 bp, Glycine max
  Clone ID: PAT_MRT3847_123829C.1
tgccacctttgttacaaacaattcctctggcacgcagcaaggacctgttggaggaagtgatgctcaaattaattgttctgacgggggtggattaactgaacttgagaaactattaaagcagaagactttcaccagatctgagattgatcatttgacagcacttatgcgttcaagaactgtcaatgcacctgtcagggaagaggagaaggggacagaaatggtcccctcagaaccaatgctgctgagtggacaaaaggaatatcccaaatcaactgcactagaaaatgggact

SEQ ID NO: 26388 - DNA, 163 bp, Glycine max
  Clone ID: PAT_MRT3847_12382C.1
agcacgaccaaaatcattaatgtaatgaagttctaacccctcgatcttcaatttgatgggaactatgatgtagcagcttcacacgcctcaccattaaaatcaaaataccagggcaaagtttcaaggaacttaggacagaacggaacaaaaaactagatcaaat

SEQ ID NO: 26389 - DNA, 680 bp, Glycine max
  Clone ID: PAT_MRT3847_123830C.1
atctatcatcatcagtctatcgagcaattcgtcgcaagagacaccaattcaactcgaagacatctactcgataccgccaaacatggtcatagtagagagcgtcctccgtggtgactccgaggtctccggcaccgtgacattcgaggaggacgacgagaactcccccacaaccatctctctgcgacatttccggaaaagaccccaacgcgaatggcgtgttccacgtcgcacacctgtcacgatgacaacagcagcggctgaatctccgctggccctcacttgaaccctcacgggacaagaccgcaacggcgctccctccgatgaggctcgtgatgtgggcgatgtcggcaacgtcgagactgatggtcatgggaacgccgagggctccgagaccgacaacctcatcaaggtcattggtccccacagacgtctatgggcgtaacggcggaatccacgcacggtaccgatgatctcttgcaaggtgtggccacgtaagagtccctcaagactggcaacgctggtccccgacctgcttgcggcgtcattggcatctcccagtaaattacccgagtgcctgatattccagagtaatgtagcacggatagtacacgagtagcaaggatatcagtgtcgaaaagtagctgaataaaaccctggctgtggttcaaaaaaaaaaaaga

SEQ ID NO: 26390 - DNA, 231 bp, Glycine max
  Clone ID: PAT_MRT3847_123831C.1
ttactgtcgtgcgggagaccagtctgtcactccggggactgattggccaacatccggaacatcgccaagacatgatcacatccaccctcttaagggactagccgaagggaatcccccttagagacaacaaaaaacgggcaggtagaaacagagcagagaaaaacgtatacgatcaaagtgatggctggccagaggacgccaacgcaaacacgagctgagggccccctatat

SEQ ID NO: 26391 - DNA, 373 bp, Glycine max
  Clone ID: PAT_MRT3847_123832C.1
ttgggttgatttatgtgcttgcataggtgctgaagatgatacatggtgacgcgatcgaacatactagaaaagttatacttacgagtagttcaacaaaacgatgagtgtcagtccgactgtcactccatcatcacgtgtgcgtattctacattcattccgtcgtattgtttacgatcggtctgatgcggacggtgacttgatctggaatgcggctacacatcatgtcccgtttgtaacaagaggaaatggaggtggaacagaatgagttgtctctaggaaagatatctgcttcactatcgcagcgtaactccctaacgtgaatctcaaggggaacgaaaccaaagccgaactcgtacattatgttcaccataca

SEQ ID NO: 26392 - DNA, 1107 bp, Glycine max
  Clone ID: PAT_MRT3847_123833C.1
gtgttagcggtttctcagctttcccacccagcaatgcttcagtaccgtctcctggattgacatcagtgtcgcctcttaataatgcaggacagtgggccaatttacaacagcagcaaccatttttccctgttgctgttagtcagtctagtgcacaacaatttacaccaccattaggtggaacagcaaataatcagccatggaatgtaccttctgcacccacagtgcaagggcatccaagtacaccaatgccacatacataccctcatgcctcaaagcctgccaatgagactatatccggtgttgtttcacaacctcctgttgcagaagttagagcaagtggaaggaaagaacttcccgaggatctgttcactgtaaaatattcttccttccctgctccagtcctaggttggcaaatgggtgttccccatgatgggtatctcaatgcaatacaataatgtggtgcctgtgccaagttttccacagccatcaaagtcaataaatccatttgatgtcagcagtgaacctaccgcaaatcaagccccaacttttccttccatgtcatccttgcaaggtgccctgcctggggtaccacctcctggtgcagtgcacccttcaagcatgggtaatccaacacatggctggactcctctgtcatcatcatttctgcctgcacagacacaaatgcgtgcaactgcattgggaccaaggccatatatggggcaacaaatgccgactaacatgccaatgccaaggcaagaagttgggaattttggtaaccaaggagctgttttcggcttgtcaaatccagatcagcagctgactggtaggttatcaaacactcccacctctaactcattccctaccggaggcaacccattcggataatgtgaagaattgtccccctggaattgtaaagtcacgcatctacttgttgctccctgtacaaatatgtgcaagtttgggcctggggttttattgtcagtccgatttatacacatacgccttattaaggggttgtggtaatccctggatcgaagtccaaaatttgcctttggccgtgtaaaatgttatttttataggaaagaaagaccatcttcccttttgggg

SEQ ID NO: 26393 - DNA, 289 bp, Glycine max
  unsure (1)..(289): unsure at all n locations
  Clone ID: PAT_MRT3847_123834C.1
attnggccnannngannggagggtatgnanntcgantcgacaggggcngccntggcngnnntgnatgtnatcnnntgaggccngcgannccatgncntgcatngnctggcatgnggncgnaccntncactgagcgccaanccnagnngctgcncacggncgcaccagggnaccnnatnnagtganaangtgggnacacggggaccnngagncctnagcanagcnaagangannaagncngtnatgnacactnacgggagnnntantccgcatggncgngtganttcncc

SEQ ID NO: 26394 - DNA, 411 bp, Glycine max
  Clone ID: PAT_MRT3847_123835C.1
attgagaaaacttttcccctgtgaaagggccctcccttccctccttaaaaaatatattaaccccttgaatttgccttttaccccaattttaacctttttggaaatttttttttgaaataaaaattaaaaaacccccctcccccccaagggggcccctggaaaataaaaaaaaaaagggtttaaatccccgcaccccaaaaaaccggttggggttttgaccgctaaattaaaccaacctttggggaaaaggaaaattaaaacccccccccccccggggggggagggggggttaaaggggggccagtttttttttcaaaacccaaatgggcccaaaataaaaatatccaatgggaaaaccctccccgatatccctttagcggggggggggaaaaacaaggggggggccccccc

SEQ ID NO: 26395 - DNA, 680 bp, Glycine max
  unsure (1)..(680): unsure at all n locations
  Clone ID: PAT_MRT3847_123836C.1
ttctagtttttttacatacatctactttgcattacgtaacaatatatgtatttttaatagtattttatattcttttttagttcttatgtatatttcttattattatattatttagaaatttttttattaatattgttattaatttattatatcacatattatgattttttattattattatttagttcattatattatatattatactttaaatagtttttatattatactattacatttattattataataataaagctattggactcaaattgggtcccaaaaaatcaaaacagacgagcggaaaaaaaaaaaggaacaccctgaaatgaaacctaagattcagcccataaacttcactgttagcatgcaccacccctatggaagaggaagacaatgcagatgaatgcgtgaaaggtcagtgtcggcatgacggaggtcacagaagctgtcacctgtgacagcgaaggtcgcaaggccttgtccagtgacaacaaggtggtagagccttgcccatcaacgaacaaaacagagtagcggatgcaaagcctgcaaatcactgtgattctccacgattttccccactaatggcactgccgtgancactnnagncaggcgctccgcgatgagtgtcntnnnagcgacnnggggccgctctgctctgctgcccagcgatcgca

SEQ ID NO: 26396 - DNA, 1195 bp, Glycine max
  Clone ID: PAT_MRT3847_123837C.1
taatactcgttcccacacccatcttctccacaacctaccctacttgatcattcaccacatttcatttacacaaatcatcaatggcctctcttgtatcctcaagtgttcttttacacctctttctcataatttccgcgctccatttgggcgcagcagcaagaattctgagtgaaaaggaccaacaacaacaattgcagttccaataccacaaaggccctcttctcagtggcaaaatctccgtcaatctcatctggtacggtaacttcaagccttcccagcgagccatcatctccgatttcatcacctccctttcatctcacaaatccacagcccaaccatccgtcgccacgtggtggaaaggtacccaaaaatactaccaactcataaagtcatcaccaaaactcaccctcactctcggtacccaaatcctcgacgagaactactccctaggaaaatcactcaccaacgacaacattgttagtttagcatccaagggtgcctcgaaagacgccatcaacgttgttctcacatcctcggacgtaaccgttgaaggattctgttccagtaggtgcgggacccatggctcctcggtgggtcctcgcaagttcgcttacgtgtgggtggggaactcggagacgcagtgcccgggccaatgcgcgtggcccttccagcagcccatttacggcccacagaacccgcccttggtcgcgcccaacaacgacgtgggcctcgacggaatggtcatcaacgtggctaccctattggctgggaccgttaccaaccctttcgggaatggctacttccaaggacccaaagaggctccgctcgaagccgcttccgcttgcaccggtgtgtacggaaagggcgcttaccctggctacgctggggaactcttggtggaccccactaccggcgctagctacaatgctaacggcgtcagtgaccgcaaatatttgttgccggcactctttgaccctaccacttcagcttgttctactctggcgtaacacaaacgcacggttttagctagcttaatattattgttgttccatgttagggatacactatgacacaagagattcttttatttgtttattgattcattgttatccggatgaataaatatatgaagttcaatgtaccaaagcaaaacatatagtatatgtgaattcaattattggtatttccattctct

SEQ ID NO: 26397 - DNA, 1318 bp, Glycine max
  Clone ID: PAT_MRT3847_123838C.1
tacacattccaccaaactctcgtcacttcatttcatttcaccacctatctgaatttacaaggaactcaactaacatggaagcatgttttctctcccacaattccttcaccaaaaccactgatcaactcatccccacaatcagaaacgggtctctaccacaccccaaacgatcttctcaacatttccactatagaaaagctagaattccacttcccatatcatgctgccacatgtcatcaccatcaccatttgatgatgatgaaaaatctaccctaagtggtgattggcgatctttccgagcaaaactggtggctggagaacaattgacaaggcctgttgaggaggtttctttttcttcggtgaacgatctagacattgttgtggatcaccctccactgatcaccattggtgacaaatgggcccacgtaatccacgagcccgaaaaggggtgtatactaattgccaccgaaaagcttgatggggtccatattttcgaacgaacggtgatccttctgctgtcaactgggcccttaggcccatcagggatcatcctgaatcgtccatccttgatgtcaatcaaggagactagatcaacggctctggacgtggagggcacgttttccaatagtcccttgttctttggggggcccttggaggaagggctttttttgttgagcccaaaagagggtggtggtggtggtgatggggtggggaaaagtggggtgtttgaggaagtgatgaagggcttgtattatggggcaaaggaaagtgttggttgtgctgctgagatggtgaagaggaatgtgattgggcttggggattttaggttctttgacgggtattgtgggtgggagaaggagcaattgagagatgagataagggctgggtattggactgtggctgcttgtagcccaagtgtggttgggctggggagtgtgggaagtgttgggctttgggataaggttcttgggcttatgtccagaaggaaggtcatgtaatgaggcatagaagtagtttccagccaagaaaatgagctttgcccgtgaagttgaaacgtgaaagtcgaaagcaaattgttattataaggatctaccaatttgtaggcataagaaaagaaacagaaattgtctgattcggttgaattcttacgtgctgtatgccttataaattataattattttcctaattgtgtttttgtgtgactggttgttgtgtttagttgtttgatgatgttaagtgagatatttttgcgttcttcacggtgaaaatatctggtctttaaagcaatatatccctataaatgcatttcaaccttgtc

SEQ ID NO: 26398 - DNA, 798 bp, Glycine max
  Clone ID: PAT_MRT3847_123839C.1
ccacgcgtccgcatggaagcatgttttctctccacaattccttcaccaaaaccactgatcaactcatccccacaatcagaaacgggtctctaccacaccccaaacgatcttctcaacatttccactatagaaaagctagaattccacttcccatatcatgtaagttcctcatattaagatcaatattcattcattttctagcactatagtatgagtaaatacttcatttttacaccatctgatcacaaaaaaattactccctctgttcctttttataaaaaacaagttttagtatattttacactaaaactgatttactataaaaggatccaagacagtatcattcaagataaatttgtggatgtatataataattatttttaaaatcttatatatcatgattttgatttattttacacttttttttatcatgcataacgatggtattcagatttaaacctagaattttgtataaaccatctaaacctttaatcactatacttatcctaggtttatgatcaactttttataaattaaactcatttcatagtctcaagatctactccttttaatcttaaaatttgtgatgtgatcacaggctgccacatgtcatcaccatcaccatttgatgatgatgaaaaatctaccctaagggaggatgggcgatctttccgagcaaaactggtggctggagaacaattgacaagggcctgttgaggaggtttttttttctttggggaacgatctagacattgtgggggatcacccctccatgatcaccattggtgacaaatgggc

SEQ ID NO: 26399 - DNA, 422 bp, Glycine max
  Clone ID: PAT_MRT3847_12383C.1
tttagatgtgtccttgccttctattcatgatattagatggagcttagcacggttgttatacttatttaacatgcagcttgatagaaatgttgccatgtaagttaatcacttcatcatttatttggctgagaacttttctatccactggttgtttaataaactttaagcacctcacttgacgaaagccttttaagtagcattacttatatccttttgatgtgtttttcttggtatcagatgattatatttagtatcagctttgcagccttagtatgttataacatagctataaggcaaataatatgctatatacgtcatcttgcaaatgatgtgcgttagtgtgcactgttagtgtattgtcaagctaaaatggtttatttgtcatgaagataacttcaaagaagtctgccaatttatcatta

SEQ ID NO: 26400 - DNA, 137 bp, Glycine max
  Clone ID: PAT_MRT3847_123840C.1
aaaaagccaatagattgataagattaaattaagagcctggattttttgtttatttcaacaaagctttgacaaactacatgccctcatgggtgggggaacaaaatacccaggtctttttgaataggaatgccgagggt

SEQ ID NO: 26401 - DNA, 456 bp, Glycine max
  Clone ID: PAT_MRT3847_123841C.1
ctcacgcgtgggttcattaatttgttcttgaccttattatgaacatttgtactaagatcgagcttatgatggatgtaagtgaggaagaacttgctgtagaaatcatcatcccaatcctatggatgatttcgactcagcttataactctgcttatcctctttgtgctcctctttttcttcacccttctcctatccgatcccgacgaccaccaccacaacaaccttgacagcgtctgacacgccctttgattcgacaacctcttccagcgtcttctttatcgactactttcacagtcactagagtgactcgcggtgcactaatgacgattcatagctcaatcattcaccaaccaccttgcctggcatggtgaagctattattaaaaggcgaaatagcaacggacttcagtccgggtttgagacggtgcaaaaaaattgtagacgaggaagtggaggag

SEQ ID NO: 26402 - DNA, 241 bp, Glycine max
  Clone ID: PAT_MRT3847_123842C.1
ctgttctttattataagaatccatcactcacggggtgtaacaaactgttgacgtggggatctctattgtggtcttttattaagtgcccagctgatgtgcgcgtgcatgcgacttactaggcttctaaatagataaatgtatgttcaatgcacagagtgtgttgctacaaaggcatgtctgagaaaatcctgtcgctacgcatttcatgcaccttgtgtgacagctggcttatctgagatag

SEQ ID NO: 26403 - DNA, 246 bp, Glycine max
  Clone ID: PAT_MRT3847_123843C.1
ttgtttttttttttttttttttttttttttttttttttttgttggtgttgtcttttttttgtttcgccagtagaatgctatgaaaacattttcaaaaatataggcgcagggtgtttatatcaacttcccggcttcgagaatgttacagatgatgtggtgggcgtcccgtttaaaatttccacgagacataagtgtgtaggtcaaaatcaagtactctgggtatggtcttaaaataacacgtcccta

SEQ ID NO: 26404 - DNA, 430 bp, Glycine max
  Clone ID: PAT_MRT3847_123844C.1
aggcatgtttgttatacctataaatccctcttataccctataggagtgtgagtttgtaacaatttcctttccatttagtgagtagatttatattgtgtggtaaaagattaagaaatgaaattaatcattcatagaggtcctcacttgaagtatgttccataataatggggacacaatggttactaagaaacaaaatattcatgttaaatcccgggactcatgtaaatttaacacacagtacattgaaaatgttttgttctctaatctctacatgataactaacatgacattgaaattttttcttataggctaaaatcaacttatgcaccttcacttttacttatgggagaagtatgtttcattttacttactttcttttcttgtaagtattttttgagaagttcatccaacctggattataatgtataag

SEQ ID NO: 26405 - DNA, 502 bp, Glycine max
  Clone ID: PAT_MRT3847_123845C.1
ttctactaccaccaaaccaaaccaactcattctggaattttctaatggccttgactttttatcacggaatagggaaaggagaaacagacatactataccaattccccacaaagccttggctctctttcaaacatacaatcaaatattgaaacaccttaacatccaatccttaaaaatccgtacagggaattatcaaaatactaaatatgctcaacatatgtatctaagaaggtttagaacactccactaacatattttgatgattgccacttttacatcttatggtgtcagtatttcttaataagcatatgattcctagatcttgtgacttgaactcacttacgaagatgagatggcgtagatcgggaaactaggcttttccatattgacattgactttgatttaatgaataatttgttggacaagagtgtatgatactatgtaagggatgatggtgttatctacaattaggcgaattgtgagccctgatggagaccattga

SEQ ID NO: 26406 - DNA, 264 bp, Glycine max
  Clone ID: PAT_MRT3847_123846C.1
tcgcgagatatactcctacacgtacctctcattccacgctcgttgcgacctccttaacgctgagttgctatcaggttgctcagtcggttgtgttcctcgaccacgacctcggcacccgtggtggtgtcgtcggccctgcggttcgttgcctgccttcgatgtcttggcgtccacgattgttcgcattctgtcgctgactctgcagtcatttggtgttcgatcaggagccgaaggccgagcacgatttccatctcactgtggttg

SEQ ID NO: 26407 - DNA, 246 bp, Glycine max
  unsure (1)..(246): unsure at all n locations
  Clone ID: PAT_MRT3847_123847C.1
gnggaagantttnnggngnnatttgagttgtcctgtggnaccattgcngggtactgatcaagtgtacctcangggcattttcttanatgggttaagggangnagtgnaggcagantttaaagttgcacctagtaaggacattangnacaatgattgatanganacctacaagaaaaggnctgaatccngcaaccagaagtggncatacttacagnnatattccatcctctagaacagtantggtgg

SEQ ID NO: 26408 - DNA, 271 bp, Glycine max
  Clone ID: PAT_MRT3847_123848C.1
gaagaagaaaaaaccctccgagtcaactcggacgaggggcctgatcgtacggttccgtcctcggactctgtcctcttctttcccttacgaaatcaccgttcgcggggctttgctctctctccgttgttcgtgcagatctcacattggcttcagctgaaacgacgcgcggcaatttccttcccttaatgagggacctatatctcaggccgcaactcgaagtgacgatggtgtgggtgttgcgagaaattaaagatcgttgaaggagagagac

SEQ ID NO: 26409 - DNA, 929 bp, Glycine max
  Clone ID: PAT_MRT3847_123849C.1
tttttttgggaccagaaaagattaatattgctgataaagaaaaatgctgcctacaattcgtaagcaaagatcctctagagcggccgcttttttttttttttttttttttttttttttctgacaattagattggatttaatgttgagacctttgtcattaacttgtacatagtaatggaacagaaaaagaagagggatgttatgccttattgcagaactttcatttccaagcgcaagaagcaaccaaatctctattcatccaacccagataaagagctccatctctctcttgaagtctatatctatcactgtagttctcgagcaacttcttgatggtaccattcaccaatgaacttaaagggtaaggagtgaaaccggccattgcaaatcttgacctccacttgccgagcacctcatgtcgttccaccctctcgaccccttcacaagctatgatgttaaccaagtctcttgccaaacaatgttgctcaacattgattctctctttatgctctctggaaagagtcacatctattgactcaaacattgctgtgtaatagtccagagtttcaaggaaacgtggaaagaatgcagcagtgttggtgttagattcttgctcaacaagtgtcaccacctttggtgataggctcctaaccaacctcaacagcctatccctgtgattctgagtactcacactttcatccggcatgtgatgtagcatgaacgcaaagtttacagccagagcttcccctggtcgtactccaaggttatgtagttgaacatcaaaacctgagatagctgcagcatgaaattcaaatggcaccttaaaatgctcagcaagctttgataacctccttcccactatgtgtagtccaccaccgcgagcataagccgatgttgaatcatcaatacctgtaatccggatgtggggtg

SEQ ID NO: 26410 - DNA, 784 bp, Glycine max
  Clone ID: PAT_MRT3847_12384C.1
ccctcgcgtccgcggacgcgtggggtaatattgcttggagatttaaattacagaatttctctaccggaagaaacaacacgcttacttgttgaaaatgaagactgggattacctactagaatatgatcagctaacaatggagctaatgaggggaaacatgttaaaagaatggcatgaaggagcaatcacatttgctccaacctacaagtattgtccaaattcagacatgtactatggatgttgttatcaaggcaaaaaggcagggaagaagcgagcaccagcatggtgtgacagaattatatggtttggcgatggtctaaagcaaatgcagtatgctagatgtgaatcaagactatcggatcacaggcccgtcaatgcattgtttatagcacaagtcagggtttccggggctacccgctgagtttaagcatatcaataagcggagagatttgaacaaattaaaactcactttggatttccccacaatgacgagtttgtatgtaaaaagcaactaagtttccggttgtgaatcattaattaattagtactgttcttatatatctgcatactagtttgagtcaaagaagaaattaaggaaattaagaggtgatcaaagattattaattagctcttttgctgatgagagacacagtgaagttagttgtttattatctagctaactagtttttaaataattgtccaatagaaggtgcaaatatgtcattgaacattaattccgtatattttcttattttggaagctttattgatctccttaatatttat

SEQ ID NO: 26411 - DNA, 400 bp, Glycine max
  Clone ID: PAT_MRT3847_123850C.1
ggaagataaacggcttatattgtttttcgttcacatataatagaattgatgggtacacatcaccggaaattagtgcacaaggactttttactgcataacagggcacctctccacaagagaaaaaacaaccaggttttgaaatcaaaggagaaatccttaaaataaaaaagggggctagaaaaagttctttcatatatatagttttctcggcacacccaaatttgctatacgggcactggtccacatacgcagaggtttcacccaccgcattatcatggtttcagtttggacgcaacaacccccgactgtgtgatggattttgcaaccttcaacaacactggagatcccccagccggtgcccaccatcccccccttttccttgaggttcccttaaaaacaa

SEQ ID NO: 26412 - DNA, 443 bp, Glycine max
  Clone ID: PAT_MRT3847_123851C.1
acgcatgcaggagatgtgtcgatttggggttaagaactgtgcttatagtcacacctgtcaacgtgctacataattggcgtcaggagttcatcaaatggagaccttctgagttaaagccactcagggtcttcatgctggaagacctatcgagagatataagggcacaattgcttgcaaaatggagatctaaaggtggtgtctttttgattggttatgctgctttccgaaatttgtcttttgggaagcatgtgaaagatctgcacatggccatataaatttgccatgctttgcatgatggaactgacattcttgtttgtgatgaagcccatatgataaaaaatactaatgatgacgtaacttaagccttgaaacaagtaaaatgccagagaagaattgcacttactggatcacctattcaaaacaatctcatggaatatcactgt

SEQ ID NO: 26413 - DNA, 474 bp, Glycine max
  Clone ID: PAT_MRT3847_123852C.1
aaaaaaaaaaaaaacccctttgctttactttttgaccagagggggccttgaaacccgatacaaaaaggggtttttcttcccagatggggggccgccaaaaaaaagaaaaggaaggcaaaggccccttttctttttcggggattggggttccttgaaaaactggttaaactaaaaaatgggcttttaccccacccaagaaggggggccctttcactttcaccccccttggattttttataaattaaaccccccccttttcctttgggggcattttttgggggggatgacaaattaggatccgggtttgtcctttccaaccctggtttccagaaaaaggggtcccttccaagcagcctaattccctgggtttttttttcaattttccatcttgggattctcttcatctcaacacaaaacttctcacgggggggggggggggggactcaacaatcaccccccccccccctttgaaaa

SEQ ID NO: 26414 - DNA, 492 bp, Glycine max
  unsure (1)..(492): unsure at all n locations
  Clone ID: PAT_MRT3847_123853C.1
gaagaaaggcctttccaactcanagcagagaacaaatagggtgatatgtgaaacgcaacaaaaacaaataccatgagaagtggatgagaatttcatccacccaagaccggggggggccgtaatgaaaggacaaaagctgtttctnacctcttggttttagggaggaggagcacccccagcnaaaagcacaggcaaaaaaacaccccacgaaggggagggggcgcacgggacaaaggagaagagacgaccggggagcaacagaagaagaaaaagcgggcgagcagcgagagcgacagccacagcaggagangaaggggggggaccgaaggccggcagggaacagagcagggcggcgcccagcgcagacagaacagaaaccacaagagcgggggcggcagaaaagccagcgggaagccgagcaaggaaagccccagcagaaggaagcggcagaccagccgggggacgggcacgagcaggcaacagacggacaaa

SEQ ID NO: 26415 - DNA, 649 bp, Glycine max
  Clone ID: PAT_MRT3847_123854C.1
gcggttgcccgctcgccggcactcttgccttctttcctagaaaccactagaacattcaatttgatttacaccaaggaaattcgtccatggacacacatgatggccgcaccgcaacttcatggatttggcccacctgcgaatcgtttattggaataatatgcttttgtagtttttgttttgggcaacctaccttagagactcacatgcaactcttgccttcggctcttttctgacatccgacgggccttcatctgtcacacgaaataatctctgaatgtgaatctgcattgacagtcttaaatcgtgatcttggaattctctcggcttccattgctcgtgaacagggagagaagatgaacatttgatgaaacatgataaacaagttattaatcattattcttttgaattttgtgaacttgtgcataatgttcatattgttgacatgagatgtgttaatttgaagtaagcatagttgttagactgggtctatgtaaacttgtggagggtctaaagtgtgacacatagacttgtaaactgataagagtatacctaatacaaaaatattattaaaaaacctaatcattatccaaataatatataaaactataaaataatgtaaattatgaataaatgaaataaattaaggttt

SEQ ID NO: 26416 - DNA, 432 bp, Glycine max
  Clone ID: PAT_MRT3847_123855C.1
tttactactttatggggattttgtttttttttcgggcattaaaacgtcatcagaccgaaacccacgccatagagcgaaacaaccaacctatgtgacaccctaggttggccctctacccacaccaacaatgtggggaggggggattgcgcaagaaacaaacaccactggcactaaaacaatgctagggtgtattggtgcccaggatacattgcaaaggagggccgaaacacggtgctgaaactcaaaccgggagggccacctcacaggcaatccataggaaaaaccgccccccggggccagctgcaccttggtagacggccgatcagtaaaaaagttgccaaatttttgcccatcagcccgaaggtcattgaatctgagacttccaggaagtccagctggaatgtggttattaactggctaagatgccagcgc

SEQ ID NO: 26417 - DNA, 204 bp, Glycine max
  unsure (1)..(204): unsure at all n locations
  Clone ID: PAT_MRT3847_123856C.1
ttgcgcttaattaacatctgcttcttccccaattccttctttccattccattactccagtgnctgagcataggncagcggtcaacnaggcagnntcannttgcactcantgnganaccaacacggttcccactnaggcccaaagcangggactccgactattnctacagattcangagtactatactcgggttnaaaattncac

SEQ ID NO: 26418 - DNA, 405 bp, Glycine max
  unsure (1)..(405): unsure at all n locations
  Clone ID: PAT_MRT3847_123857C.1
cacgcgtccgcttgacggtcgtcgggttgaggtaaaatttgcaattgaaagatcccatggatttggtggtggcggctttggtggatcttatggcaatactccctatgatgctggagctggcactgggcatccaggtagttatggcaacactccatatggtgctgcaagtggtgggtatgacaatactggtggtggcaatgctgctggagtttatggcaggggtgaagatggtggaggtggcaattggccgagtggtaattttgggggaagcagctttggtaataactatggcgatgctggtgtctatgctggcaattctgtggaggttatgacaacaatggatatggtggaggatctggcggtgacgcgggtccctatggtagcantgctgctncagattgtgac

SEQ ID NO: 26419 - DNA, 343 bp, Glycine max
  Clone ID: PAT_MRT3847_123858C.1
ggctcgagctcgtgaatgggatgctggttatggcatctaacgttccctagggtatatggcgggaacatactgagaaattttcgccgacatggatcagctgcaatccatgcagctgattcattcatagcaaatctaaggaagtttgtcctgattcctaaatcaactcatgcatttactgattgcagcctcgatgttagagccagtaataggttcaagagctcagaggagccggctgcatgcacacgctgctcaacaggtgcctatcactgaaacctgtggcgctggccctctcctgtgaccagtgactactacagaagacaggcactgtgacgatgccgtacat

SEQ ID NO: 26420 - DNA, 403 bp, Glycine max
  unsure (1)..(403): unsure at all n locations
  Clone ID: PAT_MRT3847_123859C.1
attacaatacattccatgtagattatacttaaagattgatacgaaaatggcctaactgaggctagtcaaaaaaagcgaggcggtntcattatttcatgaggaagattctatgaaatcaaatgaggagtctaatggtcttttctaattctttaatatatcattttaaagattataatgtttttttttaattatatattattttttttttttatttatattttataatatttttttatcatattattttattttattattattaatttaatattattgtatttttatattatttttttattattataattttttattctatttatttattttttataattatttataatattgtaattatattttttttgtattattaattttatattttatattttttatatta

SEQ ID NO: 26421 - DNA, 259 bp, Glycine max
  Clone ID: PAT_MRT3847_12385C.1
gtttcttcaaccactactgtggaactacgtggccgcaacaatgatgacgatgatgatgacaaagccacttcatttctgttccctttctttccgaaatttggtgttttggggcagaaggatttgaagctccaactggggaagctttctcaaaaagagaagtttttgacacacagagacgatggtgatggttctggagttgtggccgttgactcttcatccgtttttccagtcagtggcaatgtttatccagatgggttgt

SEQ ID NO: 26422 - DNA, 527 bp, Glycine max
  Clone ID: PAT_MRT3847_123860C.1
aaaaaaaggaccatttaatatcccctgggctagttaccataaaattttggggcagttttttcatccatgcaaaaactgggattacttcctgaatttacattaaaggcctttaaaccttaaataggtttttggacattgaattttcaatttatgcatgaaaataaaagtagcctttttacaagctttcaccaacataaaccctcccacctaaaaccatttaagcgttacaacttaattaaaaagggttgccaatgtttttccaagggttgaaataataaagttgttccaacacttttcacttgggggggaaagccgcaaaaatttttgcctggccaggatctgcaaggggaacaaaaaggttgtaaataggaccagggccagtgtaaatgggctggaaccatgcccccattaaaaccaaaaggggcaaccccccatttttgatctcctttggtctcaactccttgattttttaaagaaaaccacttccccagccaagggggtaaaaccaaagcccacctgggtaccca

SEQ ID NO: 26423 - DNA, 196 bp, Glycine max
  Clone ID: PAT_MRT3847_123861C.1
ggctcgagccccaattcttctatcctcgatctcagctctaactatacatgctgatctgctgcgaaggacagatcactgaacgtcgcctccgttcagcatgactaactagaacaacgaataagaccgatggcacactacggtctggttcactgtgatctctgcttgaggacctcagacacaagcacagcctataccg

SEQ ID NO: 26424 - DNA, 170 bp, Glycine max
  Clone ID: PAT_MRT3847_123862C.1
cggcaagacgacacaagggctggactacactcatattcgaaagaagcttcatcctactccctagcatacacactcacaaagtatatcgatctaggcatgtgtcacgtcaacaacaacttctaaacatatcataagtaaggctgataaacccgagtaagtcgcataatgga

SEQ ID NO: 26425 - DNA, 389 bp, Glycine max
  Clone ID: PAT_MRT3847_123863C.1
ggggccacagaaggtaccatcggaacttattgtgaacttagagcagcgatccactcctgtaacaaaggtgtagcacacattcgagaacatgtcaccggccagaaggcattggctgactttaacattctttttatgggagagcactaaagtccatagctgggaggtataataaagagataaaacattcatgtataatgtttaggcaggcattaatcacattgacgacacagacctaacccagcacccacgaggaaacatctgccataggaaaaataattcttaaatgtagctgaagcaacctatatagaagagggggcaatatgctttgaactcgcaggcggacccttcacttgttctgtgcggtatcctggaagaatagatgaacacct

SEQ ID NO: 26426 - DNA, 250 bp, Glycine max
  Clone ID: PAT_MRT3847_123864C.1
gtgccaaatacgggggggggtacttgatttacttgtcaattaacaagctcttatattacctttgatcgttgttttacacccagctggtgcaaacattgaggcgcagaaagcgaaatctaagtttttacaagaaaaatacactccaccatataactttagtgggtcaaatttggcatatgatgcaaatgctaatgcacactatcttccggttaacattctcatcattccccaaagcaacattacattaaca

SEQ ID NO: 26427 - DNA, 214 bp, Glycine max
  Clone ID: PAT_MRT3847_123865C.1
tatacaccgtcatcatcttcctgcaggggggccgaagctcgtaattttgctcgaggtcatttttaccaacgctccaagaaatgcttttccactgaaggggggaataaacaaagccagctacctcatggctgatagcacttcctttacccttgcatattggccactactgcataaaaattctacacaaatgggtccaaggaacatctcccctctt

SEQ ID NO: 26428 - DNA, 1396 bp, Glycine max
  Clone ID: PAT_MRT3847_123866C.1
gctgggcgcgaggggctggaacttagccacgcatccccgaaaggccaccaaacaccgcttcaatttcaatttatacgtcaacgaagcaatttcagaagcagaagcataagcataagcgttcagttattaagtgtcggtgttgaacgttaaaacctaaaatggccggtaaagggacccattcagattcaaaagcagcaacaattgtgattaaggatctgagattcacataccccggcatcgacggccaccctccgccgggttccactcccctcattcaggatttcaatctcactctttcttccggccatcgctgcctcctcgtcggttccaacggcgccggaaagaccactctcctcaagatattaggagggaaacacttggtggagcctgacatggttcgcgtgctcggaagatcagcttttcacgacaccactctaatatcttctggtgatctctgttaccttggtggcgagtggaggcgagatgttgcttttgcgggttttgaggttccaatacaaatggacatatctgctcaaaaaatgatatttggtgtgcctgggattgatcctcaaagaagagccgagctaatcaaggtattagatatcgatctttcctggagattgcataaagtatctgatggtcaaagaagaagggtgcagatttgtatgggtctcctcaaaccattcaaggttcttcttctcgatgagataacagttgaccttgatgttctagcaagagctgaccttctgagatttctaagaaaggaatgtgacgagaggggtgccactattatctatgcaacacatatatttgacggcctcgaggattggccaacaaatattgtttatgtagcccatgggaagctgcaactagcaatgcctatggacaaagtcaaagaaattagcaaattatcactaatgagaacagtagaaagttggctgcggaaagaacgagatgaagatagaaagaaaaggaaagagagaaaagcagctggtcttcctgaatttggaaagcgagttgaggaaagccgtgtaacaggggatccagcgcgtgctgcagttcgagtaattaataatggttgggctgcaggacgattaacttccaccgttgctggtgaggaaaactttctcctgagctcaaaccgagtattgaggcagtagataaatttcaaatgctattgcctatgagcattttttctgtgtatttttataaacttcaaaacaaatttttttctccaatgctttctggcatatgtaattcgttgtgatatagaaatgatcacaacaggttatacacaaaatgtgagctaatgtatctgagtatctctactattgaaagtatcgtgtcacatgtggccttagtactgcaaatttgtgaacaaaccttcagttctctt

SEQ ID NO: 26429 - DNA, 745 bp, Glycine max
  Clone ID: PAT_MRT3847_123867C.1
ttcccttctatgaatgatgcgttttttgccgccatatacgccaataatcacccatttttctcacattgcaacattttgagttgatttctatgcactgcttgcaaatataaaaccccataaacaatcatagtttttcacgaatacacttaggtaggaatccagcacaaacttttttgtcttctgatgttggaggagggtgaagaaagctataacttggaattagaagttccggttacaaatcgtccctacccccaccaccatcgtagaaagaaagtgttagctaaagatataccaaaagggtttttgccaatcaaggtagggcaaggtgaagaacaacaaaaaattgtgatgcctattgtgtacctcaaccaccctttgttttctcagctactcaaggaggcagaggaagagtatggttttgatcaacaaggaaccataattatcccttgccatgtgaaggactttaggtacgttcaaggcctcattgataaggagaagtcctcccaacaccaacaccatgtcataagctgtttggaagagtatggtctttattaacaacaaaccacaatcacacaaatgcatgtgaaagactttaggtacgttcaaggcctcattgataaggagaagtgctccgaacaccaacaccaacaccatgtcataagctgtgttaggccttcacattaacaatatctctcactcacacacattcacaacatacacacacatatgtatgtttcttctttgt

SEQ ID NO: 26430 - DNA, 461 bp, Glycine max
  Clone ID: PAT_MRT3847_123868C.1
aatttaggcatttttgctgatgctcttgcaaagcgagctcatgaatttgaaaaacatgttgctcatgaaagtctcaaggatcaaattcctgctggtgacaagttgtattctactaaggttaatacgtctgcaaaaattattgaaccttagacaaagtgttggtggtgatcttaaacttcttactgatgggaaattgaatgaggttaaacatattactgtatctaacattactgcatgagaaaatcatgtaattcaaatacccctaatggctcaggaggaaactctgacttctagtggcagtgattctagaactgccatggtgagtaaacaaagccagcctcaagctactgcaatgcatgtgggagctatagaaattatcattgatagttccacaagtcccgactgcaacataggtggtgcactgcttttggttgatacttatcataccaatcctgaaaatg

SEQ ID NO: 26431 - DNA, 323 bp, Glycine max
  unsure (1)..(323): unsure at all n locations
  Clone ID: PAT_MRT3847_123869C.1
gcgcacgnaagcncggaantcggctcgagaagctttcaagagacaaactgctttgtaaaatgggatccaagtttttgtttctattccgatgcgcccttcctccatctctcattaacgagttcttttcatataccatgggtagcttcaacaaccactacaatccacatccccaaccttctcacgtcacttctcttattacactacctaattgtccggatctgagtattttcctcactaatttatgcgggactctattaaccttttataatagtttatcccttatctgatgttctggtgacattttagccattgtgtgccttttc

SEQ ID NO: 26432 - DNA, 283 bp, Glycine max
  unsure (1)..(283): unsure at all n locations
  Clone ID: PAT_MRT3847_12386C.1
nttggccacgcggacgaagacgcatgggatgcgggggaagattaaactgggaaggagaatcaagaaaaacccgaaaagaaggatgccagattgagacacagcatagatgcgcactacaatgagggggagggtcagatggaaacagagctggttaaatagtctctggatgatgttgaaactcccaaagggtccatgtggggaacacaaatctattagatttaagatgcacttgccaagaacacacttggaggaaccattctgagtagtgagctataggccaagt

SEQ ID NO: 26433 - DNA, 273 bp, Glycine max
  Clone ID: PAT_MRT3847_123870C.1
tttttgcatatgtacaagaattttacatacagagaatcatggtgctaggtgatctggccactgattgaataatttagaaacttcactcataccaaaatgtggtatgtatggacattaaaatcctcatgcgttgagtgtcaccctagtaaaaaataagtccatctgtaagaaaggacctaggatagctcagtacccctactatggaaatttaggtcacgatacatctagatattaactagtggatatcttgagctggtctatatacccagacta

SEQ ID NO: 26434 - DNA, 227 bp, Glycine max
  Clone ID: PAT_MRT3847_123871C.1
acggctgcgagaagacgacagaagggaattgtaacatctcaccccaaaaaaaaaaaaaaaaaaaaaaaaaaaaacccggcccccaaaactgagcccccccgccccggaatttattccgggcccgtaacaggaagggttcccaccttccccaaagtggttttaaattggggcttggccaaatcaaggtcaaaccctttcccgaattaaattttttccccggtcacaat

SEQ ID NO: 26435 - DNA, 253 bp, Glycine max
  unsure (1)..(253): unsure at all n locations
  Clone ID: PAT_MRT3847_123872C.1
catacccgcagaaggcggctggtntatcattatcactctaaccgcanatcatagggcttgggagggtcactcccattgcgccattgaactaangacacctaaaacttacatctacgcacgttcnggccttgtnncantttatttgaaattgggatttatgttcatcatccttagacgttcccggntttggctggtctgattttccgtctgacctacctacgggggcgggggctgcctgcgtttgcgggaccgg

SEQ ID NO: 26436 - DNA, 121 bp, Glycine max
  unsure (1)..(121): unsure at all n locations
  Clone ID: PAT_MRT3847_123873C.1
tttctatcaggcggcggacgcccatanaaagggacagggtttaaatataagtggcccaaaacctgccacgaaacaacacaaaggatggaaatacacaagggggacaaacagacacgataag

SEQ ID NO: 26437 - DNA, 1921 bp, Glycine max
  unsure (1)..(1921): unsure at all n locations
  Clone ID: PAT_MRT3847_123874C.1
aatgctgcctacttaatgtacaattcgcctatcacagagtccatgtttgtagaataaaggaaatggacgaaaatgagtcccttgagcttttcagttggcatgcttttagacaagcacatccaagagaagacttgattaaactctcaatggacatagttgcttactgtggaggactaccactagctcttgaagtccttggatcttacttatgtgagaggacaaaagaagaatgggaaagtgtgttggcaaaactaaggaaaattcccaatgaccaagtacaagagaaacttagaataagctatgatgatttagattgtgaggaaaagaatatattccttgacatatgttttttctttattggcaaggatagagtcaatgttacagagatattaaaaggttgtgatctgcatgctgaaattggaataacaatcctggttgaaaggagcctcataaagcttgaaaagaataacaagatcaaaatgcacaatttgctacgtgacatgggaagagaaattgttcgtcaaagttctctagaggaacctgagaagcgtagtcgattgtgggttcaccaagaagtgcttgatttgttgttagaacatactggaacaaaagcaattgagggcttggctttgaagttacaaagaactagtggacttcacttcaatactaaagcatttgagaaaatgaagaaattgagacttttgcaacttgatcatgtacaacttgttggagattatgagtatcttaacaaaaacctaagatggctttgtttgcaaggatttcctctacaacacataccagaaaacttgtaccaggaaaatctaatttctattgaattaaaatatagtaatattagactagtatggaaggagccacagttgctgcagaggctaaagatcctcaatcttagccattcaaggaacttgatgcacacccctgatttttcaaaactaccaaatcttgcaaaactcaatctcaaagattgtccaagattgtctgaggtgcaccaatccattggagacctaaataatcttcttgtgataaatttgatggactgtacaagtctaagcaatcttccgaggaggatctatcagttgaaatctttgcaaactctcatcttttctggttgttcaaagattgacatgttggaagaagatatagtgcagatggaatccttgactacactgattgcaaaagatacagccgtaaaagaaatgcctcaatcaattgtaaggttaaaaaacattgtttatatatccctctgtggacttgaaggattagcacgtgatgtttttccttctctcatatggtcttggatgtcaccaacagcaaatctcagatcttgtactcactcatttgggagcatgtcaacttctctaacctccatggatattcatcataataatttgggtgacatgttgccaatgcttgttagactttcaaaacttcgaagtattttagtgcagtgcgactctaagtttcaattaacccaaaaattaagtaaagttatggatgacttatgtcaagtaaaatttacagaattggaaagaacatcatatgaatcacaaatttcagagaatgccatggaatcttatttgattggaatgggacgctatgaccaagtcatcaatatgcttagcaagagcatatcagagggattgagaaccaatgattcaagtgactttccccttccgggtgacaattatccttattggttagcttgtataggtcaaggacattcagtacattttcaattgcctgtggatagtgattgctgcattaagggaatgactntgtgtgttgtttattcatcaaccactaaaaacatggcaaaggaatgtcttactggtgtctccattgntaattacacaaagtgcaccatccacatatacaagcgagacacaataattttctttaatga

SEQ ID NO: 26438 - DNA, 891 bp, Glycine max
  Clone ID: PAT_MRT3847_123875C.1
agacaacagatgaattttaaaggaaattatgggaaaggatagaaagtgattgtgtttctagaactggtactttaaaaatgaaagtgtgtgagagagagaggggggcaagacacaaagcagttggcaaattagcagaaagttcaaaaccccacagagctgttttcaaataaattctgttctttttatcccattcaagtcaacttaacacaaaaaggtttagtctttggaattggggttctgggatttttctatatatgaattgaagtggagatgatattggtgtagttggtgagatgaagggtgttctttccatcagtttcttgttttgttgcttgctgctgcttttggattcttcaatttcacttcctctatgtgttgattcaagggcaccctttaccttgaacaagacacttggattttgtccttacaatggaagcacgtgttgcaactccacacaagatgcacagattgagaagcaattccgagcaagcaacgtttcagatcctggctgtgccttggttttgaaatcaatactttgtgcgaggtgcgacccattttcaggggagctatttactattcaatcctcacctagatcagttcctgtgctttgcaattccaccataccagcaaattcttctcaatcaaagacagaagtggaagatttttgctctcaagtatgggacacatgcaatgatgtatctatagtgaattctccatttgccccttcattacaaggtcaagcaggagcaccagctcacagcaatgctaccaaactctctgatttatggcagtccaaaacagacttttgcactgcatttggtggagcatctgataattcatcagtgtgctttgaaggggaacctgtttcacttgataaaactgggaccctta

SEQ ID NO: 26439 - DNA, 2260 bp, Glycine max
  Clone ID: PAT_MRT3847_123876C.1
ggcttgtgaacaagggcaagagagaaactaaaagggtctttttttactcaagtagttgagggagtttcttttcttatattgagaggtttgaatgaaacaatgggagagttgactatgtaggagttgaagacaatggttgaatattaaaggaaatgatggaaaaggatagaaagtgattgtgtactttaaaaatgaaagtgcgtgtgtgggtgcgagatagatagagagagacagacagagagagagagagagagaaagaggggggcatgacacacaaagcagttggcacaaattagcagaaagttcaacaccccatagagctgttttcaaataaattctgttcctttttgtcccatcaagtcaacttaagacaaaagtttgcgtctttggaattgaggttctgggattttgctatatatgaattgaagtggagatgatattggtgtagtgggcttttcaactggtttggtgagatgaagggtgttctttccatcagcttcttgttttgttgcttgctgctacttttggattcttcagtttcacttcctctatgcgttgattcaagggcaccctttaccttgaacaagacacttgggtctcgtgactcaattagtcatcgacactacttcagccttgtgagaattggtaatggatcttatctcaacatggtggctcatccggatggctctaaccgtgcattcttctctaaccaaatgggaaaggtttttctggcaacacttccggatgagggatcatgaggaacattgaagcttgatgaatcaagtccttttgttgatctgactgatcaagtttattttgatactcaatttggaatgatgggcatggcatttcatccagattttgctaaaaatggacgattctttgcttcatttacatgtgataagtccaagtggtctggatgtactggaagatgttcatgtaattcagatgttaactgtgatccatcaaagttaggtactgatcatggcgcccaaccatgccaatatcaaactgttatagcagaatattctgctaatagctctggatcccagccttcctcggtggaaagtgctaaaccaactgaagtgagaagaatatttaccatggggctcccatttacatctcaacatggaggtcaaatactctttggacccgatgatgggtatttatacttaatgatgggatatggaggaggtgctggtgatccttacaattttgcacaaaacaagaaatccttgcttggaaagattatgagacttgatgtagacaacatcccaagtgcagcagatattagtaaactcagcctttggggtaactactccattccaaaggacaatccttttagtgaagataaagatctgcagcctgaaatatgggcattgggactaaggaatccttggcgctgcagttttgatgcagaaagaccttcctactttttgtgtgcagatgttggacaggatgtttatgaggaggtggatctcatcacgaagggtggaaactatggctggcgtgtttacgagggcccctatccattccagccgacacaatcacctggaggaaatacttcggtaaattccataaatccaattttcccaataatgggatacaaccattctgaattaaacaagaacgaaggatcagcatccatcaccggaggatatgtctatcgatctaccactgatccttgcatgtatggaagatacttgtatggagatctatacgcgggtgcaatatgggcagccaccgaggacccgcaaaacagtggaaatttcagcaccagcagaattcccttcagctgtgcgcgtgattctcctatacagtgtgactctgcacctggaaaccttcttgcgttaggctatatcttctcatttggcgaagacaacaacaaagacgtttacatccttgcaagcaccggtgtttatcgagttgttcgtccaagtcgctgcagttatgcttgctctcaggaaaaggcaactactactacaacttcagctccctctccttctccttctcatgctacacgttggagtgtcctttctggatatttgtttttgcagtgttcatttttgttgctgcttttgttgggttctatgtagagtgatatgatctttgtacattatgtagaagagatcgtaagaggagaatgcttaccctttcttctgggttttctacattttggtttccttatgcttgattaataaaagatgagttgtgttgctgaatcaaaaaactcgagccaagagtaacttaattaaataag

SEQ ID NO: 26440 - DNA, 743 bp, Glycine max
  Clone ID: PAT_MRT3847_123877C.1
ccacgcgtccgcggacgcgtgggcggacgcgtgggctttgttttgatgaccttcacctaccctcattgcttctcctttccttctttctttcttttgttctgattgaaacccactcagtaactttctcaaccaccacttgtcttccttttccttacagagggctcctgtccctgttcctactaacactaaggcctagggtctctcatttttctcatttgctgcatcaccatgcaacttggggtgctcactattactctgttcgccactgcctgaaacataattaaggttccattttgaccaaggaggtcttgcttttccagctgtcaactttaagggttgtgatattttagttttcatcttcattgggtttgatctgcttttttttttcttttccaagtgggccgtcttggaatgctgtgtgtgatcgtgaatgcgaatgcgtgaagctctgaagaaaaagtaatggggtggtgtgggggttgatcaaaatagagtcttttctatgaatgcttggtgaactgataaaaagggcagaaatgggtgctacgaactcaagagcggaaaagaatgaagctctaaggttgtgcagggaaagaaagaggttcgtcaaggtggctattgactcacgatatgctatagcagctgcacatgttacctacattcaatctctacgaagcgttggcgttgctctccggaggtatgctgagtctgaggtagaggtagagtcatctctgtctatatct

SEQ ID NO: 26441 - DNA, 275 bp, Glycine max
  unsure (1)..(275): unsure at all n locations
  Clone ID: PAT_MRT3847_123878C.1
ctgctcgcaaggtaatgtttattagcgggcgttaatgttgaaataggatgcccaagttgtacagccctacaccgcgtgtaccattatatataggacgtggctgcattgatcgcccagaagtgatacatataacatatttaagactaccttcnatcgttgtataaagggtaaattttantccgggtttgaggttggaaccatttatttgtgtancctcgtgagcactagaccggcgcccaaagaggattaatcctgatgggcgtgaatccggggac

SEQ ID NO: 26442 - DNA, 437 bp, Glycine max
  Clone ID: PAT_MRT3847_123879C.1
cagaaaatagattctcgtaaactaatacagaagaaaataaagttttatatcgaattaaatcttttgccttcacaaataatatggaatcctctatagacacaaacacaaacacaaattatgccaagtgaccaagcgaagagaaatgcagcctatacaataatacaaaagcacgctccacacagagaacaccctaggcaaacttcaaagttgggaatcacaaaatttcagaattgcaagctcatgagattgattacaccacttctgtcacactgttctcttcagtggtcggagtttccatattttctttgtctccctttggagtgatagcagtaactttaacatcagatttctttccctgcctctttaccatgcccttttccttatttgggtcttgcttgcttggcttctcaaattttttaaccaacctattattcctg

SEQ ID NO: 26443 - DNA, 286 bp, Glycine max
  Clone ID: PAT_MRT3847_12387C.1
ggcaaagcgaacgtgactcctgatgaagaagaagtttctgcaatgtgcaagggcttctcgatgcgcacgccatgcctcagttttctcccacctttgctacggctatccatttccctcttatattcgctcctaaggttccgcaggctccgctgcaaagacctgatgagatgcatgtatcaagttgtgcctgggctgagacaacttcatgttatgaagattgtgcccgcatggtaagaatctcagcaccgattacttgtagttatgactgaaaggaagtacctgtgga

SEQ ID NO: 26444 - DNA, 576 bp, Glycine max
  unsure (1)..(576): unsure at all n locations
  Clone ID: PAT_MRT3847_123880C.1
gaattcgagctctgtacccggggatcctctagagtcgacctgcagttctatgactccccttttctgtgtgaactcgtataaaaacttacactagaaagcaccctaaaaagcacgaacatgacatgagacatagtaaatgttacaagttttaatagttatgacatgatacaattataatataaggtataaaactaggaagaaaaaaaaacttgattgaaagagacaattcattttagtgttttttcatactctgaaagagattaatttgattgatggttagagaagaccttaacatgcatgcgcgacacacacacacaagggcataaaattaacataaaagtaacaaaaaataaaggtttaattactcatgttctctatagtttcacgatttgtatctttttagttcttataatttacattntaattctnttttagttcctatangttatattttaattctcttttaatttctctagtttacattttaaattctcttctataaattgaaaggtaatttttttaggtcttattattttgattttaattttcttttaatccctatagaaagggattttt

SEQ ID NO: 26445 - DNA, 168 bp, Glycine max
  Clone ID: PAT_MRT3847_123881C.1
ctgagatgatgccccctgagcaagaaacaactattgcaacaaacattccagccatcacaacccgacaagcgaccagctcggtccaccatgaatcagagggttcaaacactaacaaaatcaaaccaagtttagaattggatgataatggacttcctccacacaacatac

SEQ ID NO: 26446 - DNA, 244 bp, Glycine max
  Clone ID: PAT_MRT3847_123882C.1
ggggagagagaaaaagagagacgtagacaaaaccgaagagtctctctcttcctatctctctctttcaatgtcagggcacaaatcttccacctcgacttcttcggcttcttcattctaacctatatcagaaggaaacgcggtaaaagaaaaaaaagaaactggcagacgatcttataagccgcaaaattttacaccatttaatttggctgagtcagatccgtccgggatggtatccatggattct

SEQ ID NO: 26447 - DNA, 351 bp, Glycine max
  Clone ID: PAT_MRT3847_123883C.1
acgtgcaaagccaattgaccaaggggaaacaacaagaaccacaagttggattgctttacatttaacgccacccgccacttgacttcttctacgagggtatctaacaaccatttgtagagatgactgttttaaaaagcctttttagaaaaaaagaagccttttttattctcatcagtatagaaaaccttgctttgattccggaaattagtttcaaagcttgacagaaagactccaacccgagatggaccgggatgatcccacgctagtgataaaaaaatttgcagtgcgtcaacgttttttgaggatttttcctgcccgggctgcccttggataacacatcggactttttgg

SEQ ID NO: 26448 - DNA, 338 bp, Glycine max
  Clone ID: PAT_MRT3847_123884C.1
aagttaagaattatataccaaaagcatgaggcatgcttttattcactttttgcatgttaaagggaaaccatcttgatttaaataaaacttaggggcctatacaaataccattttgcaaccaagggtcttaataccttaaaagagggacatcaaaatggggggcccaacttatatgggactatgaatcccttcggtgggtggccccccgaaaaaaaaaatttttattggcactcccctttggccaccaaaagcaaaaccttttctttttttggggggaaagggagaaaagtttaaaggcctttggccctaaaaaaaaaaaaatttgggtttcctttccc

SEQ ID NO: 26449 - DNA, 376 bp, Glycine max
  Clone ID: PAT_MRT3847_123885C.1
ggctccgcttggcaactttggatccccatactctttctttggaccatccttctctcagattggtctgtacggttttcagcttcaacacagttttgcaccacccaaccttggtgctccacaattttttggcaacatgcagcaaccacactttgctaatggcactactcccactccctggatgccatacttacctagtccacactttcagaacccagcgcctccttttggttatcaacccactatcccacccaatgatggcaccaccctccagtagcaacaaattccacctactgctaacatttcccaggcttagtttccaaattcaggtgcttcacaccatgcaaccaatgatccatataatctccttcagagcagt

SEQ ID NO: 26450 - DNA, 272 bp, Glycine max
  Clone ID: PAT_MRT3847_123886C.1
ttttggggtgggtgtggggtttttttttttttggaaacaaaaaacgaaggtcttaattaataattaatatgcggctcttcaaaaagcgagcgggttatgagggacgaaggagtaaaaatctgggtactgggattccgatttcaagcttaaacaaaatctaggacacgggggggggcctacgagctgaaacgtaacgagaagttccactcaaacgagggggggaggtgcgcttggaatgctaggccgcgaatcaggacactcttttccgaggg

SEQ ID NO: 26451 - DNA, 548 bp, Glycine max
  Clone ID: PAT_MRT3847_123887C.1
tccaatttgagagtgaaaatccttaaattgcttttagaaaaattacagaattcaataacggataattgtaactcggaatcttctccttcgtcatctgctggccctgcaactgattgtgttgagactgccagggattctgttactggccctgtgactgattgtgtagagaccgcccaggattctgtgacgtaacatggcagcatgaattgcaattctcatttccttgaacaaacaatctgttgatattcatatggttggtgccagtggttttgtttccttgtacagaagtcagctattcagctggtaatttttcccacgcgtcttcctttgacctggtaaatagtccaacaatcaacttgtctagtttctaaccatttcttgtgggttagagtcctttccaaatgtatagtaggaagcagtacaaaactgactactagaggtaatagttcaaatctacccggtattttaaacttgattttgttaacttcaatggaagttgttttcatgccaaccaaacctcactcctcacatcctcttataacggccgc

SEQ ID NO: 26452 - DNA, 257 bp, Glycine max
  Clone ID: PAT_MRT3847_123888C.1
gagaagacgacagaagggactggaacaaatgagattgaacaatgggaaactcaggcttcaacactctttgctgtataacagatttctgctgtcaatgaaacattatttgaaggaaaggtctgtgaactaaatgagatgttctcgtgttttacatactgagaaaacaggattgcaaagaatggtggaagatctcaagactagatatgatgaagccagggttatagcttgaggaaaaggctagtcgaattttgaaattg

SEQ ID NO: 26453 - DNA, 171 bp, Glycine max
  unsure (1)..(171): unsure at all n locations
  Clone ID: PAT_MRT3847_123889C.1
gnttngacncgtagtnagtcggaattnggcncgagatntatatacgtggtancctngagtgccngnctgtagtnganntctgctncancaaagctnatcacatcananttngngnagtgcctcgtgtccnttttcttctntgactngccaaaaatcntccanacaanntac

SEQ ID NO: 26454 - DNA, 1407 bp, Glycine max
  Clone ID: PAT_MRT3847_12388C.1
atctatattaaaccacacacaacacacaacacacacctacgcctctgctccgcataactcctcacacacacacacaaaacagaacacaacacatacacatacacatgttgttgatgagtggaggcaacaaaaaacacagatccatcacacacatgaacaattgatctttgtcctttgtatataatttgattctaatttttggcactaagagagccactcaaggctctgggatgtactatacgccattcggggttctgattttcggcggagagaaggttcaagagacccagtgggagaaggagcgataagtaattcatattccattatctccatttctagatccttccattaactctcataggatcctccaatttcaattcaatcccttccgatatttcggagagagcatgcctgggttaggtggagtaagaaacaaagctgtggaggaagagagggagagagagaagattgtgataacaatggatgaggctctgaagcgacacatgaggttctgccaacagttcaagtcttctggtcctccagataacaccaaatgaggatttcattctggcagtgaaacagatcctctttcgcactttggattctcccaggaaagaccgtttcatttgtcgaccacttgggagatctcacagctgtttctcaaccatgcaaggaactccaacacagggggagacagactgatctgttttgaacatgattgtctcttttagaaaatatttgtgatatctaaaagaagaaagagtgacccatcacatattcattagtacaaatcttagatacagttcttttagtggttatagtattattctttgttataattgaagtttcacctcgacaattggagttttactaattatcaaggtgaaatttttgttctgatcagagagtaatagtggtaacccttgaggtactctatctaagttttgtatagataaatattcgagtgcaaataaaatggagacttattgaataattgaagataatgttaagaataaacaatgtagttcatgatccacaagcattgtgtgtgtgagtcaaggttgagttactaagctcagttgtgtgtcttgttttactgtgttgtggttagtcaggtaggaatcgttgggttatggtttaggttaaggtgttgagttgttggttgtttttgtttgacatttgggattgagtggatgattgttgagaggagtcttccttccttgacttcaatctaaatgtcacttttggttactagtaatggaatttcagtttttctaaaaaaaaaaaaaaaaaaaaaaaaaaaaaaaaaaaaaaaaaaaaaaaaaaaaaaaaaaaaaaaaaaaaaaaaaaaaaaaaaaaaaaattaaaaaaaaaaaaaaaaaaaaaaaaagaaaaaaaaaaaaaaaa

SEQ ID NO: 26455 - DNA, 1157 bp, Glycine max
  Clone ID: PAT_MRT3847_123890C.1
accaggggcgccggcgttccgtctaggttcgtccatcttgcctgggggtcccctctcagtcctctgagtctttccaggctctatgtagtccgccgtcgctccacccggattccggtgccgcctggtatgccttttccgattgtgggccaccccctcatagatcgatatccttctcgtgatcattcacgtgtgttcactgaataggttcaaatatttgttgaacggctgcgagaagacgacagaagggcttgttcaacaagctccagcagtggcaatatacaacagcttcaaaactccactttaacatttggtgctgcaagacctttgcctagccttttgcccatgactgacagaaaagatccctatggttttaaatcgggtgatttacttgatcaagtatgctttaggaatcttgggtttgttggcaaagatagctgcattccaagtaggtttgtagaaaatgaaattgagtcatctgtaagtgattttacccaaatgaaagttaatgtagatatcagtggcaacagacagaaggaggagccaaatattccaaaagtgagccaccctatcatagaaagatatccatctcgtgatcattcaagtgtgttcgctgaataggttgaaatatttgttgagaaggcctttctatacaggtacggagtcagtagtagtaatcgtttagagtcagtcttcattgggatctacaatgcaccaaagaatcgatgggaatgcctttccataaaggtacagattgcttcctcgcttcatttttttagacagtaattgtagttagttgttgtcttcattgggctctacaagacctgttgcgtatagagccccatgaaaacttgctgtgttacttctaaaaaactgaagaggaaacaatgcgtacgattgtggaaagacctcaccaattagttggtgcattgtagtgctcaaggaaagactgactctgtataaaggattcgtttgcttatgtttcttggaatgttctataatctatcaactagtttgtagggaaataaaacattctgctaacttcaactgtttgaattgatgacttattgccatcaaaattttatctagggattctttgtttgtaatgttaaatacttggtaactatacattatgaaaattgtgtaagttgtatggtgtc

SEQ ID NO: 26456 - DNA, 430 bp, Glycine max
  unsure (1)..(430): unsure at all n locations
  Clone ID: PAT_MRT3847_123891C.1
ggcaaaagggtgatcaagcttctgaggcaaaatggcccatttttggtacttcatctgaggtatgagatggacatgctggcattttctggctgtacacaaggttgcaacaatgatgaagtggaagaattgacaaggatgagatatgcttatccttggtggaaagaaaaaataattaattcagatttgaaaagaaaagatggtttgtctnctncngtgttaaaggacacaaaccatcttttcttttcaaatctacattgcaactgttgaaatctacggtggggataggagaatggcaagtcttgcgaagaactatccaaaattggtcagaaaggaaacactgttggaaccatttgaccttcagttcttccaaaatcattcctttcagatggcagcgttggattaccttgtctcattagagagtgatatcttt

SEQ ID NO: 26457 - DNA, 179 bp, Glycine max
  Clone ID: PAT_MRT3847_123892C.1
tactcactaactcacggggagagcgaaaaaaaagaagaatgaatgactccctaaagagccacaaagcgaacggaaagctgtcgcccgagactcggaaagatcacaagtccgacacagggctgagcggatcgtcaaacaacggaggccaccgcgggaagttcacgtggatccgccaccgc

SEQ ID NO: 26458 - DNA, 278 bp, Glycine max
  unsure (1)..(278): unsure at all n locations
  Clone ID: PAT_MRT3847_123893C.1
gccgagttttggatggttgaacctgagattgcttttgcagagttgaaggtatatganacttgaactcactcgagcgtgatcgtnattatattcaaatgtgatatttgtngttggtagtggtatgcttatcagctgaatgttgatacaaatatttnntcttggttaggccaatgaacttnttaaatttttagtgcaatgttgagctgcctactttccccctgcttataatgtttggtgcttttgctgtggtaganatgaagttcatggttttgtatttt

SEQ ID NO: 26459 - DNA, 368 bp, Glycine max
  Clone ID: PAT_MRT3847_123894C.1
tcgctgccgcgtcgtagctcgaatttcgctcgagctcgagccgaataggctcaagctcgagccaaatcggatcgagtacggttgcgagaacaccacagaagggggtaggttaatttctaagcctgtcgaatccaaactcaacatatcattcattgacctataaattcgacgtacgtccaagtttcgctctcattccaagagaacgttatgcacaatattcctctcagggctcataaaaataagatacctagtcgccgatcgcgctcgtaaggtcagacctccttcgagacaccgctaagggtggacctcccctctactatgccacaaagatcaacttacttagatgaatgggactttgacggctgacg

SEQ ID NO: 26460 - DNA, 806 bp, Glycine max
  unsure (1)..(806): unsure at all n locations
  Clone ID: PAT_MRT3847_123895C.1
gctctcccatccattcaactagctgcggcttcgaccagtccggcgcggtcaggggggcttccaggagttttcttttacgtctcctctttctagtattttactcacctagcttccatggcgttgcatctgctctctcatacattcaactagctgctgtttcaacaagtaaggagttatcagggtactctatggtggactttgatattctgtaattgatttgatggaatcttccaaccaattcaatgaatcatttaggcaaggtcttacagctggatatgtctttgctgcaacttttgtcatagtactttatatgtcctcttgtctccctgcacaacttatcaagaacaggaagaatagaacgggtggatttaagaaagcaacacagaagcgtaagttgccgcttcaggagttgaaacaagaaaaaaacaaagagaaacgaaagagagcaagacagatagacagagatcttcctgtggagttgctagagagaagaataaagatcaatgacattggatggttgacatgtagaacgagcttcgcagaactgtatgaagcaaccgaacacttcagtgaggacagtgtcattggtgagggaaggactgggacaatgtacaaggcaacacttcccaacggttggttcttgctggcagttaagaaactctatgattctgagttggggtataaaaagtttcgatttagaattatgatgggggaggtacaagtccagaaacataatgngtccccatcaagttcttgcctagaagaagaaaaanaatgaagaattttggtgtatatttacttgtcaa

SEQ ID NO: 26461 - DNA, 411 bp, Glycine max
  Clone ID: PAT_MRT3847_123896C.1
gctctctcatacattcaactagctgctgtttcaacaagtaaggagttatcaggtgaagttccagtagatatttttaaggtctactttttatagaatttaatttacatagctaacaagaagttgtagtgaactatgcaaataacagggtactctatggtggactttgatattctgtaattgatttgatggaatcttccaaccaattcaatgaatcatttaggcaaggtcttacagctggatatgtctttgctgcaacttttgtcatagtactttatatgtcctcttgtctccctgcacaacttatcaagaacaggaagaatagaacgggtggatttaagaaagcaacacagaagcgtaagttgccgcttcaggagttgaaacaagaaaaaaaccaagagaaacgaaagagag

SEQ ID NO: 26462 - DNA, 455 bp, Glycine max
  Clone ID: PAT_MRT3847_123897C.1
tcggaattcggctcgaggaaccactaaggttctgttaaatttcaacaaaccaaagcagaatttgtagccttctcttttagtgtgagatatatcatatagccactatggttgagcttttggcagtcatatgtactatcttctcagcccttgcctttgtttatcttctcaaatatcgtaacaaaaacaaacaagattccccacacaaattgccacctggaagcatggggtggcccttttctggggaaactcttggcttcctcaagcctcatagatcaaactccttgggaagcttcttacaagaacgctgttctaggtatggcaaagttttcaagtcgcatttgtttggttctcccaccatagtttcatgtgactttgagttcaacatgtatattcttcagaatgaagggacattattccctgttgattaccccaaggttatgcataacatactgggg

SEQ ID NO: 26463 - DNA, 522 bp, Glycine max
  unsure (1)..(522): unsure at all n locations
  Clone ID: PAT_MRT3847_123898C.1
ngtcggctgcgagaagacgacagaaggggtcctctcattcattcattcattccatcctctgttgtacggccagaacagaacaagatgagaggccatttgttagaacttgaaacaaaaacatcgagtctttaagataagagcgagaaatagagacaagttcaggtaatggcgagtgggtggatgaagtcattgcaatgcaagtccagagcataccaagacgtataccaccctaactctaaatacctcattcccagttccagctgcagaaagaccatcaaagacgtcgtcgtcgacacaaccaagcccaggcccaagcccaatcccaagcccgaaaagcctctccagaaacaccccagctccagatacccttcatccgccgccaagcccgacttcgaaaccactatcaaccgatcgaggagcgtgaccgncacgcgccacgccgacccttgcttcccttcctcaccgaactcaccgagggccacccttcgcggaacgtcgtggagattatcttccacaccagct

SEQ ID NO: 26464 - DNA, 331 bp, Glycine max
  Clone ID: PAT_MRT3847_123899C.1
ggacttcaacgccataacctccatcagaaaaggtggggtaattgacacagccaccggcatctaacgccaaagcgtgagctaagtagaagtagtgagagagtctgacactgactacgtagctcagagtatattcatgcgattgttcaatgctactcacactgatgggagagtaatggagaaaagatgaaaaggagtgtatgtagtagaacgtgagtctagatgtgcagacttagggaacaatgcaggatgcattcaatatagtacgtatgaatgggaggctagttgtggaatgccgaggagagttgacatcaaaaacagtattactagagag

SEQ ID NO: 26465 - DNA, 370 bp, Glycine max
  Clone ID: PAT_MRT3847_12389C.1
atgtttgcttttattactaaagaagtgcggattgagggacatatttgagatatacgatgtgctgacacagtggaatgtagagcctgacgaactatagctatagtctgccattctgaactagcagagaaaggccctatctattgaggaaaggtacctctagatgtgtgctgatcatagaagataacgtccagtgccattaacggtgcctccagacccaatgccaggtaccgatacatcaacgtcacccatggggccctcccatatgtgtggccctgacgttccgaagcgggtctgtgatcagagcatataagtcttactaacatcgtgcttaatttatatttgactttgctattttcagtgatgccctaag

SEQ ID NO: 26466 - DNA, 578 bp, Glycine max
  Clone ID: PAT_MRT3847_1238C.1
gcgatctatagccggccgcgttttctcacgcattggcggaccggtgcctgcacgcgtacaatctgtacctataccgagtcgcattccagcttgccctatacagagtcatagcagagcctggtgtgaaaatggtattagctgacaattgcgcacaacagtcaagccgtaagcataacacacaacgtccgagccgcctactgagagtgctaactctcattaactgaatggcgcacactgctcactttccatgcgtgaaacttgttgtcccatttgcattaatgaaacctgcaacgcgcgctgagtggctgaatgagtcaaggcccccagagaggctgtttttttaattagcgacaaggggagcagctgattgacctgtaccacctgcacctgagagaggcgcttcacgccctgcacgcttgagagccgcagcaagcgaaacacccgttttatcgtgatcaaccgaagaatctaacatgaggtggcttacggatggatataacctaataccgatatatgctgagcagctcgcactaccgacttattcatggcaaccatcgcgcccaactccataatatcgt

SEQ ID NO: 26467 - DNA, 158 bp, Glycine max
  Clone ID: PAT_MRT3847_123900C.1
atgctgagtttcatgcacggtcttcaaatagcttgggacgctggttttcgtcaactaatacttatatgtgactcagattctcttattgttttgcaattgttggacgtgaacggcactgcataccacccttattcgaaggaccagcaacttcaaagctc

SEQ ID NO: 26468 - DNA, 1829 bp, Glycine max
  Clone ID: PAT_MRT3847_123901C.1
tcgtacaatttttattttttaacagctctgtactgaagaaaacggcgattgagagggagagtttgagaatggtgaagaaggaggagttcttgagagaaaacggcgacaacgaaaaccgttccgtctcgcggagtgacttccctcccaacttcatcttcggagttgccacttctgcatatcagatagaaggtgcttgtaaggagggtggtagaggtcctagcatatgggatgcctttacacacacggaaggaaaaattcttgacaaaagcaatggtgatgttgcagttaatcattatcatcggtacatggaagatattgatcttatagccaagttgggatttgatgcttatagattttcaatttcttggtctcggattttccccgatggcttaggaacgaaaatcaatgacgaagggataactttttataacaacattattaatggtcttcttgaaagaggtatacaaccttatgtaactttgtaccattgggatcttccgctgcatcttcacgagtcgatgggaggatggttaaataaacaaatcatagagtactttgctgtttatgcagatacttgctttgcaagttttggggatagagtgaagaactggattactattaatgagccccttcaaactgcagtcaatgggtatgatgttgcaatttttgctccaggaagacgagaaaattctcttatagagccatatttggcagcacatcatcagattttggcccatgcagcagctgtttccatataccggagcaaatacaaggataagcaagggggacaagtgggctttgtggtagattgtgaatgggcagaggctaattccgataagattgaagataaatctgctgctgcaagacgcctggattttcagcttggctggttcttgcatccactatattatggagactatcctgaagttatgcgtgaaagacttggagatcagcttcccaagttttcagaggaggataagaaaattcttttgaatgctttggactttattggtctaaatcactatacgtcaaggtttatttctcatgtgacagaatgcgccgaagaaaaccattactacaaggtgcaagagatggagagaattgtggaatgggaaggtggccaggccataggtgagaaggcagcatcagagtggctctatgttgttccctggggtctacggaagattctcaattatgtatcacaaaaatatgctactccgatatttgtcacagagaatggtatggatgatgaagataatgataacttgccgttacatgagatgctagatgacaaactgagagttcgctatttcaaaggatatcttgcgtcagttgctcaggctataaaggatggagcagatgtaaggggatactttgcgtggtcattactagacaactttgaatgggctcaaggttatacaaaacgctttggattggtctatgtagattataaaaatgggctcagcaggcaccccaagtcttctgcatattggttttcacggtttctgaaagctggtgaaaacaagaagggtaaagaagagtagcttactttcttcattatgtgtctttccataccagatacaaggaataaaataaagtaagcacagaattccacctttatcagtacttggaagctttgtatgggctataatgccatttctctacatttttctcactatcgaatttcattcccaaattgtgtgaaaactctgttccatcatatttatttgttttgcctgttaatctgtgtcgcaccacaaattagacaacgttgaattttgatgtaccacgttgcttgtgtaatacattttctaagtttaattccgagt

SEQ ID NO: 26469 - DNA, 293 bp, Glycine max
  Clone ID: PAT_MRT3847_123902C.1
catgagggttctgctgcgagaagactacataaggttacggctgcgaaaataccggagaggggtgctgttgctagaagactacataatggttcatggacgatgataagatcctttcatctagcaataccttatgatggcatatccttaatgttatgggctaggtttaaacgaataaaggcttattgtgtatacctatgtacccagagtcttatgaaggtcgtattaagtgacgaaatgcttttttgagtttatattaagcgtatatcctggtattcccgatataggctttaact

SEQ ID NO: 26470 - DNA, 731 bp, Glycine max
  Clone ID: PAT_MRT3847_123903C.1
gggccggaaaaccccggtcgacccacgcgtccgaacctttcttgccgccgccgcggaaccctagcctcagctccctcgccaccaccgcggaactctagcctcagctccctagccaccgttcgccggagtatcaccccgacgccgtcgtcgctgagaaatcatccaccaaaaggcctaacgctatgaagacgccgcaatctgcctctaaattgaaaaggaaaagggaagaaggtaaaggtaagaaaaaaaagaaagcaggtaacaaggaggaaaaaaggaaaattgcagacatccctgaatctcgtagcatgctggagtatgaccatgatgaaggggaagggtttgaccatgagtctcctagaagcaaagttgtggaaagtttgtggcaagatcctgatgtcaatgattctggattaacagaaggttctgaaactaaagaagatgttgggtttcattcagatgaagaggatattggaattactggccaaccaacttctgatgattcattgcatttgagctcttttgatttacatttgcaacataatttatccaaagaagaaattgacggccaaaggaataggaaatttagctgggagactccagccattggcatgtcaaattgcaagtggataggaactggagagaacattttggaggatttggatatcaattcttgtcatggtctcaaatcaaaattgtccgagcattggatggatgtctacaggacagct

SEQ ID NO: 26471 - DNA, 431 bp, Glycine max
  unsure (1)..(431): unsure at all n locations
  Clone ID: PAT_MRT3847_123904C.1
atgacaaanataaaanntttttttttttaaattaacataaagngaaaagggcaagnnngaagccctatatataannnacatnaaaacccatgattgggggatcaatattaatcttgaaggttgaaggaaantactaatnttnagggttgggatactcgntcaagnctgggttctcatanctgacggggntggaactaagggagngngnnnacnaggattggtgaancgcggnngggagcgcgnnnactttggngccnactggggnnnntnnnttngnnaanngaannnnnnnacannnngncctgnnnnggggnnnaaacggccncccncctgggacaggcaancgggggaagntaaggcgagcgggaaggggcctnggcagggggaagacgggggngcccgacggcgcgcgccggggcgacggggggggg

SEQ ID NO: 26472 - DNA, 417 bp, Glycine max
  Clone ID: PAT_MRT3847_123905C.1
attctttacaagctctgtttcagctttgtctctgttgtacaatggctagcaccaccgacgtgttgacgctagccgccgaattgttggaaaccttcgacggggataagtcttcaccgtactgaccagctctggatccaaagggcacccgcgttggcacacctgaaaaggctccctcgccggggatttctacctccgccgggtggtcggcgccctatactgccgatccggtggcgaacactccgtgtccgtgaccaaactgaagcgactgttcgacatctactcctcagtgtccgtgcgacgcaccagccggagatcccttcgtcactccttaaacaatctgcgctactcccactggagcaccggctccctatgaaaacagggccgctctgaacagattcactgtggctggatctgctg

SEQ ID NO: 26473 - DNA, 294 bp, Glycine max
  unsure (1)..(294): unsure at all n locations
  Clone ID: PAT_MRT3847_123906C.1
ggggttggggtgttnttggtggggggaaaaaaaccaaccccggggttttttccaatttttttttttttaatttatttgggggttccgggtaaaaattcccccggaaatccctccggggggcttaaaaaatacttgcccatggggcccggtaacaaacataaaacccctttccaaaaagggccttggcaaaatttcccaagcccgaacaaaatgaaaattttcccaaaaataaaaaaagggtgggtttttgaacataaataagcggggggctcgggccttttggaaaaaaaataa

SEQ ID NO: 26474 - DNA, 398 bp, Glycine max
  Clone ID: PAT_MRT3847_123907C.1
agacttaatatgctgtgcacttttttatttaaaaagacgactatcacatgttttaaacaaaggttttttgttcatcgtaatcataaggccgagtttttcacaagaaatatttgttttttctgttctggttaatataacgccttcatgacgagggaacttatgtacacctgcaaatgggggcatatgacctttcaatagcataaataccagggggatttgtggttaatctcgccatcagaaaccaccatttgctggttaaattggaatgagcaatccattgccttttaactgcatgcagtgatcttaaacatcgggttggtggcagaagatcacgactgacaatccattgccgtgtgcttctcgcatgatattaactgtattaacaagggtcattccaa

SEQ ID NO: 26475 - DNA, 295 bp, Glycine max
  Clone ID: PAT_MRT3847_123908C.1
gcaacgatatttggagggcatatgctgggggcttgttacctacatatacacgtacaggcaaatgccttcatagcgtttggaaatgcgcctgatgacaccagtaagtccgaggctgtggcccccatgctggagcccattgggcagattgaaccaaaagttgtttcgagattttaacaagaggaatccattacagatggggcaactgaggagcgtacagaaccaactatggtggatgatgggggtccatatgcgtatgctatggtgcatgatagttcagcgtctacaataccagggg

SEQ ID NO: 26476 - DNA, 251 bp, Glycine max
  Clone ID: PAT_MRT3847_123909C.1
cttgtgcgagctttagagagagagagagagaatgagagagagagagaggttacgctctcgctgatcagagctgtgacgagtccccagcgaagaggcacacagattatgatgaacaaaatgacgtccctgtacccatggatgcagaggtctgcaattaccctcttaaaatccgtttaacatctcggattcctgcgtcgatctctccaagaagaccaacgcggactggagctgcatacttcctgacggtacca

SEQ ID NO: 26477 - DNA, 1492 bp, Glycine max
  Clone ID: PAT_MRT3847_12390C.1
ggctcgagatctatccacacacaacacacacctctgcctctactccgcacaactcctcacacacaaaacacaacacacgctcatgttgttgatgagtggaggcaacaaaaaacatatatccatcactcacaagaccaattgacctttgttcttggtacaattcgattcaaatttttcgcactaaggagagccactcaaggctctgggatgtactatacgccgttcggggttctgattttcggcggcgagaaggttcaagagacacagtgggagaaggagcgataagagagaccatggctgggaaggttttgaaagaaacgaaatcgctgtcggcggcggaggtggcgggggcggaggctgagatgacggtgtcgtcggtgaagtgctgctgctgtgggctgatggaggagtgcacgcacgcgtacattgggcgcgtgagagatcgctacgggggtcgttggatatgtggcctctgttcggaggctgtgaaggaagagagggagagagagaagattgtgatatcaacggacgaggctctgaagcgacacatggggttctgccaacagttcaagtcttctggtcctccagataacaccaacgaggacttcattctggcagtgaagcagatcctgtttcgcactttggattctccgaggaaagaccgtttcacttgtcgaccacttgggagatctcacagttgtttctcaaccatgcaaggaactcccacacaggcggagacagaatgatccctctttgaataagattatctttggtacaagatatttgtgatctatgaaagagaagagtgatccttcccatattcattagctgagcttgatacatttctttaagtggttatagtactattctgtgttagaattgaaattttactttgatagcaaaattatcaaggtgaaactttaattttaaacaggtataatactaaaaacacttcaggagttatattgaagtattgtaggataaatattagaatgcaactaaaatggagacttattgattaataattgataataataataataataataataataataataaacaatgtatagtcatgattcacaagcatcgtatctgtgagtcaaggttgagttactaagctcagttgtgtgtcttgtttttgttgtgttgtggttagtcaggcaggaatggttgagttatggtgttgagttgttgattgtttttgtttgacatttgggattgagtggatgattgttgacaggagtcttccttccttgacttcaatctaaatgtcacttttgtttactagtaatggaatttcggaatttctatggttggcccaaattcagcttttaaatattcttccaagttttcttgtttctttcttttctgtacaaaatgttttgtttagtagctaaaaattatgttgaaatcatcaatcttaccattcattattgatatgattatgctactcaaaatgggatatcaatgcatctaattacttctatgt

SEQ ID NO: 26478 - DNA, 571 bp, Glycine max
  Clone ID: PAT_MRT3847_123910C.1
caagcaatatgcattcttattatgatattttacagtgatagggtaggcaaacaatttcaagaaacaaatgctctaactttaggtagttttcaagtaatatttagctattctaccacttgctcctttgggatagaagccaccgggaacatgttcatcacctcctccatatattatccttaatatttcccttggagtcctgggatatgacagtgaatctttgtcgccaacaagaatgttgccggtgactctaccctcagcaccttgctctctaggcaccacaagaccctcatctttcaaacctgaacctcctaggttgttcctaagcattgatatgcgatttgtgaactctgccacagtcacattgtatggttgtaccgataacgttcgatattcatacaataatgctcgaataactgcatcttgcccggactctactcccagaagccctgcaacaagcctcttggaagtagcattttgcaacagtggattagcaccaacataaccagtgaggccaacatagggaatcacataagatgcaagcagatagttgatcgaattagcatagggatca

SEQ ID NO: 26479 - DNA, 104 bp, Glycine max
  Clone ID: PAT_MRT3847_123911C.1
acacaatgttcctataggtgaagaaagatacgaaatagtgtgattaggagaggagaccagcgtatgcacccgaatgttgcaaggtttggcgctaatggaataac

SEQ ID NO: 26480 - DNA, 674 bp, Glycine max
  unsure (1)..(674): unsure at all n locations
  Clone ID: PAT_MRT3847_123912C.1
cacgcgtccgaacctttagagaaacggtgcgttaagccttctcctccttcccgaacaaaaaacactgctttaagaagcaggactgggatcgcacttcagaagaagtcaagagtaacattaattagggcacagaacaaacagcatttcgagctttgggaaatgggtgaactatatcactcacacgctccattagacattaattctagtgggagtgaggaaaacttgatctctcattcaccagaagaaattaagcttgaacccattagttttgatgaaaatgatgcttgtcctgtgccacggcctggaatggtatttagttcagaggctgaggcgagattttactacaccaaatatgcccaccaaatgggcttcggcatcatgactagaacctcaaagaagggacatgatggcaaagttaaatatttaatacttgtatgctctgaaataacaagaagtgatgcattaaggaaacaatattgtgcagctaggatcaatttgactttacgtaaagatggaacctaccgaattaatgcagctactcttggtcatagtcatgaattgggttcacatcatctactctcaagtgatattgagatgaggggtaaaaggacattggatcaagaagttattgacatgggtgntaacaggatatcatacanaaatgaaatgcagac

SEQ ID NO: 26481 - DNA, 1138 bp, Glycine max
  Clone ID: PAT_MRT3847_123913C.1
gaatcctccaaagatacgaacatgggtgtttcttagctgtggatgacagataaaagagtactgtaggcgagtatcatccatcaggatgctatatctgttggccaatgctggcatgtcactgaagatacgccattcggccgatagtgctatgagcatagcagtgtcttcactctcaccatgtttctcttcttgattctgtcttttcattaatatgttcctctcttccgcttcttcccagagcaatctttcttgctcgctttcaggtgagatctggttgattgcagctgcttttccggtggtggagtcacgagccacaaaaattcagtttcggtacccggggatcctctagagtcgacctgcagcaccttgttcagactgagtcaattccagttgaatctccatggacgaccgaccaacccaggtaacagcaccaactatggttaagtcagcatcaatatggattgccttcttaagaaccatcttgtcaacggaagcagtgaccaatagaagtggccttgctgtgccatcttcattagaacagtgctgctcaaaagaggaaataaacttcaatatccaaaactcatatatacaaaaaaatctttataagtactgtaagcaacgcatttcttaatgaaaacatcaaactctggatatttcaatacattttgtatttaatatgcatgtgtacgtaatatttgattgttaaattcttcatccacgaccagcataaccctcacagtatagatttctatttggtttccccacatgtatttttcttagggacttgtttggataaatttattcaggaacacttgtaggaaataaaaataagaagaaaatgagaaaagatcttttataagataaaattaactcatgaaatttttatcttaaaatcagttttttgagaaactgaacttctacaaattagcttataaccttatgcataagttgatttcaacttatgaagaatttttgtcatttttccgagaggcatggctttgcgaaattgactgggtgcagccgcgttacttacatggaatgtaatcatagtgggatgtgaatctatgaatggtggggattcccccaaagttggagcttatgaaatgctcaattgctacaattaacctggtgccgaatt

SEQ ID NO: 26482 - DNA, 225 bp, Glycine max
  unsure (1)..(225): unsure at all n locations
  Clone ID: PAT_MRT3847_123914C.1
cttgtttatcatttncttactttccnntcacgctctgccacaaaactccgtctctcgcactaacggaataaaaaaacaagtttaattactattatggcgccganggatcatnagacaancaacgctaaggctaacggtaacggtaacagcngggtganngnngtgcatttncgtggagtgagaaanangccgtngggganatacgccgnggagatcngagatccc

SEQ ID NO: 26483 - DNA, 473 bp, Glycine max
  Clone ID: PAT_MRT3847_123915C.1
ttcaaaaccatactcttaaaccttaaaagagaaaaatataaatgcataactagactttatagagaaaacaaattaaaacttgtaaatttgttggggtaaaccaccaacaaatatcactttagtcaataattaaagattaaagataaactttaatgaaaattaaagattaacttttcaagatgaaagaattcagccatgtgaattttatctctcttaacaatttttctgtcaaaaaaaagtctctcttaacaatttcttttgtattcacacaatcatgaattgaatccatgtttaagggattcaactatgtgatataacaatgtgaagtttttgttggtaaatttattcgtataagttgattcaactaataagatctaacttaataataactgtgcagtaaaaaaaaaacgtaatcaaaattgttgaaaacattcttactcatattattacttaattattatatatatgtccga

SEQ ID NO: 26484 - DNA, 298 bp, Glycine max
  Clone ID: PAT_MRT3847_123916C.1
cttaccccgggcccaggacataacaaggctttttggaaaaaaaaattttggggggttgattcccccccccggggaaatcaataaatcctaatcggcccggcctaaattcaaaaccttaaattttattttttcccatatgagggggggggacaaacccttttttggcgggaaatcccaaaaggataagggattccaggagttgggaatggcctcttgatatgtaaaatatatatcccctgaatttagagagtttgtatgtcccctttttcaaccctggaaacgaactacaaggcaggaa

SEQ ID NO: 26485 - DNA, 228 bp, Glycine max
  Clone ID: PAT_MRT3847_123917C.1
cagaattggagtgtccaatacctagaaccttgctactgttcatattgaagggaaacaattttattcatcgggacttgtctcatcctttccttgccaaggcaatccaaggttctgtatgatgtgggaagtttgaagtctccttgccattcccttcaaaaggttaaaggtggattgtttggattttcaaagggatgtttacacatgaaaaggtgggatgagctgaatcag

SEQ ID NO: 26486 - DNA, 271 bp, Glycine max
  Clone ID: PAT_MRT3847_123918C.1
cagaactaaaagtctaggactatgctccatggcaagctcataacttgcaggttcagagttcacacagaagaaagccccattaaccccacccgcttttaaacccttcattttctggattgcagacgcccttttttgtcccatttgcccctcatggctccccccaaggggggggaaaagccttacaaccaactttctcgggccaagttcctttttattggaaccaaaccttcgcctggccaaaaagccatgaaagaaaccggttcctatttac

SEQ ID NO: 26487 - DNA, 268 bp, Glycine max
  Clone ID: PAT_MRT3847_123919C.1
ggaaacaaagcagtataacacaatagcttattcattagttctcatggattaatttccattgaagtccggaaacagaaaccaaaaatacaggatgatgaaatctcataaagcaaaaacaaatgggaatgtagtttaagtacaacaaacaaagtggggtggctacagatgctttgcaaattttgcaatgacttaaaagcctgggggcttgtaagcgatgaagctgatgcactgcacttggcgaacgttgtcaaatccaatgataccgatg

SEQ ID NO: 26488 - DNA, 367 bp, Glycine max
  Clone ID: PAT_MRT3847_12391C.1
gtggcttttagtttctccactttcattctcactcatcgcaccctcttgcagaggtaccatgaatttcttgggcggggttcatactttcatcgtttttcatgtctttgctgcaacaccccacttcttcttattagcagattcctccgaacaactccccaccaactttctagatgctgccaagaagcctgaggtatttgattggatggtcagaatcagaaggaagattcatgagaatcctgaattgggttatgaagaatttgagaccagtaaactcattagagaggaattggataaactgcgtatcccatataaacaccctgttgcaatcactggtgttattggcttcattgggacaaaaagatcgcct

SEQ ID NO: 26489 - DNA, 140 bp, Glycine max
  Clone ID: PAT_MRT3847_123920C.1
cgaaaactaggcggtttatattataacataccgattaaaacctgcgtcgctttttttatagctggcgcccgcactttaataataaatagcaacattaccaatacaatcatacacctacttcaatattactctaatatccc

SEQ ID NO: 26490 - DNA, 152 bp, Glycine max
  Clone ID: PAT_MRT3847_123921C.1
aaggtgcttgatctaggagcatgcatgcaatttatctttgttttgcatttaaatcttttacttatttgatgttagtttcgcacactttgcatttcagcaaaacccgtccatatataaaaagattttacaaaccaaattctgcggacgcgtgg

SEQ ID NO: 26491 - DNA, 188 bp, Glycine max
  Clone ID: PAT_MRT3847_123922C.1
gaaggaggggcggcaagaaaagggggggttccgaaaagaccacagggccctggtattggttaaaaggctgcgccactatgttcgaaagccggtcgattaaccggagggtaaaaaccctaaactaagccacaaatttttatttgggggaggtggaaaaaaaccttcccgggggcctgggggggaaaaag

SEQ ID NO: 26492 - DNA, 316 bp, Glycine max
  Clone ID: PAT_MRT3847_123923C.1
gaatatgatgcctcaggcacagaaaaggggtatcgctcttgatgaggggcaccaaatacgagttacctaagtgccaatttttacacccacgttacgcttagtcctacccaagtgggcgaacactagaccatttgacatgactgggcctacgacgacacaaatctggctaacgcctgggaactcagagcgcgtaccaccacacttgccctaaatgcctatcagcatgagggagctctggccaacacccaccatgcaagttccggtaatgccaaagtggaactggccctgccccacaaacattatatcctgaggaggc

SEQ ID NO: 26493 - DNA, 404 bp, Glycine max
  Clone ID: PAT_MRT3847_123924C.1
ctagaacggacttgccaaatggagcatatcatccttccttgaagtgcaatggtacggtccttacatttggaactgatacacccttgtgtgagtcaatggcatctgttttgaaccttgctgataaaaccatgcacaattacacaagaaatggatttcataaacctgaggaactaagaattcctgtttcccatgccagtggagaaaaaggggatgatcaatctaataaatcttcggttacctccacaacatctgtagaaggtgcaagcaccaatagacccaaagaacaggttatgcagaattgtcagagctttccgtcacaggttccctactttcctgcgaccccttggcccatcccttggaatccagtgcagtggagttctcccgtaccaccgcctgctttttgt

SEQ ID NO: 26494 - DNA, 429 bp, Glycine max
  Clone ID: PAT_MRT3847_123925C.1
cgagcggctcgagcggctcgagcggctcgagcggctcgagacggctgcgagaagacgacagaagggggaagtgggaaggtctagagagaattcgctttctgctatgaaagatttctgtgaatgctcttcttactagtgagagcagaagatcgaggcatatttatgtaactgctgattgtgaaatttgtgttgaggtggaggatattgatcatgtgtttctttgcactttggccagagttgtttggtacttgctgcttccagctgatccccactttaattttgattcagacatgtctgtggttgagatccaatttgttgtctgataaggtggttgacaacagaaagtggaatactatttttttatgtcgtgttgtatgtgatttggagatctatgaatgagtttatattccagaatattcttcgacaagt

SEQ ID NO: 26495 - DNA, 875 bp, Glycine max
  unsure (1)..(875): unsure at all n locations
  Clone ID: PAT_MRT3847_123926C.1
cnnnnggaagaattcttattaattaatgctatcaatcgacaaaacaataatataaaaaaaaagtatgatgcaggaatattcgactttaaaagtttgactgtaaagacaagaaagattaatccaatctctttcgccaaataatttgaatatcatattaacttcaaagaacttttgcacagatttttgtccctctgttgtttcattttttctcttttcagttgatggctcgtgctttccatttcttcacttcacttttgatttagcttggttgagacatgttgatgttgctcacaagatcagtcacagattcaattcaaaaacaactgtgtagcaactgttctcgcctcttcgggaaaacctgcgacatgcggttaacaacatatgtacgtaggaaaataattattaatttcataccaagtggatatacacccagaaaaaggagagagataagaacaagaaaataagctaaacaaaagttacaaaaggatgtcatggaaattaaaaagataaaacataaaaaagagagacatatgaaaagaggatgtgaaacataacacctgcaaccatgaaagcatgacatatatataatctgaggtttatattgatgagttgtggttgaagtttctattttgttgtgatcattaacgttccaagaaattatagacaaatataactttctgataacgtttttaattcctacgggataatttntttttatatgtaactgcactttccatcacaatatgaaagtaaaaaatatttgtttcagacaaaattgtggctgcaagccgattttcaaaaatcatgtatgtaatatatgaagtgagtatttagttaagaaggcctaattaggagctcccttcactccctggtgc

SEQ ID NO: 26496 - DNA, 916 bp, Glycine max
  unsure (1)..(916): unsure at all n locations
  Clone ID: PAT_MRT3847_123927C.1
ctttcgattagtcccgatctcctcctgatacaaatcaatgatcccaacgttgaatctcatgagaccaaacaggactcccaacttaactataattaccggaacatgccattgccataacataaccctttctcactgttgtttttttctttttcttcccaataaataacaacaaacaatcactctcataacagaaaaacccttttttccccttcctctgaagcgaaacagattcgcaaaacaaaattaaaaaatcccaattctcttcgcaaaaatcgaaatcaatgtcgaaaactccgaaggagaaagaaacggaggagcctctgccggaccacctccggtgcgggcgcaccgatgggcggcaatggcgttgccggcggcgagtgaaggagaatctcaagctctgcgagattcactacctccaaggtcgccaccgccagtacaaggagaaggttcccgagtcgctgaagcttcagcgcaagcgcaaatcaaacaacgacgaagaagaggaacccgagcctgacaacaacaacaacaacaatgttctcgacgacaatgtcgaatctagggcacggagaacctcgagaatcgtgaagaagaagcgcatgctttccggggattccgatgatggttctccggcgaggaagaaggcgctgaagcagggcgatatgcagctggagctcttgaggatggtgctgaagagagaggctgagaagaagaagagcaagaacaagagaaataataacaacaagaagaagaacantaagaagaaggagaataagaagaagaaggaggaaaaagaggaatttgtgttacactaaaagaaagagttgagaagagaattgcccnaacggtgtgatgggaaatctctccggcttcngcgacgcgtgattacaacaaatgtggttcgcattgtgat

SEQ ID NO: 26497 - DNA, 640 bp, Glycine max
  Clone ID: PAT_MRT3847_123928C.1
aattcggctcgagcttcctctgaagcgaaacagattcgcaaaaaaaaattaaaaaatcccaattctcttcgcaaaaatcgaaatcaatgtcgaaaactccgaaggagaaggaaacggaggagcctctgccagaccacctccgctgcgggcgcacggacgggcggcaatggcgttgccggcggcgagtgaaggagaatctgaagctctgcgagattcactacctccaaggtcgccaccgccagtacaaggagaaggttcccgagtcgctgaagcttcagcgcaagcgcaaatctaacaacaacaacaacaacaacaacgaggaagaagaagaagaagaagaagaagagaaaccagagcctgataagaagaatgttctcgacgacaatgtcgaatttagggcacggagaacctcgagaatcgtgaagaagaagcgcatgctttttgaggattccgatgcttcagctttttctcctccggccagccagaaggagacaaagcagggcgatatgcagttggagctcttgaggatggtgctgaagagagaggctgagaagaacaaaaacaagagcaagagcaagaaccagaagaactataacaaaaagaagaataagaaaaaaaaaaaaaaaaaaaaaagaaaccc

SEQ ID NO: 26498 - DNA, 297 bp, Glycine max
  Clone ID: PAT_MRT3847_123929C.1
cttcattccccattaccatggtgcatcctatccaccaccactattatccccttcactgcaaagaacgcttctactagattcccaccttccaattcattctaccaccacaagcaacgttgatctctggataccagtgatgttcgtctcgcctgcatttgaccctacaatcacattcaaaaccaagactcttccgacattaattacaatggtacctccaaatcataacaactgatcacggcgtgagatcatgatgatgattctgatgttcttattgaatgtatatatgtgtataagtct

SEQ ID NO: 26499 - DNA, 707 bp, Glycine max
  Clone ID: PAT_MRT3847_12392C.1
cccacgttattttaatattcgtcgccataactcctcacacacacacacaaaacagaacacaacacatacacatacacatgttgttgatgagtggaggcaacaaaaaacacagatccatcacacacatgaacaattgatctttgtcctttgtatataatttgattctaatttttggcactaagagagccactcaaggctctgggatgtactatacgccattcggggttctgattttcggcggagagaaggttcaagagacccagtgggagaaggagcgataagtaattcatattccattatctccatttctagatccttccattaactctcataggatcctccaatttcaattcaatcccttccgatatttcggtacgtgcatatgaaacaatatctatctgatgagaaatcttaaataaattttcatattatttgactcgtgtatatgaaagaagatcttgtaagaaatgctaaatagatagatttctcagtattaaggatgtctaattcaattaattaattgagtaaaatactcaagtttgatttcttctaataaaagagaaataatctttgactctggcttgtgaagtatgtttattatcatcgttttttgtcattaaattcctaaattaaacaaataacatgaaaattccttgtacctaattaatataaggattttttgttatacaaattttgtgattgttgat

SEQ ID NO: 26500 - DNA, 476 bp, Glycine max
  Clone ID: PAT_MRT3847_123930C.1
gattaagttgactatgcagaactctaccagagaaagatatacgattaattcacacgcgcgcatggagaaggacaactaccatggaaagatctacttgaactaagccgagttgcgaatcggactgcgtggcagcgattcagaaatgatgggatgcgctgactagagaggctagtatgaaactgcgattgttgactcgaactttatagtatattctagcggtagcgactatgcctgggattcacccatgtctatgtcgacagagagggacaaacagaacaagacttaccactgctgaacctgctgcagctaatgatacagcaaaatcacctgcaaaggcacaagaggggggttgaccaccagatatgtgatttagatagagcatagttcagaggaacagcattgaagaagaggctttagatagctcaaagaatgctttctggactgtgaacatggatggagcaccgtctgtaccaaag

SEQ ID NO: 26501 - DNA, 436 bp, Glycine max
  unsure (1)..(436): unsure at all n locations
  Clone ID: PAT_MRT3847_123931C.1
naggaatttggcacgagagaaagggcataaaacaaaccgcacgaaggaaattaccaagagcaaagaagaagacgataagggcaacagcaacgcaataaaatatgaggctggagaacatccggaacaagaggtggcaaataagaatgtacaatacgatggggacagcaagagggacatggaagagaaaaagtcggagagagaaaagggtttttttttaaaaaagaggaagaagaagagcagagaggagaaattgttagcagcccccaagatataggacgaggaaaaaagaagagagctgagcacacgaaaagaggggaaagttgaaaaagagggaaagctagaacgaaaccgaaaaaaagagacgaggcacaagaaaatgaacaagggaacttgggtaccaccgagtacgacagaggaaaaggaaatggcgaaagaa

SEQ ID NO: 26502 - DNA, 267 bp, Glycine max
  Clone ID: PAT_MRT3847_123932C.1
gttcaatatcctagtacaccgtattaaagaatttaagatatactatgatgagagctcggttcccattactgttgctgggagttgtgttcctggcatcagtttctgtctcatttggcattgcgtattgggaaaagcagaaccccagtcacaacgatgcctacgtagttgcaatagcgagatagactcctacaggttccaagcatggcacgctcgttagcagctccttaaggtggaggacgaggagaatgcgtgaaggtcaattccacg

SEQ ID NO: 26503 - DNA, 1323 bp, Glycine max
  Clone ID: PAT_MRT3847_123933C.1
gggggttcccccttcagctcagtgtctgccgctgcccctgggttctcctgcatcagcctcattgtttgggttgactgcatccacatcttctgttacttcttccagttcccccatgatgtttggatcatcttcttggctcgacctcagttttcattcacttctgctacagctactaccaacacacagcctgcttttggaagttctagtcctagtcctggcttcacgtttggtggttcagctccagctcctgttaataatgatcagatgagcatggaggacagtatggccgaggacacagttcaagcaactccacccgcaactccacccgcaactcccatatttggtcaacaacctgccccacttcaatcaaattttgcatttggagcatcagcttcaacaggagcgagtcctttccagttcgcaagacaacagaacattgctcctccatcgaatccatctccatttcaggcttctggcagtcttgagtttaatgctacaggcagtttctcattgggcactggtggggatgacaagtcgggtcgaaaatatattaaagttaggcataatagatcgcggaagaagggagcctattttatttaagaaaatggttatttctgttgctgctgcaggctgcacttcattattgctacaaattaataaactctaaaggtgagtgattcctgagtttgtgtccagttaggagggatctggacgacgctattgaaagcacacataatcagatgcaaggttgtcagtctcatttgtcttgcttcttatagagtgcaaggcataatttttcacaattttgtaataatagtatgatatggttgaacataatctgctgtacttgtaatggttttaggtcatatagtaatagatcaaaggatttggtcagttatgttcacaaaatccctgtattctcgttacttgtatcatagccagaaataggcatgaatggcttagctggttgtcaaataacttacaattctagtgagcaatctgtgataaatgcgacgctacgaaaagcaaatcatcagatgcaaatggaaggttgtcagtctcatttgtcttgcttcttagagtgcaaggcataatttttcacaattttgtaatagtatgatatggttgaacataatctgctgtacttgtaatggttttaggtccatatagtaccagatcaaaagatttggtcagttacgttcacaaaatccctgtattctcgttacttgtatcatagccagaaataggcatgaatttattatggcttagctgattgtcaaataacttacaattctagcaatctgtgaatgattattagctggt

SEQ ID NO: 26504 - DNA, 1621 bp, Glycine max
  Clone ID: PAT_MRT3847_123934C.1
cggaaccggaaggggccggcgcccactggcccgagcagatctttcaagaatggcacaaattaacaacatggcacaagggatacaaacccttaatcccaattccaatttccataaaccccaagttcctaaatcttcaagttttcttgtttttggatctaaaaaactgaaaaattcagcaaattctatgttggttttgaaaaaagattcaatttttatgcaaaagttttgttcctttaggatttcagcatcagtggctacagcctgcatgcttcacggtgcaagcagccggcccgcaaccgcccgcaaatcctctggcctttccggaaccgtccgcattcccggcgacaagtcgatctcccaccggtccttcatgttcggcggtctcgcgagcggtgaaacgcgcatcaccggccttctggaaggcgaggacgtcatcaatacgggcaaggccatgcaggccatgggcgccaggatccgtaaggaaggcgacacctggatcatcgatggcgtcggcaatggcggcctcctggcgcctgaggcgccgctcgatttcggcaatgccgccacgggctgccgcctgaccatgggcctcgtcggggtctacgatttcgacagcaccttcatcggcgacgcctcgctcacaaagcgcccgatgggccgcgtgttgaacccgctgcgcgaaatgggcgtgcaggtgaaatcggaagacggtgaccgtcttcccgttaccttgcgcgggccgaagacgccgacgccgatcacctaccgcgtgccgatggcctccgcacaggtgaagtccgccgtgctgctcgccggcctcaacacgcccggcatcacgacggtcatcgagccgatcatgacgcgcgatcatacggaaaagatgctgcagggctttggcgccaaccttaccgtcgagacggatgcggacggcgtgcgcaccatccgcctggaaggccgcggcaagctcaccggccaagtcatcgacgtgccgggcgacccgtcctcgacggccttcccgctggttgcggccctgcttgttccgggctccgacgtcaccatcctcaacgtgctgatgaaccccacccgcaccggcctcatcctgacgctgcaggaaatgggcgccgacatcgaagtcatcaacccgcgccttgccggcggcgaagacgtggcggacctgcgcgttcgctcctccacgctgaagggcgtcacggtgccggaagaccgcgcgccttcgatgatcgacgaatatccgattctcgctgtcgccgccgccttcgcggaaggggcgaccgtgatgaacggtctggaagaactccgcgtcaaggaaagcgaccgcctctcggccgtcgccaatggcctcaagctcaatggcgtggattgcgatgagggcgagacgtcgctcgtcgtgcgtggccgccctgacggcaaggggctcggcaacgcctcgggcgccggcgtcgccacccatctcgatcaccgcatcgccatgagcttcctcgtcatgggcctcgtgtcggaaaaccctgtcacggtggacgatgccacgatgatcgccacgagcttcccggagttcatggacctgatggccgggctgggcgcgaagatcgaactctccgatacg

SEQ ID NO: 26505 - DNA, 448 bp, Glycine max
  Clone ID: PAT_MRT3847_123935C.1
caagagcctgcagctcgagctcctggacgcagtgagtaaggacgtcggcttcgaggagaaggaggagggcaaggaccgcgacaagaaccacctgcggctgaccttccgcgccacgctcatggggcaggcgtgcggcctgggccaggaggactgcgtcggcaacgccaccaatgcctttaaggccctgcgcgactcgagcacactagtgccgcccagcgtccgcagcaccgtgtactgcacgggcctgcgcaacggcacgaccagcgactgggacttcctgtggaagcggtacggcgacacggcctcgcccggcgagcgcagcctcatcctgtgggcgctcggctgcacccgggacgagggcaagctcaacgagtacctggccaactcgctcaacggcaaggtccgagcccatgacgcctcggccgtgttcagctccgtgctcggcggc

SEQ ID NO: 26506 - DNA, 712 bp, Glycine max
  Clone ID: PAT_MRT3847_123936C.1
gagaatctatatttactgatggcttttccggagtgcgcaaatcgtcaagtgcatcaagcctcagagagcaggaaaaaaacaattcagcagcagcctggccgcctgcaatatggagcttgaaacctgacttgcaagcagccatttcgaaacctatctttgatggtctacctatcccaatatctggccgcagaagcaaagctgcccttgattagtgtaaaattgttccccatttgagcaaaatactttttgactttacacaaatataaattgcaacaagatgcaattatttgggttagtaagccttgcaaagaaggaaaagaaaaaagaagagagaaaaatacaaaattaggatatttgttccaggcctagcaaggggtagatgacctcctaagaggaaaagcttcagcagttgcaactgaggaaaaggtgcatgaaaatggtaagcagctggtttttcaattgtaccaataatgtaatggtgttcgaccccacctggatgataaagagttatttacatattgattatttcctttgttaaatgaacgagtgaagtgaaagtcattctgttcagtggttaatcatgtgattattattattattgaatacattgtgtaagtatttatcattttttttttttgagacccattatactgcaattccatttaatttgtgtaaaccatgtttacatgggtactcttctagcttcgtggct

SEQ ID NO: 26507 - DNA, 341 bp, Glycine max
  Clone ID: PAT_MRT3847_123937C.1
caggtgtttcttctcttactgacagtttatagttcagcagcactgggacagctgttcttctttcatgtagttctcatacgaaaggtagttttgtttcctgtttttgaaactatcaatgatcatatactactatgctttgatatttaagacaaacacacatgctattaaatcaataataatcagtttgcgaaagtgctttgccatcaatttctagctatgtccttttattggaatgtcctttgctattgaatcctgttgtatctgttattgatgaaaggaatgagaaccttttacttatattctagccatgaaaggagagaatgtagccatggaatttgaat

SEQ ID NO: 26508 - DNA, 806 bp, Glycine max
  unsure (1)..(806): unsure at all n locations
  Clone ID: PAT_MRT3847_123938C.1
tgataggcaagacatgtgattgattcaaacaaaattgctaagaaaacaaaaatttcaaagatcatttattttccttaatactactggacctacatgttcatataaagactaccaaaaacaaaagagcatggccaacatctccatcctgtattaggccatcaaaatgcaccagcggccacacaactatatacaagaagagtggtctgatttaagctcatctttgattgcccatcaatgatcctgaaatgaaattcttcttaaatgtaaatcattctccacaaactttgtcaaactttcactcgcttgcttaattcccctaaaagaaaagcaacattatttcaatacaagatatctaaatctttacattatctcacatcagcaaccataatagtgtgcaataactgttaccaaaactgtttcaactttcaatggaagcatctagcataaaagtctaatgtgtattttgaaagatctttcattaaaatatactttaaatgtcttttgatcataaattgttcctaaagattggcacgagaagctggaaaattgatttggcaaatggcacagtttcacagaaatttactagtagaatatctagattacaggaaaggctccacacttgatctataacatgcaaggaatttatattctgatgatttcaaaatcaccatttttagttccaacactaatagaaagaatttcatctgtgggacttgcaaactttttataaggaagcatatattttcacctaanaaaatattcaaactcactttaaaatattatttccaaatgcaaaccaatttttt

SEQ ID NO: 26509 - DNA, 826 bp, Glycine max
  unsure (1)..(826): unsure at all n locations
  Clone ID: PAT_MRT3847_123939C.1
gatgttaaggcaaatgtcgttataaattataaaatcatatgggtacaatctttatgagcgaatagagcagtcaccactctagtgcacttcaagcgattacagctcctaaacttatcactaaggaaaacatacaaggtaagaccccatcaaagcatatgtatacatctagggccataatctccattcaagcaccttcagattacgggaaatatcattacaaaattcacaccaagcattggaagcataatgatattttaaatcctcccatccctagcccctcctttaatgaactcataaatgcgtttttttcaacacgctgaaaaggtcttaagaggaatgatttaattatttgaccgaactgggcatatagttaaatcataaatgggccaagcactgtcagcatcagaattttacatgataaaacttttctgaattacttaaatctcaacatctgcaagggaggaccaatgaaaatagtctaaattggtgaagccaactttcacttgtgatcacaacctatctagttgtaatcagtatcaaaaacaaattttatgtaaaagttccgggagattgtacttccattgtttttctcctagtaaggagtgatatccttactactgcgtacttttccaagttaaatttccttatcctttctcaataaggagtgatgcagtacccataccactgannnatcaatcnnnttcatcttctnnncaaccgttgttaaagaattgttgtcacacagatcaatatttcctctaccacagagtgccatnnntttatcatnnnnnnnnnacnnnggacacttatctatcnnnttggaacc

SEQ ID NO: 26510 - DNA, 374 bp, Glycine max
  Clone ID: PAT_MRT3847_12393C.1
catcccctaacagtattttgttgaatccagaacctttaggaaagagaactagtgaagaatttttaccaaagaaaggagagttagatccttggatcagaaaaagcttgggcattaacacttaaaaaaatgctaaaaaaaaataattaggggcggcgggaaacatatgggcatactcatatttccggggaaaaattcacataaagggtggtataaaacatttttaagcgggggctgtttgttttctgcttggccttctaaatggggggcttaagctgttttttttctgtgagaatttttagaaggttaaacaaaagggggatgtggttgtggttcctccgaaaattttctgttctccattttttgaattttttttt

SEQ ID NO: 26511 - DNA, 195 bp, Glycine max
  Clone ID: PAT_MRT3847_123940C.1
tccccctccaaaggaaaaccgggaacggcgggcaacacagcaacgaggcggcaagcccccaacacgaggcccagacgcgcaagcaaacaacgacggcaaccggcaaacagaaccagcaagccgcggagaggacatagctgactacgagccaggagaccaacatagaaccaagtccaaaacagtcaacccaacaag

SEQ ID NO: 26512 - DNA, 477 bp, Glycine max
  Clone ID: PAT_MRT3847_123941C.1
acaaaagccacccatttcctcacatagaaagccttagaaacttgataggaaaccacagtgaaggataatgcatacgtaaattgtacttcagagtaatgtgaaattctgaaggctcgttgattactgaattcagcgattgtcatgtcaggcaatgctttcactgattgtgctgtgaaatatggttactatttaggatctatggtggaatttgctagaattgaatttatttagtataggactgtagtagccttctgcaaaaatatagaactatataagtgctacattgttaataaaattacaaattaaaaaatgcaacacacaaattacagtaaacctttaacttgactgaaaatacctaatgattcctttattgagctttcacaaggagagaaatgtagtcataaccaccacatgtgtagatttaatttaacctttgatggctagtctaacaaagagaagtcaaatatatgtgcacag

SEQ ID NO: 26513 - DNA, 390 bp, Glycine max
  Clone ID: PAT_MRT3847_123942C.1
agctgctgcgcgtgccggtcccgaattggaatttcggggtaggacgtacgcgtacgggagagggtttccaataagaaattgtgaggacatttaccgttgattaacctttaagggcctacggtgcacttcatttttttaaatcttattgggattggagcatttagaatttagaatttctttcgaaggcgcgaacacacgttaaaatataagaccttttcttctcttttgagtggctgaactatataaaggaatttctgtgagttggaatgcgatgtaaatgtgtaaaccttgagattattaagcttgttgtggcaaatatttgccttggggaaagatgaaaaatagggtgttttttattcttatttcaagcactttgtttgtcatgtgggg

SEQ ID NO: 26514 - DNA, 512 bp, Glycine max
  Clone ID: PAT_MRT3847_123943C.1
tggtcgaaccgtaacggcgtccaaaggggaagcgccaagttcgatcgcccgctcaagccccgcccccgcccctcttccccctctccgggatccgcccttcgccgccccaacgccgccgccagaaacggcgacgccgtacctggaagagttcgagtggttgtaagattgagaccacagaatgctgaagaaatgatagcagatgctgattttgctgactgtgttgaattacaaccagagcttaaaagactgaaacttcgtagaaacaattgggattcagacacatatgagtttgatgaggtgcttactgaatttgcatcacagaaacgtgtctatgaagttgtggctaagccagttgtggagagtgttcttgatggttataatgggactgtgatggcttatggtcaaactggaactgggaaaacttttacacttggacgacttggggaagtagatgcctctgaccgtggtatcatggttcgttccatggaggatatttttgctgacttatcacc

SEQ ID NO: 26515 - DNA, 349 bp, Glycine max
  Clone ID: PAT_MRT3847_123944C.1
ccgggcctggatttccgggtcggaccaaggcttccgccaacgcttccgtcaacgcttccgttcaaagcttccgttattttcaaagattaaggtccggggtttcggaagcagccacagttggctcgtccaaagcaaaccgttcgtaagtccacaggaggaaaggctcctaggaagcagttggcacccaaggttgaacgtaggtttgaaccaactactgggggggtgaagaagcccaaccgttttggtcctggtcccgtggtttttgtggaatttaggaattcccagaagagtcccgagcttttattccgaaagctccctttccaaaggttgttccgggaattggttaagg

SEQ ID NO: 26516 - DNA, 782 bp, Glycine max
  Clone ID: PAT_MRT3847_123945C.1
tactttctcgcgcttcccataatggtgaagatgcactgccgtgataagggatcaacaccatctttcatctttccgctgatctcttgtttcttccatcatcaccgtgttccggtgatccctaatcctcacaaacaaaaatgactacatcaaggctgccttgcgcactggaatgtgaaaaattctgagaacaacctctcgaaaagaggattatgtgatcaaactctcacacactaaataaggtgaaaacactaccctcgatggcccactgctgctcggattattctcctttgttgacattgaagcatctctcttccacataatcacgacatgaacgagcgtatgcatgatttacatggatatctgatatgaattacgcgtctacatctctttcttagcctcctcagatatgcagctagaactactcgacatgtgcagaacataaactatacgctgaatcctgtgcaagcagtaattgactttgccatttctatgctgtgaaagaacattcaagtactttcaagttcctttgtcaataagcaagagcggtaccctggtggaacgagtgcacaatcttggagacacatcagcgatgtgtcatggtctagatttcagaactgcagaattttactgccataaagcccgtgaaacaacagctatcatgattccattggtgactgccgatggaaccaaaactcaagcacttgctgattgccactcaaatacttctggaatgaatcatcacatgcttcatgaactcatgggagttgatcctggaactaacc

SEQ ID NO: 26517 - DNA, 413 bp, Glycine max
  unsure (1)..(413): unsure at all n locations
  Clone ID: PAT_MRT3847_123946C.1
tctagctatctcgatcgaactgtccaaggtcctgtcaccgcctgtgtccgcacaaatgtcgcttttcgcgcttcttatcaccggttggtccagcaacggcaacaaacgaagaataagatgcgccccagcgatgagggccaccatggttgcccccgaccaggtgtgcgcccataccggtagctccaccacccacgtgtttatgccgcgagatccacagccatccatcccgggaatcctctgaatcatcggttaccacacgtctgcccagactgttcgcccaccgtgaccacaagacactggtcgcgtctgggtacaacggggggcgagagcccacccggaccactgcggggtgtcttaatacaaaggtacgcttaatcaacagtgcggtgaaatatcnggctaaggctagggta

SEQ ID NO: 26518 - DNA, 222 bp, Glycine max
  Clone ID: PAT_MRT3847_123947C.1
ctaaccctttatattattcattcaacaccactttctccaaccttcaacatctcctaacacactttaacaaatttttatctctttcctaccctcaaacccttttccaaattccccctcttaacattctcattccctctttatcctccccaaaatcacatctaccctttttacatttaacctaaagtatacctttttccacccatattatcatcccatcaaatc

SEQ ID NO: 26519 - DNA, 530 bp, Glycine max
  Clone ID: PAT_MRT3847_123948C.1
ttccggatatatctcttaacattgttatcatgcattaagagagcatgcatacatgccactcccatatcatagcctccctcacctattttctttgttctaacgcttttgatatctttctctactcaaaacgcatctgcattgatcttatatgccttcccatgtttgttcccaaaactgaattcgaacaccttagaaaaacccaagctttaagaagtttcagttatgcatccttgatgttcagaaaaaccggcccattgtggttcacttcttgctccacgatagtcacacccttgggcttcaatttcttgaccgtgtccacggatcagttcattaattaatgggatttttttaatctttttttgtgtttttgttgttaatttttagtgtgcgtgtctgatcgccattgtcgatatattgtacactgttgtaacactctgtttagcatgcattttgtatgttttgtaagtgttgctagacatttttaatgaatgatcgttgacaaaagaaaaagggtttggctgaagcaccac

SEQ ID NO: 26520 - DNA, 492 bp, Glycine max
  Clone ID: PAT_MRT3847_123949C.1
agtctatttgcactgttatatagataacaagagataagttttctttctttgtgtttatagaaatggtaggagaaaaactatatttttggaggcataacatggaacattatattttcacatagcactgcaagtagttaatcaatgtttgatcagttgcgagcttgcttgtttgtttttggattcctcgtgttctcctatttatgtgcccaaagtagcttgaaatgatgttgcctgttgaggtctgggaagttccagaaaaggattaagttatatggcagtctgctgtatactatcatttagatggtttggttgccgcgtaaattccatatatttaagaggaaacctctcaaacttgctatgggataacattcacaaagtttcaacatctcttgcattttctctctttcaacaagatggaaataaaatactggcattcttagaatacagagagtaaatatagcattatttactatgttaggggaatgaaactgg

SEQ ID NO: 26521 - DNA, 1006 bp, Glycine max
  Clone ID: PAT_MRT3847_12394C.1
ggctcgagattttgtaccaagaagtacctttagcaaggatcaatgagtcttttctcattccaacttttgtgaagaaattgaaaatactatcaatatgtcaaatagaggctcatcatggatagctctgaaattcagaggtgttgttgatgtaattcgtgccagcagataccaatcaagctatgttgcactacagagaaacagaccaattgtgtcagctgctagaactgaaagaggttattggatgcaccctggtcagcaattctatagcaacaacacaagcactaatccaaaaggaataaaggatgtgaaggctcaaccagaagctcctgcacctgcttctaaaatcttcaccttcttccctcattggttaagatgggttttgggcatggtactttctctcttgctacctttctggaaatcttactggcgaaaactacagataatacaagcggaggcagagtttgtggttgaagaggctgaagcagtggcaaaagtggtagaaaaagtggcaacggtagcagaaaaggtatctgaagatgtagcagagatgcttcctgagaatggtaaactaagaaaagcagctttggttgtagaacgtgcatcaaaagaggcagcacatgatgctcagttaactgaagaattcatacacaaggttgaagaactcaagaatgacctggatgatttagaagccttcgttgaaccagtaattgacaagattgtgaagatataatgattcatgccgaagtaaaaattactttctctgtatgtattgtgtgactgcacatccctgtatatatttttcttttgggtttaattaagtttttcatatttaaaaaaaagatcgtttttagattattatctaaaatttattttttttcaattaaggatctaaaaaaatcttcagttttattttactatttgtaattaattatctttcattaagtgataacgtaactgatgaagtgtcacgtcatcatgtcttgttacggacatcttattatcacgt

SEQ ID NO: 26522 - DNA, 248 bp, Glycine max
  Clone ID: PAT_MRT3847_123950C.1
ttttgggatttgcctagattcttcacttagacccgtttcaatcaatgaatttgtttcaaaaaggaaaaaagcaagcctgttacctagaaatgtggggggataacaagcatacacaatgctcactaactcacgtttatatacgacaacagttatctccaggatgtgccatgtgtgttcttacgaaataaactctcaacctgatgtcaagtcgattccagtgtgcataaaaagttctttttaactgtggg

SEQ ID NO: 26523 - DNA, 164 bp, Glycine max
  Clone ID: PAT_MRT3847_123951C.1
ccatctggcattgagccccactagaaaagctttgcccaacccaaaactgagccctccaacacgcaatggattatactctcgaccaaaactaactaataaacacagaagtatcaaacctatcggacccaaaaataacaaaggcgacccttgccggcccagcctcg

SEQ ID NO: 26524 - DNA, 290 bp, Glycine max
  Clone ID: PAT_MRT3847_123952C.1
gggcgaaaaaccccaggggtttttaattaaaaaaatgggggggcaaacttaattttccaattattagagccctttttgcccaaaaggggttctccccctaacaaatttaaacccccctttggtctcaaacgtttaaaaccctagccttattataaaaagggttcccccccaggggaaaaaaataagggttcttattttgtccccacaaaaaaaaggggggtaaaaattgggggccactaatttttttttttctaaaagggcatttggcaaaaaaggtttttcccccccca

SEQ ID NO: 26525 - DNA, 371 bp, Glycine max
  Clone ID: PAT_MRT3847_123953C.1
taatttatgatataattggatccaaaataggggccaggtccagagggtcacatgatttatttataaacacacttaaacttgatttggaaccatacatccactaaacttgaacttccaaactggatctggctctcaacataagatcatcctcctcttttcagccatgaaagcattgcccgtaccatgccggtcttgagcaactctaaccaaaagaaccacggcattttgatgatccgcataagcatttctttctgcctttggctgccatgctaccttcggcacgatcagattgggcaagcccataatcatatgttaactcagtcattggcggaatgtgtctgagtgcacaaaatgccacatggagggatgat

SEQ ID NO: 26526 - DNA, 349 bp, Glycine max
  Clone ID: PAT_MRT3847_123954C.1
tttgggctgatttatgtgcttgcatggtcgtccagaagtcatccccggggttcagtgcgctctcttgtagtagtgcctcccggtgaactagtctaggagttattagtacgcaagacacggccaagtacaataatgccacttttaacgggtatcctaggaaatatcggtaaaatcacgcgaagatccggcccaactaattagtatcgaagattagaaggtgcccactctggtagaacaacgtcgctaagacccctttaaggttcatcgtcggattctctacgttaaccgtctacggttagatctcgacacataatacgaaagctagactcgggacaggacccctctctca

SEQ ID NO: 26527 - DNA, 2116 bp, Glycine max
  Clone ID: PAT_MRT3847_123955C.1
cgctttatggctcgagattttatcatcctttcgagaagcttctccactggccttctcacttgtccattttctctcttcgcttctcttcgctcctccgtcactccaccgccgcgtcgctccgccgttggtcgcgtgtttgcggcgagatctacatccttagtgtgaatctgcgattcttcgaatcgaatcaggtgagagcgtggtgtgtgtttgagttttgagtatggcagcggcggaagataagtggtgcgtggtgaccggaggtcgtggtttcgcagctcggcatttagtggaaatgctaatccgtcacaacgagtactgcgttcgcatcgccgatttggaggccaacattgttctcgagcccgccgagcagttagggcttctcggccaggccctgcactctggccgggcccaatatgtctcccttgatcttcgcaacaaggcccaacttctaaaagcgttggagggagttgaggttgtgttccacatggctgctccgaactcttccattaacaactaccagcttcatcattccgtcaatgtgcaagggaccaagaatgtcatcgatgcttgcgtggagctgaacgtgaagcgtctcgtttacaccagctctcccagcgtcgtcttcgacggcgttcatggaattcataatggaaacgaaacaatgccttatgcgcattcgcctaatgatcattattcagcgacaaaagctgagggtgaggcattggttattaaagctaatgggactaatgggctcctaacgtgctgcatacgccctagcagcatttttgggcctggtgacaggttgttggtgccttcactagttgatgctgccagaaaaggaaaatctaagttccttattggtgatggcaataacgtttatgatttcacatatgttgaaaatgtggctcatgcccatatatgtgctgatcgagctctagtttcagaagcaccagtttcagaaaaagcggcaggagaggcatatttcataacaaatatggaacctatgaaattttgggagttcgtgtcagtggtagtggaaggtcttggatatgaagggccaagaataaagatccctacctttgttatcatgccatttgcacatttggtggagtggatatataggctactaggcccatatgggatgaaggtgccccagttaactccttcaagaataagactcacgtcttgcagcaggacttttgattgctcaaaagcaaaggatcgccttggctatgcacccatcgtaactctacaggagggtctgcgtaggacaattgaatcatacacacacttgaaggctgaaaatcaacctaaaactaaaagagaaggttcctcaaaagcttccatatatcttggaagtggaagagttgccgacacattgctttggaaggataaaaagcaaactttcatcgcattgttagtcttgattgcaatatacttcaacttcattgcatcggaaaataccatcattagtgctctgacaaagcttctgttgtttgcatcgatctttttattcattcatggcattctacctgcaaaaatattggggtatactcttgagaaaatacccaaatcatggtttcacttatcagaagatatgtctcatcaaattgctctctcagtagcctcatcatggaatattgctgtgaatgttttgaaatcccttgcagatgggaatgattgggtgctgttcttcaaggctgttctctctctgttcattctcagcttccttggagccttttcactgcagagcttgtatactataggggttacctttgcgtttatagctttctacgtatacgaacagaaggaggaagagattggtggcttattcatcaaaacacattctcttggatgcaaattgaaatctgatctcaccaggaagtttctttcttcaaagaagattgattgatagcttttgtagcgctagcttttttcttagttgcaccttacatatccgttggagttctgtgtatgattgtacaataattgtaatttaattgattgatatttagtcaacttgcaaatatttttatagaaaattcttactttgaagagttgtactcaaaaaaaaaaaaaaaagggcgcccgctctagaggatcccaagcctta

SEQ ID NO: 26528 - DNA, 1223 bp, Glycine max
  unsure (1)..(1223): unsure at all n locations
  Clone ID: PAT_MRT3847_123956C.1
ggcaaaactaaggttagtactccgccgcttacgccttcgtattatccaatatatttggactctctctcttcttcacatgctcattggctttcagcatatctatggcagaggcaaaactaaggtatgctgttgttactggagcaaacaaagggataggatttgagactgtaaaagagctggcctcaaatggagtcaaggtggtgctcacagcaagagatgagaaaaaaggccatgaagcctttgagagattgaaagagtgtggtttctctgatttggttatttttcaccagcttgatgtcactgaatctgctagtatttcttcactagtagagtttgttaagaccaattttgggaagcttgatatattggtgaacaatgcaggaatcagtggtgccaatctggatgaagtggaaggatcaacatttaaatgggaggaactgactcaaaccaatgagatgactgaaaagtgcctaacaacaaactactatggtgcaaagaaaacaactgaggcatttcttacccttctgcagttatccaattcacctaggattgttaatgtttcctcccaagcagggttgttaaagaacatatcaaacgaatgggctaaaggggtgcttgatgatgctgataatcttacagaagagagaatagacgaggtactcaaagagtttatcaaagacttcaaagaaggttcattagcaaccaaagggtggccaaccttcttgtctgcatatattgtctcaaaagcagccatgaattcatacacaaggattctagccaagaagcaccaaaacatgtgcattaacagtgtgtgccctggttttgtcaaaacagacataaacaaaaacactggcatcttaaccgttgaccaaggtgctgctagtgttgtgaaattggcactgttgcctgatggttccccttcgggcctcttctatattaggcaagaattgtcaaacttctgaatgattttaaatgtaatgcaaatacattcatgcagacacatgaattaacacatgacagaatgttcctcttgcccgtattttttacccttatgcaagtacgaccattaccttctattcttgctaggaattgtcaaagttcttatttgtcatcttctggtgaaatttaatttctagaacatgagatgaactattcttggtttaaggtaatataaaaatcaattccagttaattgttaaaaaacaaacgcagaaaaggannagg

SEQ ID NO: 26529 - DNA, 1304 bp, Glycine max
  unsure (1)..(1304): unsure at all n locations
  Clone ID: PAT_MRT3847_123957C.1
taccctacggctgcgagaagacgacagaaggggatctacaatttctcttctagcaatcaaccatctttggatcaaccctccaatttgtttacaatatggaacagaccctctcctttgaatttgagcatgaatttgttcaaaacacggcaagagtgaaatctgttgatatgcatccaactgagccatggattctactgggtttgtattcaggaactatttctatttggaactatcagacaaagactgaagagaagtctttaaaaatcagcgaatctccagtgagatcagcaaagttcattgctcgggaaaactggattgttgcagctacggatgacaaaaacattcacgtctacaattatgacaaaatggaaaagatagtagaatttgcggaacataaagattatatcaggagtttagctgttcatcctgtcctgccatatgtaatatcagcttcagatgatcaggttctaaaattgtggaattggaggaaaggttggtcttgttatgagaactttgaagggcactcacattatgtgatgcaagtggcattcaaccctaaggatccatctacctttgctagtgcatcccttgatggcaccttgaagatctggagccttgattcctctgctccaaattttaccctggaaggacaccagaaaggagtgaattgtgttgattacttcataaccaacgacaaacaatatcttttaagtggttctgatgattacactgccaaggtatgggattatcattctagaaactgtgtacagacgcttgaaggacatgaaaacaatgttacagcaatatgtgctcatcctgagcttcctataataataacagcttcagaggattctactgttaaaatatgggatgctgtcacttacaggcttcaaaccacgttgaactttggtctcaagagagtatggagtattggatacaagaaaggatcatctcagcttgcatttggttgtgaccaaggatttctaattgttaagatttcagaaggaagaccccaataagccaacatctggtagccagatgactagttatgatgagcttaactgcccagagaacatcatattctgccgttggttgtttatttctgagttgttactagttactagaataaattaatttagaatctacatattaccttatgtaatatattggtgtatgtacctgtgtgttcggattaatgtgttgccatttgagtgatatatataatatattttttttatcagtcaaaaaaaaaaaaaaaaaaaaaaaaaaaaaaaaaaaaanaaaaaaaaaaaaaaaaaanaaaa

SEQ ID NO: 26530 - DNA, 520 bp, Glycine max
  Clone ID: PAT_MRT3847_123958C.1
aaaaaggggaaaccaaaactggccccaaaagaaaaaacgggggggggcccgggggggaaaaaaaatttttttttttaaggggggaccccaaatttcaaagggtactagggaaacaaaaaaaaaaaaattttccccgggggaaaaaaaaaaaagggcccgggggaaaaaaaaaaactgtttcaactgggggggggaaaaaaggggattttttagtcctttaaaaaaagttaaaaaagggccaaggggggtttttcctgggccaacattttttaaaaaaccaaaaacccgggggccctggttatttaaaaaaaaaaaacccccctttcccaaagtttttgggggaaaaaggaacaacgggaacaaaaattttaaccttaaaaaaacctggaaaaagttcccaaaaagcgggggtcttttgggggataaaaaaaggccgttgggccccggcccaatttaagggaatccaattccaatattttgggggccatactgaaactttgggggattaactaaagggggg

SEQ ID NO: 26531 - DNA, 3233 bp, Glycine max
  Clone ID: PAT_MRT3847_123959C.1
aattcggctcgagccaaaccaaactctaagcaattattgtatacattctcttctctctcccttttctcatcacacactaacttgctttcgaggttttcttcttctttctcgaattttcacataccgaacttctcgtctttcacatctccaggtttgaaatgaatcctgagaagtttactcacaagactaatgaagctcttgcgtcggcccacgagctcgcgatgagttcaggccacgcgcaattgactcccatccacttggcccacgcgctgatttccgatcccaacggcatcttcgtgctagcgataaacagcgcgggcggcggcgaggaatcggcacgcgccgtggagcgagtgttgaaccaggctctgaagaagctaccctgccagtcccctccgccggacgaggtgccggcgagcaccaacctcgtgagggccatcaggagagcacaggcggcgcaaaaatcacgtggcgacacgcatttggccgttgatcagttgatcctcggaatcctcgaagactcccaaatcggagacctgttgaaggaagcgggggttgcggtggcgagggtaaaatcggaagtggataagcttcgtgggaaggaagggaagaaggttgagagcgcttccggggatacgaatttccaagctttgaagacttatgggcgtgaccttgttgaacaagcggggaagcttgaccctgttattggccgtgacgaagagattagaagggttgtgaggattctatcacggaggactaagaacaacccggttctcattggagaaccgggtgtgggaaaaactgcggttgtggaagggttggcacagaggatagtaagaggggatgttccaagcaaccttgctgatgtgaggcttattgcgttggatatgggggcgttggtcgcgggtgccaagtatagaggcgagtttgaggagcggttaaaggctgttttgaaggaagtggaggaggctgaggggaaggtgatactcttcattgatgagattcatttggtccttggtgctggtagaactgaaggctccatggatgctgctaatctattcaaacctatgcttgctcgcggccagcttaggtgcattggtgccaccacgcttgaggagtacaggaagtatgtggagaaggatgctgcattcgagaggaggttccaacaggtttttgtggcggaacctagtgtggttgataccattagcattcttcgtggcttgaaagagagatatgaaggccatcacggtgttagaattcaggaccgtgctttggttatggcagctcaattgtctaaccggtatataactgggcgtcatcttcctgacaaggcaattgatttggttgacgaggcttgtgcaaatgttagggttcaacttgatagtcagcctgaggaaattgataaccttgaaaggaagagaatgcagctagaagtggaacttcatgctctggagaaagagaaagacaaggctagcaaagcccgtcttgttgaagtgcggaaagaacttgatgacttgagggacaagcttcagcctttgatgatgaagtaccgaaaagagaaagagagggttgatgagattcgaaggctcaagaagaaaagagaagagcttctttttgctttacaagaggctgagagaagatatgatctggctagagctgcagacctgcgatatggagcaattcaagaggtggaaactgcaatacaacaacttgaagggagcactgaagagaatctgatgttgactgaaactgttggaccggagcaaatagctgaggttgtgagccgctggaccggtataccagttacaaggcttggccaaaatgaaaaagaaagattgattggacttggtgacagattgcacagcagagttgtaggacaagaccaagctgttaatgctgttgctgaggctgtgttgagatctagagctgggctaggaagacctcaacaaccaactggttcattcctattccttggtccaactggtgttggtaaaactgagcttgcaaaggctcttgctgagcaactatttgataatgaaaaccagttggtgagaattgatatgtccgaatacatggagcagcactcggtttcaagattgattggtgcaccaccagggtatgttggacatgaggaaggtggacaactaactgaagccgtaaggcgaagaccttacagtgtggtgctttttgatgaagtggaaaaggcacatacatctgtgttcaatactcttcttcaagttttggacgatgggaggttaactgatggacaaggccgtactgtggactttagaaacactgtaattatcatgacctcaaatcttggagcagagcacctcctcagtggactttcaggaaaatgtaccatgcaagttgctcgggatcgggtaatgcaggaggtgagaaggcaatttaggccagaattgctgaatcgacttgatgaaattgtggtatttgaccccctttcacatgaccaattgaggaaggttgcaaggctacaaatgaaggatgtagctagtcgtcttgctgagaaaggaattgccttggcagtcactgatgcagcactagactatatactttccgagagctatgatccggtgtatggtgctagaccaataaggaggtggcttgagaagaaggtggtgacagagttgtctagaatgcttgtaagagaggagattgatgagaattcaacggtttacatagatgctggacccaatgggggcgagttggtctaccgtgtagaaaagaatggaggggttgttaatcctacaactgggcagaagtccgatatcttgattcagatacctaatggacatgcacctaaaactgatgctgttcaagcagtcaagaagatgaagattgaggaaattgatgatgatgaaatggaagagtgaattttatgataaaatgtaattagtttgatggcgcaagctcctcttgaacttccttctttgtcttttatgtgttttgaatgggtgtgagtgaaaattgaagaagtcccttgtaacacctgctttttgtctgatcaataaattttctttctgtaaatagattgataaaaaaaaaaaaaaagagcttttttatagtttttctgtgcagcggctgctctgtgataatttagttgcctgtcatatttacttggcgaagccgtaaaatgaaatctgtggtattggtattgttattttttagacaaattccactgttaaagttcgttgttatgcgatttaacactt

SEQ ID NO: 26532 - DNA, 363 bp, Glycine max
  Clone ID: PAT_MRT3847_12395C.1
ggagaactttgcttttttcaaaaatccatctggtcaagttattgcacaggatctgttttcttctggggccataaaatctgcaactgatttcaagtgtacaaagaggtgctggcctttctgggcttgacttcatatttggataacacggctgtctatcataccaagaatgacaaattagagcttttgaagactggatctttaacatctgggggaaaatatgcttgctttcctgcttcatattgggcatcttctcatattcagaggcaattcaactgaatcagggaagatataagcaagaacaatccattactttgcattttgggaatgtatatggtgataccgtcaaagttgctaaatgctgac

SEQ ID NO: 26533 - DNA, 421 bp, Glycine max
  Clone ID: PAT_MRT3847_123960C.1
acgtgttcagctaatatgtttataattttgctcatttgctccagaagaactctaagaaacataaaaaagcctctgcaatgtgttatggcccggaagagaattctcatgttgctaattataggatggtattggaaagatttccactttcattggatcggaaaaaatggtctagtgtagaaagggaaagtcttttgaagggaattaagcaacaattccaagaaatggtgcttcaactttcactttcagttgatagttcagagggcttgcttggagatgcaaatgacatggataatgtaattgcatctgtgaaagatcttgaaatcacaccagagaggattagacaatttttacctaaagctaattgggatctcatagcttcaatgtatgttggtggccgtaatggtgctgtatgtgaatcaag

SEQ ID NO: 26534 - DNA, 370 bp, Glycine max
  Clone ID: PAT_MRT3847_123961C.1
tgtactaagccggggcactaaatggtacactggtttgtatgaaaatggtatgaataggttttgcccacttacttatgggctttaaaagatgcctcttatacacagtctatgcttaccttggataacatatatgcctatatattgtacccctctttggtgtttagctactatgcctcacctctgtctactaaatgaaatacctttgtaccctctggttatagactcatttttcattatttcttaatgcatctttctatcacctcttataatacatttacttgatgtctctttaactggtggaacactcataaagtggataaatagagctatgatatggatgatgaaatcagttacttgccatctatatgga

SEQ ID NO: 26535 - DNA, 375 bp, Glycine max
  Clone ID: PAT_MRT3847_123962C.1
gttagaaaaaaaaaaatttgggaggtacaaataaattccccttggagggggaaacgtttaacaaatcaggtgatcgccaaaattgtggggcgggggcaaaaaaaaaagggtgtggttttgaaggtaaaacctggaaaacacacccctgttaaagaaaaacctaaaaagtgggtgggggtggggataaaaagaaacggggttttaaaaaaaaaaaaaaactcaaggggggccgctaattttggttttggaagaaaaaaaggcttaaaaattaaccaaattttttccttttaaaggggctttttgggattttattaaaaaacggaggcggggggggcccgggaaattcggaacgggcaccggggggggaaccagttt

SEQ ID NO: 26536 - DNA, 472 bp, Glycine max
  Clone ID: PAT_MRT3847_123963C.1
ctagttcttactaaatatgagtaacttatacaaactactccaaaaatttatgaaaattacacttgacatctgttgttttaatacatttctttgcttcaaacaaagttaactaatgggaacacttaaaaagactaaaaaatcccttttctttttgttgtgagaaaccctcccctctaatgggcagtacccttttttgcaacaccccgcactcagcactcacaccaatattgtgttcgattctagaaaaagtgggaggtggtgaaagttggtgaaataaaatacaagtgaaaaagtgggagtatttgtttcacttgaaggggtgaaagtggtactcttctagtgaattcatgttgttacactttcatcttaaattgaaatgaagcacattgaaaaagagcacggtgaaatcaatatttttgtttggtcaaaattgtcccttttattgtttgttatgtgaggctcgtggtcccgt

SEQ ID NO: 26537 - DNA, 448 bp, Glycine max
  Clone ID: PAT_MRT3847_123964C.1
actaaaaaaaaatacattaacttaaaatgtgtatatgacagtaagttagtgacacaatagaggcaaacaaaaaaaagccgtttaagaaataccgttcatacatgtaaataaacataacaatctgtgtcatcaggaaacccatcatctagttcaaactcattaggcaactcttgggcctatttactgtgttatgtataaccaataagtcgggggccatttgtcatactgctcaatggattccccattaacaactataaggcaatagcagataggtaattcaggttacatcagtttcagctcttgcaagaaaatagcaggaataaataatatgctcctcagaagttcctaaaaccacccagaaattcttgctgcatagcttataaccacatgccacaaaaatgaagaaaggtgcaactcaacgaccaccacgtgcacgcccacgcccacg

SEQ ID NO: 26538 - DNA, 936 bp, Glycine max
  Clone ID: PAT_MRT3847_123965C.1
cccacgcgtccgcccacgcgtccgtacggctgcgagaagacgacagaagggggtctcactctcacttttgatttttttgccctaaaaccctcgctgccgtcgtggtggccgcccaagaaaagagaatagagagcgcaaacgagtcttcatcttcgactcaccatgaagctcgtcaggtttttaatgaagttgaacaatgaaaccgtgtcaattgagctcaagaatggcactattgttcatggcaccattacaggtgttgatatcagtatgaacacacatttgaaaacagttaaactaactctgaaagggaaaaatccagtgactctggatcatctcagtgtgaggggtaacaacatccgttactacattcttcctgacagcttgaatctcgagaccctgcttgtggaagagacacctaagatcaaacccaagaagccaactgggtgacgaggaaggggcctgtcgtggtggtggccgttgatttgctttcttcatttttgtggcatgtggttgtaagctatgcagcaagaattgctgggtgattttaggaacttcacggagcatattttttattcctgctattttcttgcaagagcttatcatgctttagtgtacaaccatcttccttctgaaactgatgtaacatgaattacctatctgctattgccttatactagttgttaatggggatctattcattgagcagtatgacaaatcgcccacgactttggtcatacataacacagtaaataggcccaagagttgcctaatgagtttgaactagatgatggatttcctgatggcacatattgtgttatttatttatttacatgtatgaatggtatttcttaaacggcttttttttgtttgcctctaatgtgtcactaactgactgtcatatacacattttaagttaatgtaatttttttttggccc

SEQ ID NO: 26539 - DNA, 376 bp, Glycine max
  Clone ID: PAT_MRT3847_123966C.1
tcaaccgtacgttatgatgccgcactgagcccaaccctctcacggcatgtgggccccttccgcccagtctacgtctctttgacggcccgcctgtacctactagtgtcaaaccctatgaatctgggatctgcgctgctggatcgccaagaactatctctatacctgctatgcttacaccggcaaggttacataagctatagtgattagaatcatgcaaactggtcaatctgaatgtaataggtttatcgactttaatagtcctgctctagttgagacaattcttcaaacatataatgtggcaatactgcccaatggggggcatagttttaaggcgcattgggcgaccttgatagctagtgagaggtcgcgccacgac

SEQ ID NO: 26540 - DNA, 730 bp, Glycine max
  Clone ID: PAT_MRT3847_123967C.1
ttttcgaaaagtgctgaatgggtgtgcccttttctgttcttttatagcaagttgttttctttaatcttccttgtccgatcgaatctagtcacttctaagttctaaccctcttcctgaaacatccaagagtgaagtaagtatcatcatttgaacctggagatgaacatgagctgaggtattcattctccaagtggttccaaacatggaggaaggaatcaaagatggaacaccaagaaaagaaaacctcgttggttcttctcacaaaggtggctccgcaagaatcccaggtctctctaagccagagaaccgtgttgctggtaatggctatgaaaatgtgcttcatcaagcagccaagaacagtaatgttgatgctgctgatagatttaaaaaagctgaagaatctcttagaactgtcatgtacttgagttgctggggtcctaactaaaggggcaaccttcaaaccctcaagaactgtgtgtagtggcaggtatgatatttggaccctttttggatacatttttaaataagtactcgtaggaaaaaaaataaaaaggtaaaaaaattgaattaaacttatttcataagttgaaattagcttatagataagctaatttatagaaacttgtttaatttctctgcaagttgattgacatttatttaagttaattttaacttatgagataagtataattcattatatctttttttctttcctacaagtgagtttatc

SEQ ID NO: 26541 - DNA, 502 bp, Glycine max
  Clone ID: PAT_MRT3847_123968C.1
actcttaggatccccatccgtagcctctatatattcagcaccatcaacagccatatcaacatcatattcaacgccaacaccttttagatctcgtttatcttcctcagtaacccggctaggcattaaaattttaataccgatctcacaaaggtttttattggtaacagaaataatataacgcgttgccgctgtcacatctctagcaactgtaatttcgctggctgtatcagtaaacccctgaatataatcctgcgtttgcgtccctggtctgaattctgccttaacattctgaaagtttaatgaaccatcctgattcataacctgaacgtcatcaaaatataaatctttcaatgaaaagtctggatcaacttcaccatcataaacggctaaaagaattctgatcctgttaattgaaattatgttatcttccatttcaacaggtgtatgacgctttgaagaaccgcccttacttccaattatcatatttttgatcataactttt

SEQ ID NO: 26542 - DNA, 1197 bp, Glycine max
  Clone ID: PAT_MRT3847_123969C.1
aaaaccttaaattaaataataaaacctaaatattaaacagtacaatttacatcaggagctttgcacaaatgggtgaacttgctacaaaaagccaagtccttttcccgcacttaataatgaacaaaagatgatacatattaactcgtcactctttactatgatttcttctagtggcatttaatctaaatctaaagatgatattcacattaaggaagcactttacgacacctaatttaagtggataagatgctgtcatttcttcaaggcccatctcttatcaatattagagtaaacaatctcctgacaacgtacaagtccacaagctcctccaaagcacaaccatctttcactacctttgttcatgttccatctcactctgtgcaatgcggctactttgggagggaaggtttcaggtatattcccaaaatctgacttttcattatcagcctcgggaggtattggtggcgcatcatcatctccacaaaccagagctaggccttctggttttttctttctgccactatttagttttggtcttttgggctgcttcacagaacataaagcttcctcggacccagattccaaaccaacatcctcaccagcaccaatggctatagtctgagaatcaggatttgaagtttctgccatttgattactagcacttctgaatggatttgacttggctaataggtctcggaaagactcagcacaccgacccttttcaggtggcttcttccactggaaaggagcatctgacaaaggagtgttgataatgagagttgaatcctcctcagttactgacccacagaggaagcgtcgggatcgattgcgtgaatgatcagtctccactgatttagtagtgagctgaaaacgaatgacagcaccatctacaccacaataagcaaccatgcctgttaaacgtgaaacttgaacgctccaaatggcaaaagatgaatatgcagaaccgtgcaacccaggttgctttttcccactgtatatttctccagtgacaggaaggtcatttgcagccttcaccaagctaatggttctcattgttccatcctcaaaggacataatgatgcagcttgggtttgacagccaatccagactatatatgattcttggcataggattgaggctcctcaaaggacgaaatggattacgtaggtcccaaaacttaaggccttcatgtccagc

SEQ ID NO: 26543 - DNA, 617 bp, Glycine max
  Clone ID: PAT_MRT3847_12396C.1
ggtgccatgaattggaacttggcaatataataaccaacaaacttggtcaggttccaactcttcgaacaaactaactagctaggtgagaaaaagagaaacatgccttgcctttacatcaccaccaaccttaacctagatggagttgacaccaaccccgtcttttctgaagccaccactgctgtctctacaatcattggcaaacctgagaagtttgtaatggtcatattgaagtcatcagtaccaatatcatttgagggtaacaaggaaccagcagcatatgctgagatagtttcaatgggtggcataaatacagaagtgaagaggaagctgattgctaccattggaaccattttgcagtccaacctgtctatcccaagaacacgatttttcctcaaagtctttgatgtgagtgcgtttcgtaccaactccaaaatgtaatgccttcaaattctgagacaatactcgccattgtgctttaataatcatcaacgttcgttttaaacgtgtgtgtacttaattattggcttgttgctattaatatttattctcatatgttctacttcgtgtgcttatctatgcgcttgttgctagttattcctgctctcaaaaaaaaaaaa

SEQ ID NO: 26544 - DNA, 370 bp, Glycine max
  Clone ID: PAT_MRT3847_123970C.1
cttgtgtttttttggggtgagataaaaaacaccttggatcattattcatctagaatttttcaattttatacttacaaaataacacctgtaattattagataaaagggccctatggttaacttgaaaattattcctatcacccctaaaaaaaactaaaggggagggggaggttcttgagtaaagccattctttaatgaactaactattatctatactatatatctcatctaactatgatcaccatatcaatgcctgagcataaaccttttcatgctaggacaggagctcttccaacctttaaggggcaaacgcgacaaaacactccggtgagctaccggacaaccttcccaaagtgaagatacgagctttt

SEQ ID NO: 26545 - DNA, 660 bp, Glycine max
  Clone ID: PAT_MRT3847_123971C.1
ctttacactagtgttcttctgtatcactaatgcctactccttctctgcatacttgcgcttttactacttatgcttcatgttttaattatctacgatcgttactctgacttaaaaagcaaccgctgatcgtgcgggagaccgtatactttgcattggttcaggtcgctacaaaatggatccttccaacagaacacttctgaggatgtcaggtggtcaatattctttttataaaccattgtactaagaactttgctcttacacttgcagatgggctacattccttcccatctgacaattatttaaatgaatacacgctagcgcgacattgtacatcagatgcttttaagacatttaccatggacgaacggatactttcataattgcttcggcttggataacaacctcgactgttgcctgcatagatacacatggatcaactatcagcttcatgactgtgacatcttcaaatgagaaacactatcactcggtgtcgaacctccaatgatgggccgacaagtcctgagcttgacatgatattgagacattgtacacattttctgaatggaagggcattgattcatgtgattatggattccatactaggtgtctatacttgaatagaggactgaggctacaactgccggactattgtaatgtatg

SEQ ID NO: 26546 - DNA, 242 bp, Glycine max
  unsure (1)..(242): unsure at all n locations
  Clone ID: PAT_MRT3847_123972C.1
ttgnatncgacgcatccntggatggtgacagcccgatgattcanctcgngtctcngtttgggactgggatcaccgccacgtggtgtatganttgnaagctggnggagtggntgaacggcgtttgntcngcgccaagttgganaagctcnccganggagnaanagantcaaaagggaagcngacagaaganatttcggggaggaagtgtccatcaggtgnnttnnatnatgatgatgtcacgc

SEQ ID NO: 26547 - DNA, 1160 bp, Glycine max
  Clone ID: PAT_MRT3847_123973C.1
gaattttacagcaggggtatacaatttgaacttcagaagcccccatggaggatccgcaagaagagcctgatccccagaaaccattagtcttgaatccaattcatatcaaagcaccaaagtgttcactgatgactgggagctcaattccccattttctgtcgtctcttcgctttatcaagaacctgaggcaaaattttctgtgcatgatcgtgtgctttcagaccaaattatagaagatgatgatgacgacgacgacgacgatattatgagctcctatgtcattgaactcaactccaacctcagaagggaagagtgtggagaatcagccattgatgaagcaattgcatgggccaaagagaagtttcaatcgcaaagctctgatgaagaatcaagcataagaaacgatggcaaagagcaaactgttggaataggaagctctgatgcaagtgaataccatgacgatggaattggaatagttcaaactcagggagaagcaacagacagaaacagagaagttggacagagatataagattgtggtcatctggcaaggaaacagatattaggctactactttcaacattacatcatattctaaggcctgagagtggctggtatgctattcctcttaagagtctattagaaagctcacaggtgaagaaggcttatcagaaagcaaggttatgcctgcacccagacaaactgcagcaaagaggagcaacactccttcagaagtatgtagcagagaaggctttctcaattcttcaggatgcatgggctgcattcatttccatagatgtttccttctagccagtggatgactctaatcttgataactcagttttgtcttgagatttgtggacaaacaccaagcttgacattcgaaatgtcgggagtgtttgttgttgacaagcagcatatatagctaaatacatgaaacttgacacatcagctcttttgtacaaatagtttactgatggatctgctgttctatttatgtttgtatcataacttcataagctgtttgttgcattggtaggtattatttctgatgtagttaacagaaggtaatttgattggccttagtatttgatttgtatatgatatgaaatggaagcaagagttagtttgtatgtgattcatatggaaacctataaccct

SEQ ID NO: 26548 - DNA, 453 bp, Glycine max
  Clone ID: PAT_MRT3847_123974C.1
ggctcgagccgtttcggttcgagcacttgttccacccttctccaattctcttatctgtattcaggcactcttcaaagaacactttgtgagtcaaaagagacatggccttagaccagtattttgaggaggctatgccccagttggattccttcgaagataaatcgtttctcgaaacatggaaatgtgacagtgacgatatcgcagattctgatagaaatgcctctggtgtctttgattgcaacatctgcctggagtgtgtgcaagatccagtggttactctttgtggccatctctactgctggccctgtatttacaaatggcttaatttcctaagtgcctcttgtgaaaatgaagagaagcaacaatgtccagtatgcaaatcagaaatttcacagtcatcccttgttcccctatcccggccgcggccaaactgagttaccttctaaaggcaaa

SEQ ID NO: 26549 - DNA, 404 bp, Glycine max
  Clone ID: PAT_MRT3847_123975C.1
gatcttttttcttttttttttgtgaaaagaaggaacaagggcagaagatttattaaagccccgtaagaaacaacaagtagggaccgggaggggcttaggggacttaccccccttacctaaagggaccttaacaaacataacctatgctcctatttgaatagggcatattaacgttcccttttacatatagataggagccaacccttactaaattgttgaaagaggggaagggaccacccaatggagtacatgggattaggaagcttaaagggcctgctttcccctctgtgggctccaagcagatcgctccattgggctccaatgattccaacaattctgtatccctgcctcaacagattctctctcattgctgatttgtctgaaagcgcctttggagggataag

SEQ ID NO: 26550 - DNA, 382 bp, Glycine max
  Clone ID: PAT_MRT3847_123976C.1
ccacgcgtccgcacgtgttttctcttccctttgatcttaccttaccgagttttgttcttgcactgtgtttctctcacactatttactctttgttgagctcatcattgtctgatggcgaaaatccgcctcaacctacaggaagtgaagggactgaaagctgcacgctgcagaccatagaatagaggctccaacgcacgcggggtgcttgcatggatttccagagaactggtgcacatggggcaccaaaagagagctggggcaaaagatggaggtagggctattgccttggactccagagggtgtggactctctatgatctcccggggccaccaaaggaacccctgtctgacctaagtcatgacagaacggaggggtttgggta

SEQ ID NO: 26551 - DNA, 414 bp, Glycine max
  unsure (1)..(414): unsure at all n locations
  Clone ID: PAT_MRT3847_123977C.1
cccacgcgtccgccgaaaatagacggaaatggatgggctaatgagatgactccaaaagatctgagtcttttacctagaacagagttcgtgtgtgcactataggacacgtgggttgtaacacaccccctcttgctgatcaatacttcaggtgcccattcgggctgtactgnaacacacaatctaatgtgcacagagcggcactgagcactacttttggggaaaggaaacttaggcttatccgcccaacatacctgatgataccacggatgcgtgctatggatacacacatggccggaccgctgttgggactaacctcacactcattattggtgccatcttagtactcacttctaaaaagggggataatgttatataagaatgaaaaattgggggcggtctttataaatggtgcca

SEQ ID NO: 26552 - DNA, 338 bp, Glycine max
  Clone ID: PAT_MRT3847_123978C.1
cgcgctattaataaggctaaaggagaaaaagaaactgcgggaaattataagaaaaaaaaaaggggcggcccccctggaggagaggcgctcacgaacccatgcatgcaacttgagaaatgtgttattacatcacctgaattcaattgactgaccgatgagaaacatcctcgggacagaaaaaacgatggcgctaccaaactcagccgcactgttgtacatatgggagttaaacagttggggcacgtcacaagttggcaaattcttgacgccctttccaacaaaaaggcacacgctaagttgacaggtacgcaccatgccagactccattaaatgcactg

SEQ ID NO: 26553 - DNA, 506 bp, Glycine max
  Clone ID: PAT_MRT3847_123979C.1
cttgataagattgactctaatcggtcaatcctaacaagctaaatgacgtgggattatgaaggcttgacgctaggatgactatcatccgcactatgatactctacaaattgcctgattcggcggatactcctgcattcaggaaaatagaactaaggagtgtccctgcggttactcggctgcttacgagctacttcaactagattgttgctgcacatgattgttaggaacatgtagctctacattggctactcactaacgagaacgtagtggatagtttcttggtgcatagctctcattatcatgaaaccaccatcttctccagcttctattcactttcttctttcatccttggatataaggtcactcatttttcaaagctagctattcttattataatgtctgcaccataactacactgactgaattgatgaattatgagctgattgtatacatacaaaacgattttgatgttgcactagctaggatgtaatgcacaatgagagttt

SEQ ID NO: 26554 - DNA, 734 bp, Glycine max
  unsure (1)..(734): unsure at all n locations
  Clone ID: PAT_MRT3847_12397C.1
ttttccaattggaccgccataatcaaagcctaaatcaagatatccctaaagccaaccttccaagacacatttcaagtttgcctcctaaagccttnnncttttaactgggcctaaaaagccgttcaaacccaagggcctttcttgngccaaccgaatggggccattacctttaaccaccaacccaatgggtttgggttaatccccttggggcccgtgccaaaggggaaggtttgggtggcctattaaaaccaaaatttgcctaagaagccagaatgggtccaaagggattgngaatgccccagcccttaaattgtntggttaacttaacaaccccgtcttaattcaaaagctaatgggcccgtgccaaacctaccttaaggggaagggaacttggaaattggtgttccaacccaaatgccangaagatggggaatgccaagcccctggaatccgtgttactttaattgcacgcctcatttgatattcaatgcaaaagcctggatttcttgatgtggctattgtctaatgtatgaaaagaaatgcaaaagtggcctttctcctgaccaatttacataccagtgtcatgaatcaactgtcttgngaaatctggtaatttatctgctgccatagctatttgcaaaaggttgatcagggttgtgttcccaatatcgtcacatacaaatatctgattgctttgcaaaagctaagcaggaactaccagacagcattgaaac

SEQ ID NO: 26555 - DNA, 174 bp, Glycine max
  Clone ID: PAT_MRT3847_123980C.1
gctatgcactgtatgtgtaacatttagggtaggttagttgaaccttagggtagatgaaccttagggtagaggacgccggaaaaaatggcggaagcttggtgacggtgagccttccggaagacccgttaggggttcttccggaacttccagaagaagatcttcccggacgcgtgg

SEQ ID NO: 26556 - DNA, 517 bp, Glycine max
  Clone ID: PAT_MRT3847_123981C.1
aattcggctcgagctaaactccaacacagtaactgaaaactttccctgaaacagcacataatatcttgctgccagtgtgcactgcttccacattcagtgttaaaagcctaattccatattcaccactcacttgttcattctacatttagtgtcaaaaagccttttggattaccatacccatttggtgaaagaccccatctttggttgaaagaatgggaagtagcaaacccagatccttcattctccttctatttgtgttcctttgtgtttttgcaacggcacaagaacaacagcaaccaataaaaaccgttgttgttctggtcatggagaaccttccctttgaccacatgctgggttggatgaaagagagtatcaacacactaatcaatggggtcacaggagatgaatgcaacccggttttcaccaaaagtccaagaaaagattcaatttgcttcatcgatgatgcagagttcgtggatccggatccgggtccactgttcgaggatgtgttgcaaca

SEQ ID NO: 26557 - DNA, 308 bp, Glycine max
  Clone ID: PAT_MRT3847_123982C.1
ggatgaaattatgctattcggcacttttagatgtctttgaagaaacagagcaagaaatgagaaagcaagggaaaaacacacttcgtcaaataaaaagactagtccaagcatacattaccgaagcaagatggtttcattgcaaccacacaccaacaatggaggagtacatgcaagttgcgactatgtcatgtggttttgctatgctgacaattgtatctttccttggaatggaagacacaacagaggaggttctcatatgggcgacaagtgacccaaaaattgttgcagcggcttcaattatttctagg

SEQ ID NO: 26558 - DNA, 1900 bp, Glycine max
  unsure (1)..(1900): unsure at all n locations
  Clone ID: PAT_MRT3847_123983C.1
gacgcctattactgtaacatatgcgtcaactcaaccaacaaaacaagcatacatatcatatctttgattcagcttccaaacgcgccattcccatttctctctctctgcttcttcttcagatacctaacctaatctcccaaacaaacaaaccaactcaaccttatcaatatcgtttaaataaattttgatcgcgcacgcgctttgagatagatcatgctgcgtttgtgctacggccctctggattgctgcttcggacgccgtggtgccgacggacttctctggcacaccgacttgaagccccacgcctccggcgacttctccatcgccgtcgcccaggcgaattacagtcttgaggatcagagccaagtcttcacctccccctacgccacctacgtcggcgtctacgacggccacggcggccccgaagcttctcgattcgtcaacaagcgcctcttcccttatttgcacaaattcgccactgagcaaggagggttgtctgtggatgtgataaaaaaggcattcagtgccacagaggaggaattcttgcatttggtgaagctatccttgcccattagtccccagattgcttccgtcggatcctgttgcctttttggtgcaatttctaataatgtgttgtatgttgccaacctcggcgactcgagagctgttcttggcaggagggatacggtgagaaagaacagtccagtggtggcacagcgtttgtcaacagatcataatgtagctgatgaagaggtgagaaaagaagttgaagctctccatcctgatgactcgcacattgtggtttataaccgtggagtttggaggattaagggcattatacaggtgtcaagatctatcggtgacgtgtatttgaagaaacctgatttctaccgagacccggtttttcagcagtttggaaatcctattcctttgaagcgtcctgtaatgacagctgaaccatcaatcattattagggagcttgagtctcaggatttattcttgatatttgcatcagatggcctctgggaacaattaagtgacgaggcagcagttcagatcgttttcaaacatccaagagctggaattgccaagagactggtgagagctgctcttcatgaagctgcaaagaagagagagatgagatacgatgacataaagaaaattgacaaaggaataagacgacacttccatgatgatatcactgtcgttgtaatctatcttgatcaccatgcaggctcctctaatggtagatttaagcaaactgctgttggctatacaactgcccctgttgatattttttcccttaatgcggatgaaggagaaaagcgtatgcttggtacagttgcctaaagagtgaagttgcttcaaaggttcatacactgacattatttgaggcgataattatttatagttgaagattaatattgttggtaaatgaagagaattctcgagaaaatatataaattactgcatagatatagtagctgggagttgctgacagattctttctggtgatatgtatatgtatagttgtgaagtctattttttgggtttgatggtatcagttttgtttttctttggaaagaaagaaaataaaattatattgattgggttagtctcaagttatttctcacttggtaatattcgtcctgaataatggagtatgaggtacgcgttggtgacgtttcaccaactaacaggaattgcaggactggtgagtggatagttttcataagcgcattcttattgccatggtacgtgtgttgattacaaccatgaaatgaaaattctttccaaatgttggttgtgcccatttcccaccgtaacaggcggaaaatttgtgatagaagcttgcaatttagtcatcagacgtgttgattttttttagaggtttgcnnnt

SEQ ID NO: 26559 - DNA, 588 bp, Glycine max
  Clone ID: PAT_MRT3847_123984C.1
ggcctattgtatcgtgatatacgcgtcaactcaagcaacaaaacaagcattacatatcatatcttgaattcggccgaaagaggcgccactcccatttctctctctcattcttcttcagatgccaaacctaacctaacctcccaaacaaactcaaccttatcatcatcatcgtcgtcgtttaaataaattctgatctccacgcacacgctctgagtcagatcatgctgcgtttgtgctacggccctctggattgctgcttccgacgccgccgtgccgacggactcctctggcacaccgacttgaagccccacgcctccggcgacttctccatcgccgtcgcccaggccaattactgtctcgaggatcagagccaagtcttcacctccccctacgccacctacgtcggcgtctacgacggccacggcggccccgaagcttctcgattcgtcaacaagcgcctcttcccttatttgcacaaattcgccactgagcaaggagggttgtctgtggatgtgataaaaaaggcattcagtgccacagaggaggaattcttgcatttggtgaagctatccttgcccattagtcccc

SEQ ID NO: 26560 - DNA, 296 bp, Glycine max
  Clone ID: PAT_MRT3847_123985C.1
cctgagtatgcacttcatggtaaattattaaaaaaggctgatacatacagatgtggaattgtagagctcgaaatcataagtggacaaaagagtactgatgtgagagttgatgaaagagtgaggaagagtagattcttcgacatgcatggagagggcatgagagaggcatgcacttggagatggtggtctacaccctgaatgataactatgatgcatattatgtgaagaatatcatagaaaatgcttggttgtgtactcaaacgttggatgcaatcagaccacctgtgtctgaagta

SEQ ID NO: 26561 - DNA, 453 bp, Glycine max
  Clone ID: PAT_MRT3847_123986C.1
cggaattaccggatcgacccacgcatgcgtacggacgccaggacgacggccacagaatcaaacacgaacacttatagacaattcgatgatatcatatatccttcgataactaagatgcatgcataactttagcgcttaaacattaggatccatatcactgtcaaacagctccacatttgacaagctgataagaaatcatgacaggcgtgattgtaaaagactataacagcgaaagctaagacatcgatcatagaaattggatataatcgaatgaccgtaccaaacttgatatcgtcaaggtataaacaaccttatctagatgatatatgaaaagtgattggattctaggatagcgagattaaaagtggtcaccgaatgcatgattgatctatgacattctgacagatagacttacgtatgatagaatgtatagcatatagctgagttactgat

SEQ ID NO: 26562 - DNA, 370 bp, Glycine max
  Clone ID: PAT_MRT3847_123987C.1
gatggaagctgttggtaagaagaaagaagaaggatattcattatttaaagctggtggatgtgctagagctgttaaaaggatacaagatggctgtaaatattatagagttcgatactggtcatgtagcgaataggagaagatgagctgcaaagccttgaaggttgccgtgtcatctaatcaatgcaacttgctagttggtgattataggattattgatcgatcagagaaattgtgcacataggtactggaccttgagattactaagtcgcaggctatctatagaatggcctgtacatatatccaggtgggtgatttatacttggccgaatttgatattatgaaagcgcttgagattgatcctcacactagg

SEQ ID NO: 26563 - DNA, 119 bp, Glycine max
  Clone ID: PAT_MRT3847_123988C.1
tccacgcgtccgaacacacatacaactttcttgatttggacgcagatttgggcttatggataaacgttttgtcaaatctggatgagctcaccgatcatctagagcgtgtgtgttgctaa

SEQ ID NO: 26564 - DNA, 542 bp, Glycine max
  Clone ID: PAT_MRT3847_123989C.1
ggctcgagaattcatctacacattccagaaaatgcaatctgggtgacgtctttaacagaagttttgatggggtggagaggtggtaatgagagtgtgatatgcaatgagatgctgtactttttagtttattcaactgggggtggtcaatcagaaaaccgtcatgccctagttgcgtataacatgtccaatcattcatctcaaggtagtttaacaaggaacttcattccggtaccttgttctctaacatgtggccgtttgatgaatctgaaggagaagcttgtaatggtgggaggaattggtaaaccagatcgacctgacataataaaaggaattggtatctggcttctaaatgataagaagtgggaagagattgctcgaatgccccacaaattcttccaaggctttggagagttagatgatgtgtttgctagcagcggtgcagatgatctgatatatattcagagttatggagctccggcgcttctcatatttgacgttgaccataaacaatggaaatggtcgcagaagtgccctgtgtcaaa

SEQ ID NO: 26565 - DNA, 605 bp, Glycine max
  Clone ID: PAT_MRT3847_12398C.1
tttttcaaaaggtgcaaggtgggattaaggggtgatcaggaagccaaacattttttgaggattgatttccctgaggaggaggacaattgtggttacatggtattgaagaattttgaaaaactaccttaaggtaacataagggtagaatattgttgttttcaatttggttatggcttttcttcttatgtttcccaaaagggaaggagctacaagttattcaaactatatactatgaatttgaaaaattcattcatgttactcgaaccaaatcgagcaacttctgaaggcataaaggtttcaacagagggacctcagctcaactatatgcagaaacaagaagctaaagattgatctaccattatattttaatgtctttcttttatgttgttcaaatgtcttctttttattccatctctctaccttgtatatttattaatcttttacttgtgaataatacaaaagctcctgtttatttccttgcgttttgtaacattttagatagatgaatactctcatcttaatgttacaggaaaataagggccactcaatttcttgtattattgttgttgttgccttttaataaacatagaagcagctgacagcac

SEQ ID NO: 26566 - DNA, 592 bp, Glycine max
  unsure (1)..(592): unsure at all n locations
  Clone ID: PAT_MRT3847_123990C.1
gttttctttgttctttttcaacccttacataattaatctgtgcaaaattagcatcagattgacccttggctaacttcgttttgatgtattttttcaaaacaaattaacctcagtttgttttgacaggctgcagaattactaaatcatccgcatcttcagccttacattcataaaattcacctaaaattaaatagccccataagaagtacttttccattccaatggccagagtcaaattacataaggagaactcagtttgtagagccagagtctgtttctactctttctgatctagataaatgcttgtcattcaacaatgacaggaccttgaatcctagtatttctggaactgaacaaatttctcagtgttctactgaaagagctgatggattatccacttgttcagaagagaagatctatgaactatctgtaggttgtgttcgtggcaaatacaaaactgacaaatcaaaagccacaaagttctcaaccgttgagagaacaccaagatctagaggagttacagtttctgccactanccaaagggcaacatggcaacatcaaagacaacccattctggtccaagtgattcact

SEQ ID NO: 26567 - DNA, 503 bp, Glycine max
  unsure (1)..(503): unsure at all n locations
  Clone ID: PAT_MRT3847_123991C.1
ggtccggnaattcccgggtcgacccacgcgtccggggggagttatcgttgttagatgagagcaatcaggctaccatttctgtatttgatgaggatgtcgaggttcttgagtcatggaaggaggagtttccttacaatggaggtgttgggattgttgaagattcttcggaagaagggttgttagagagtgcagaaattgatgaaaatgttaaagatacagatactgatggtgatattactgaggaagctgttgaggaatcaagcagtgctgatgatgatagaataaacgaggaagctgctgggctgttgaagttagagttggaagcaaatcaacgcacgcaggagatagagaggattgcagaggaaaaactttctcaagggattaagctggttgtatatcctcctgtgggtaaacctgatcaagatatagaactttttctcaacaagaacctttcaacactaagtgaagagccagacattctgatcatgggggcattcaatgat

SEQ ID NO: 26568 - DNA, 143 bp, Glycine max
  unsure (1)..(143): unsure at all n locations
  Clone ID: PAT_MRT3847_123992C.1
gncttgantccntactttgaacaccccaaattagaanagtgtgttgtgttgtgttnaagnagcngnctaacanagatgtttgggntncttaggnggcantaangggcacaanatcaangatatgtggtgttgatgagcaanaa

SEQ ID NO: 26569 - DNA, 732 bp, Glycine max
  unsure (1)..(732): unsure at all n locations
  Clone ID: PAT_MRT3847_123993C.1
ggaattcatcccattcctaattctaatttctttccactctattcaatttctctgtgtttctgtttcctcattcatcaccatgcttccaaagttcatcataagccccttcaaggtggaatcccaagaagggaagcatgtgaacaagagaagaaaacatgtgagatcatttgagagtaccaacatggacgttggtttgagacttctccctcaaattacaagctcaaagaacacgtcaaatgtcctcttgaaatctgcaatgagaaagacaaaccaacaatccatccctcaagacttttgcttccttaaaacttgcaatctatgcaataagcagctcagtccagacaaagatatttacatgtacaggggagatcaaggcttctgcagtgtagagtgccggaacagacaaatagttttggatgacatgagagaattagagaactctaccaagaaaatcgtagcagcttataggcaatgttctagtgaagcacatagagagacacgccttatacttgaggacctacgaatgcagagacttaaatctagagtataaaccaaatcccttgtataaatataaccactactggaaataatttttgtgaatccttcattttgttcagaattgcttcattaagtaagtatggagcctaattaagatgggagatacgtataggtatactgtgtatgaaacatgttataccgcccgtgttatnnttgagactnnnnaaggaaatc

SEQ ID NO: 26570 - DNA, 158 bp, Glycine max
  Clone ID: PAT_MRT3847_123994C.1
cagtctactagtcatgcggccgcacctttgttctggtctggagggaaggacaagtgtgtggttttatggagtgttcatgatcatataaaaaactttacgcagcagaaacaaggttcaaatgttaaaccgtggctactaaagacgtgggggcaagtaat

SEQ ID NO: 26571 - DNA, 491 bp, Glycine max
  Clone ID: PAT_MRT3847_123995C.1
catccactttccacctttgactgtagccattcacgcttgttcctctcttctttgtccttcctcacacttttctctcttctccctctctctctctctctctaacttttcagttataggattcatctccaatctccatctcttctcagttctctctctattctaagttggtgagtagtttttgagtgaaggagtggctttatctttttgtgggtaaggacacagcagcatgcggtggtggcctagtctttctgttgatgtattccgcaaagggatttcattgaatctgtattgcaaagtgattctgtaatttgtgtggtgtgatttaaaccttttttaatcttctctttaagccgtttccatgggatccaatttcttggttgttcttccttgctacgtccgtcagatcagctgaagggtagcattagcaaacacaaattcatctttctctctaaaaaaaattcgttaattagccttttttatttccttttcta

SEQ ID NO: 26572 - DNA, 2904 bp, Glycine max
  Clone ID: PAT_MRT3847_123996C.1
cccaggctcgagccactatccacctttgactgtagccattcacgcttgttcctctcttctttgtccttcctcacccgcttcaaccttttcactcctctctctctctctctctctctctttctctttctctaacctttcagttatcggattcatctccattctcgatctcttctcagttctctctctattctaagttggtgagtagttttgggtgaaggagaagaaggagtggctttatctttttgtgggtaaggatacagcagcatgcggtggtggcttagtctttctgttgatgtattccgcaaagggatttcgttgaatctgtattgcaaagtgattctgtaatttgtgtgctgtggtctaaacctttcttaatcttctctttaaaccgtttccatgggatccaatttctttgttgttcttccttgctacgtccgtcagatcagctgaagggtagcattagcaaacacaaattcatctttcactctctaaaaaaaatctgttaattagccttttttttttttttccttttctaggagtgttgagttgttcctgtttgtttagaattttaggcatcgtttatttggtttcagtcaaattcaaaacctgttgttgtcgtggaggtgatcagattaataattgtcctaggcaaaagtgtggttcttgcattttgaattgaagagggttgggaaaagtagttatggtgtgccaagcagcgagtcaaacgagatttcgggcattgaaacatgaaaatggaatcgccgggagctccaccattatagttaaagttatagcatgctttcaacctctccgagaatgccaggctgaatatttccgtcatttgctcaaacctgtgacgtaattgttttgccttgattcgtttgggtgggttaaaccggttcttttatttgttttccttgttcgtgaaacaaagtaccttttgtaacaaatagcttttgagttggaatcgtttttcttcaggtgattgttctgattgaatgggaggagattgtggaacctgggcaccacatctagaatcaccaaatttgaatctccttgacactgggaagccggttggtatttctgcagctatgaaccctggctttaatatggtctctagcaatgctacggtgcctgctttcggatcctctacagtgcctcatttgcagttaggacattcctatgaacccagtggttggtcttattgtttgccctgctttccacagggatttgctcctgctctgaacttcaatgctgagggaaaccctcctgctgaccatgtaaaaacttttggggacaaaattggtccctatggtgaatccagttcccttcagaaacaaattcttgttattgatcagacgggtggtcaaacaactattgtttatagctccaggtttggcagtcctggtgagtgccttgcttcttggcattcaaaactgcatggtgctaactatttgagggggaacgaaccttctttcagaagaggtttgaatttgaatttgaacttgaatatgactgagccaactttggctgataaagtagatgggaatccgggaactagcattgaaagtgagatgcatgaagacaccgaagaaattaatgcattgctttactcggacagctatggctattctacccaggatgatgatgatgaagttactagcacagggcactctccgagtacaatgaccactcatgataactgtgaaacctttaggagggataccgcagaagaagttgcaagctctgccaggaaaaccaagaagaggaagctattggatggctattatgatgacatacaactcattgatactgccagttctcagaatctgaacaagtcttctgcaacgggagatgatgacgcagaatcaagatgttctagtaacaacaatgaaggatccttgtctggcaataagaagattaaaaaggagaagatacgcgatgttctgagcattctgcagagcataattcctggtggaaaggataaggatccggtcatgcttcttgacaatgccatacattgcttaaaatccttgaaacacaaggctcaagcactcggacttgatgccttgtaagttggagaattattacccacacagtgttactatttgtcatctaagtagtactttatagtgtaagttctgttgatttgcttgttgttcatacttcatggagtctgcaaaataaacaaggtcatggttgtcaaggaatttgaactcagcaacaaaggtgttacgtgtgaaatactgagtaaagttgtcttttaaagccctttctgagttggaaatatagtcagtgtaacctatgttaagcattgtgtaaggaaagacggaagtgttcagtgtatcaagcgcaataaaggaactatgaatcattattcattagtccgtgtcttagactaaagagaaagtagcactcacaccatagcatggtgagtgaaccattttgaatgagaagggtgtggttggttattccagataagggtcccaaaaacgagtgcacgctgatatggggcccaaacttgcttcctctttttgtatcctagtcatgttagagagaaaatgaagaaatttttttcactggctgtgagagatcgaggtaacttggtgcggttggctcgggcacactcgttcacaagtttccaccgggatagttacagcagtgtagtgtaggacgcatgtgggaaacagatatttgtgttctgagttgtgccctacttactacttttatgggtttgtgttgtgtgtatcgtaattgatgtatgactatggactaatacttaaagaggattggatgatatgtctttggttggatgttatttaatgtgaatggtgttactgttgtctgaaacaatttgatgacactaggaaatcaaggcactaaaagtattaatcttcaatttat

SEQ ID NO: 26573 - DNA, 331 bp, Glycine max
  Clone ID: PAT_MRT3847_123997C.1
attccccaacagaaagaccagcacatgaattgcctaagttgctaccaacagtgcaagaggaatatgtatgcacgcgaggacaacatatgtgaaaaatatatctgacactctttgctacctggctaaccgtgttaatgcaccattgcgataggaactagaataccatcttaagcagggatagactacttgtttgaaatccaacttgcaacacccgatcttatactgttatcacgacttgccaccccgatactgcgatagacactccagttgcatgtggaaagtaactatgaacagatgcaccgatgcttctcatctgccgaatgattttcga

SEQ ID NO: 26574 - DNA, 222 bp, Glycine max
  Clone ID: PAT_MRT3847_123998C.1
gtacaattctcttaaatgtgatgggatcaatcataaataccaaaaaaacaagattttgtgagtctatggtagagctaaatctttgaacatacatagaaacttagtagtttcagaaagaaacatttcagatcaaaatttaggatgttgcttaggctttggtttattaacatttggtaacagaattgtatttgggctgagtagtggattggaattactatttac

SEQ ID NO: 26575 - DNA, 2110 bp, Glycine max
  Clone ID: PAT_MRT3847_123999C.1
cctagtggattcggctcgagctcgagccgattcggctcgagatttatggtttgcatcactattcgttttcccgtgatgtttaatgcgggaccacggcacttacgtctttgccttggtgataatattttccggatctttcatgcatatatttgttctcagtgtgtgctcttttgtgtgcaaacaacaatctcttcccttagtaaaataaaaataaaaatccttctttcttctgaatcttcaatcttgcattgatccatggcagccaaaacatctaccaacggcactcattattctcgctctcgccccgagtacattccaaaccgcatccccgacccgcattatgtccgcatcctggacaccacgcttcgcgacggcgagcaagcccccggagcctccatggtttccagccagaagcttgctcgccagctcgcgaagcttggcgtcgatgtcatcgaaggaggctttccttcagcgtcgcaggaagacttcaatgctgtcaagatgatagcacaagaagttggcaacaactgtgatgctgatggctatgttcccgtcattgccgccctctgtaggtgcaatgagaaggacattgccacagcgtgggaggctctgaaatacgccaagaggccgaggcttatgcctttcatagcagtgagccccattcacatggagtacaagctcaataagactaaagaagaggtgcttcaaatagctaaagatatgatcaaatttgcacgcagtttaggttgcagtgacatccagttctgttccgaagatgcagccagatcggatagagagtttctttatcaaattttggaagaagttatcaaagctggggcaacaactttgggcataggtgacactgtgggcataacaatgccattcgagattagacaattgattgctgatataaaagccaatgtccctggagcagaaaatgttattatttctatgcactgtcataatgatcttggacatgctactgcaaacgcaatagaggctgctcaagctggtgcaatgcaattagaagtaacaattaatgggattggtgaaagggctggtaatgcctcattagaagaggttgtgatggccctaaaatgcaggggagatcaagtcttaggtggtttgtatactggaattaatacaaggcacttattgaagacaagcaagatggtcgaagagttttctggtatgtatttacaaccacacaaagctgttgtaggtgataatgcctttctccatgaaagtggcgttcaccaggctggattgttaaagcatagagctacatatgaaataatgtctcccgaagatattggtcatgaaaagtccagtggagttaatatggtactagggaagctaagtggacgccaagctttgaaaagtcgtctcaaagagcttggctatgaacttagggatgaagaagttgagagtgtgtttaggaacttcacagcaatagccgtggaaaaaaagagagcaaccgatgaacttgttactagagaggttagcacacatgttgcttgtgctgttggtgtaggaccagtagattcagcttacgtgactattaataccatggggtcgtcaaccgtaaatatcaaacttgtcactagtggtggagtcacaggaggcgccgatgcaattgctactacacgtgttgtatttcgtagaaagaataagcagtcacctactcctgctttgaatggaaacgttatttatccaacatttagtggtaccggaggaagagtggatattgctacttcaagtgtaaaggcttatattgctgcactaaacaaaatgctcgattcaaaggaatgatttgtatttgccgaaagaattttagcccctaaatgttagaattcatgttacaagttataaattggcttatcttactgtgatttctttaatgtctttttaagtatagtgaatattattggaaaatgttaactttgtaagtctaaacatgggactaatatatgagaaatgaaattattatttgcttgttacctttgtcaagtctccatataatgtacgagaaatggacttaataatgtcttcttaaaatatgtgaatttcaaatatcaatttcatctgctgaatgagaagaaaaaaccga

SEQ ID NO: 26576 - DNA, 617 bp, Glycine max
  unsure (1)..(617): unsure at all n locations
  Clone ID: PAT_MRT3847_12399C.1
ccacgcgtccgctttgactttagggaatatcaaaaattggtgttagttgtataaaatctatcacatttcaaactggtcgatgacgcaggacaggtcatgaacactggagctgatgcacgcatgcaatgtgcattggaagcactataatggatagaagagcgtatttgagctcggacaattacgagatgccctaactaatgaaacttactcaggaaaagcagaaaaaatattgaaacatgaaattccatgtgtaactatgctactacaagatttattaaaggtgaaatgccaaactctgattaagtntgatgcatttactgtgataacataaataatggataaacgctggacactctaaagattaggacatcgagagaaaaccattaaaaactaacatcgtatcaatgaacaaaaggaagacgatggtaatgatttagagtgctcaaatccaacaaactgagtgaagaacttattagagcaaacgctgacgttgatagcttatatgggagtaaaaatggatactcttcaagtacaacatgtacggtacaggcttaatcagttgcgagtcaggttataccgctctatactcctacctaggatcgataatgacactgatg

SEQ ID NO: 26577 - DNA, 459 bp, Glycine max
  Clone ID: PAT_MRT3847_1239C.1
gtttgaggtaaaattttattagaagagatgaaatttccattggctttcttttctctgagtatattggcatttgctgaagtggcagccgaccgggtcctccttcttatagacaatcccacaattcgggaatcgcactccgtcttcatcaaatccctcgaagagcgtggccactccgctattattgccatggctgatgacccaaacctttcgcttatgaaatttggcgaatatgtctacaaccatttgatcattttcgcaccttcggtggatgacttttgtgggaatataaacgttgacgagatcaccaaattcattgacggtggggggaatgttctcttcgctgcagacaaaaatttgggcgatgcgattcgcgaccttgcaacggaagtgggctatgagttcggcgaggaccaatcgatggtcattgaccaccacaactacaacactgatttggacgat

SEQ ID NO: 26578 - DNA, 420 bp, Glycine max
  Clone ID: PAT_MRT3847_123C.1
acttgatttggttacactacataagatacccttctgaaaaatttgagcagtgtttcttaccgcatttccacttcaaatccacatatatgtcgaacaagtattgcgatttcatataagcattcactttaaggaaaaacagagatgttatctcaagtctcaaacttaatggaaacacaataatcactagcagctaacaacaccaccaaaggatcctgcttttcatctttaaaaataaaaagtctgataataaaataattaataaatgttaaacaaacaagatgatgctgctgaagttccaaatatgaataggatcatgaagtaacactccttaaaaaaaaagaaaaaaaaaaactaaactaaaaacctagatcacatgcttttatgaatctcccaagtactcgattcgattatactacatta

SEQ ID NO: 26579 - DNA, 324 bp, Glycine max
  Clone ID: PAT_MRT3847_124000C.1
aaaggatcattcatcacttcaaccggggcattggcaacactttctggggccaagacaggtcgctctccaagggacaagcgcgtcgtcaaggatgatcttactgagaacgagctttggtggggaaagggttcccctaacatcgagatggacgaacacactttcatggtgaacagagaaagagctgttgattacttgaactcgttggacaaggtcttcgtcaacgaccaattcttgaattgggacacagagaacagaatcaaagtccggattgtctctgccagagcttaccattcagtggtcagtcacaacatgtaattgaaaact

SEQ ID NO: 26580 - DNA, 463 bp, Glycine max
  Clone ID: PAT_MRT3847_124001C.1
gctactgcaaacgcaatagagccttaattgcttttcaggctgctcaagctggtgcaatgcaattagaagtaacaattaatgggattggtgaaagggctggtaatgcctcattagaagaggttgtgatggccctaaaatgcaggggagatcaagtcttaggtggtttgtatactggaattaatacaaggcacttattgaagacaagcaagatggttttatattttcaaactattctatcaattttgggaaactttttcccctttaagttaacttttgtttgattcaattttttaataaaatctttaacaataggtcgaagagttttctggtatgtatttacaaccacacaaagctgttgtaggtgataatgcctttctccatgaaagtggcgttcaccaggctggattggtaaagcatagagctacatatgaaataatgtctgccgaagatattggtcatgaaa

SEQ ID NO: 26581 - DNA, 181 bp, Glycine max
  Clone ID: PAT_MRT3847_124002C.1
tgcacgcgcacgcttgcttaatcttcggatccagctcaagtacttattttgactaattacatggtgatgcttgagttgttctttaagaaaaaaagactttcctttcttttgtttgccatgactaccaagcctaatattgcttcaacatgaccaccaatgataaacatgcattcatcgaact

SEQ ID NO: 26582 - DNA, 323 bp, Glycine max
  unsure (1)..(323): unsure at all n locations
  Clone ID: PAT_MRT3847_124003C.1
tngnncgcangcgtacgtaagctcggaattcggntcgagancnaaanagacacagcactntcnnnaaatnanatnatggcnnaccctaactcgcgattccngatcgaaaccgtannntcgcgatggcgatcttgntgggtgaaattcttnaatggctggagctgtggangaagctgatcaagaagccgnantntcagnnctaggngaaccntaatctggancccgtnnngcgggngctcggtgttggnggctncatggntgcaaggtgntgaggnatcngaanggancngagaaagngtgctgggttggttgnaaangcacnn

SEQ ID NO: 26583 - DNA, 286 bp, Glycine max
  unsure (1)..(286): unsure at all n locations
  Clone ID: PAT_MRT3847_124004C.1
ttcagttctganaggnacacgancagctctcaagactttgaattatggaatcctgcttgcacacaagcactgactatgtgatttaatccaaacccgtgtactgatgcatggagtttggaatctctgaagcgtaccggatctcattgcgatatcatttgcgtcactggatggactgccactccaatgcaggatgttcaggtgacaattgattgggctatttactgtcaggagtgtgctcccaggacctattgtgtgttaaagccacaaactccttttgtgttatata

SEQ ID NO: 26584 - DNA, 889 bp, Glycine max
  Clone ID: PAT_MRT3847_124005C.1
aagggaagagaaaatgcaaactcgaatttatactgattcggccacacccttgtacctacgtccagtctccaagcaacccgcttgagagttccactatcttgtaaaatccttttacaagttttgaacacacaaggacaatcttttctttgtgttcaaaattcttatacaacaagagaccctcgatctcttaatctcctttgagaatttagaaataagagaagaatgaatctctcttaaaagagatagattgtacaatctgagcactcaattaattccttattgaattgcaagtgtattggccaaggaattcttaagaggataaaatgtttttgctctttgagagaataagacttgttgttgttaaaaactctgagcaaattcgtgtttcaagtcacatatatataaacctttggtggccatgtaaaaaccatttgaaaagatgagactcttagaaataattttctgaaaatctcatctggtaatcgattacaggttttaaaatttaaatcaaaacgttttattaactgctggtaatcgattatcaatattgtgtaatcgattacacagtctaaaatttgaattcaaatttttaatagctattgtaaatcatttttggccactggtaatcgattacatcctctgataatcaattaccagagaataaatctcttgaaaaacactttttaacttaaattacttggccaaaccttttgctatatcaattaggaattcccttcctaaaatactagtgatcatcttgatgttgtgtcttgtattcttgaatcattatcttgaatttaaacttgaaaagcgcatttgcatcaaatcatcatgatcatcatcaaagcatcaaagttatttgcttctacatctgaatcggacgcgtggg

SEQ ID NO: 26585 - DNA, 306 bp, Glycine max
  Clone ID: PAT_MRT3847_124006C.1
aaaaggaaaggtgagaaaattgcattgcttgacaaaaaacagttcctatcattatgggaacataaacacattagccccctaaaaccagattaaaaccaccttgcccccaatggttcccttcatttaaacatgaacaagccccttaggaaacaattttaaaggaaagaaaaaaaagcatcatactggtgtcattgcagatgatacaggggcgcatttacttacacgctcattggtagagaggaataaaggtgggaagctcatgacttgtcatgagggatttatagctttaaactttggaatcgaata

SEQ ID NO: 26586 - DNA, 2033 bp, Glycine max
  Clone ID: PAT_MRT3847_124007C.1
ggctcgagacccccaccatcttggtcgttggtgcgggcgatcatggatcatcatcgtcaccctcatcacaccacccctctctccgagcccaccacccccaccacccctcgccccaccctcttcctctccacctccggcaaggccctcctcctctccaactccaacaaatccctcctcctctccaactccagcaaacgcctcgacaccccgaggaaaaaatatgtcaagcaagtcaccggccgccataacgacaccgagctccacctcgccgcgcagcgcggcgacgcggcctccgtccgccagatcctcgccgagatcgactccatcatgatggggagcttcgagttcgacgccgaggttgccagtgtcaggtccgccatctttaatgaggtgaatgagctgggagaaaccgccctcttcaccgcagctgaaaagggccacctcgacgtcgtaaaggagctcctccctcacaccagccacgacgcgctttcctctaaaaaccgctccggctttgacaccttgcacattgccgctagcaaaggtcatcttgccattgtgcaggcgctactagaccatgatcccggtttgattaagacgtttgcgcagtcaaatgcaactcctctaatctctgcggctacacgagggcatgcagatgtcgttgaagagttgttgtctagggatcctactcagttggagatgactaggtccaacgggaaaaatgcgctacatttagctgcacgccagggacatgtgagtgttgtaaagatactactacggaaggatcaacaacttgctcgaaggactgataagaaaggacaaactgcgctacacatggctgtcaaaggggttagttgtgaagtggtgaagctgattcttgctgcggatgcagccattgtcatgcttcctgacaaatttggcaatactgcgttgcatgtagccacaaggaaaaagaggacagagatagtgcatgagctgttacttctacctgacaccaatgtaaataccttgacaagagaccacaagacagctcttgacttggcggaggggcttccaatatcagaggaaattctggagatcaaagagtgtctcattcgttatggtgcagttaaagccaatgatctcaaccaaccaagggacgagctaaggaaaaccatgacacaaatcaagaaagatgtgtattttcaactggaacaagctcgaaaaacaaacaagaacgtgagtgggattgccaatgagctacgaaagctgcacagagctggaatcaacaatgctgcaaactcagtaacggtggttgctgtgctatttgcagcggttgcatttgcagcaatgttcacagttcctggtggggacaatgatcaaggggtggcagtgatggcacacactgcgtctttcaaggccttcttcatatccaatgcaatagcactctttacatcattaagtgtggtggtggttcaaatcacgattgttagaggggagataaaggctgaaagaagggttgtggaggtgatcaacaagatgatgtggttagcctctgtctgcacctctgtttcgttcatttcagcatcttatatagtagttggtcgacgcagccagtgggctgcaatacttgttaccattgtaggggccattgtaatgggtggtgttcttggtaccatgacatactatgtggtgaaatccaaacgctcccgaaggatgaggaggaagaaagggaagttctctaagacaggaacacaatcgtggcgcctttcgagttcggatgattcggaaataaatccaatctatgccatttgatgttacttaatttgggacttcaatgtaagtttgatgcttctgttcaatgcttttgtatttatttatttgtcaagcattgagaaggactcttagcttaatttggaggtttcatttgttcatagagagtggcttttatgtaagtaaaatggttccttgttactcagtgtttcaaagggaacaatataaggaagccaaagtggtcagttacactgtttcttatgaaggttgatttcacatcacac

SEQ ID NO: 26587 - DNA, 842 bp, Glycine max
  Clone ID: PAT_MRT3847_124008C.1
ctccctcgaaacccggccacttcgccatgtccgagcaaccatgcttgccatcgggaaggccacctccgtcgacatctgccgcttcttctccaaacctggcccctacgtgtcctgcgacacgatggagtttctattagcgcgctacgacggcgagctagacgtggatgcggtggactccgaggggaggacgacgatccacgtggtggtgagggaggggcacacgagggttatccggttctgcgtcacgatggggggaaaccctaatcgcgtggattcgaaggggtggaccccactctactacgcagcgtggaaggggcacgtgaaggctgcggagtgtttgttggaatgctccaacgtgaagtgcgtgagggacagggaagggagaagaacattttctgttgtcgcggagagtgagcacgaacattctgttattgacaaagtccagaaagaaacaaagagccgcgctggtttttaattagattggattctggctgtttatgggtattttggtccaattctgctgggggaagaaattgaagtggtgaagactaaagacaaatattgttacgggaacaaacggcgaagagcatgaaggatctggggtaaagtgatcaaaattcaaggctaagtattcattttatgctattcatttagagcattacatcttcattcttctccatcttcctccattttattccacttcctttgtctttttttgtatttgtaagtctttcttgacaatgagaaactaaaccttctattgttgggagctcacccaccaaacactcttgatgtaatgattttaactatctatttaatattatttcgatattattatctca

SEQ ID NO: 26588 - DNA, 260 bp, Glycine max
  Clone ID: PAT_MRT3847_124009C.1
cggctgcgagaagacgacagaagggcttgacataacgttggacatcatgtgcagcaactccagctttccttcattgtctaagtgcttatgttttaacaaaatcttagccaatcttttaaacactcagtagagctaagcactaacagttatgagtgatcagaaagaaatgaatccgaatagagttgtgaactggccattcaggactctatagtgataattttccttctgaaattaattaccgtgaaatgaataacagtgtg

SEQ ID NO: 26589 - DNA, 345 bp, Glycine max
  Clone ID: PAT_MRT3847_12400C.1
ccttgcgtccgcgacttaaaagcgacctcaccattttatagtgattgcaccataaaaaggattgcatacacactcaatgctatcaacagaggaggcggcataaggagcattaaaacatatgaagagccaaagacctggcttaaattctgggtgtaaaccaaaagctacaaaacgcacagcatatgcaggacagccagaacaactatattgccaaggacgtacataacgcttcgatcggaaggagaaagaggaaccaccggatcagcacagaaagaggaaaaagaagcggcacactagccacagttagctgaacaagattatattatacgcacctaagcgggttga

SEQ ID NO: 26590 - DNA, 450 bp, Glycine max
  unsure (1)..(450): unsure at all n locations
  Clone ID: PAT_MRT3847_124010C.1
cccgcacagaaacggaaaaacaaagaaaaagggatanacacaacgcacgccttctggcgaacaaccaaacacagatactacatggtagaagaagcacaaggcgaagaaagccgaaacatcctgcttaaaaccaaataagaacaccatagaagacccacataacaaattatcaagttggaagaacttcaacaacaaaaccaacggttacatatgcgaatacgtcggcgaagaatgctggcaccctggcgagaataaagtgctacatcacaacctcacaaacatgggactgaagggtgagtaaccacgcgaacaacgggattgccctacattgacatccttaaaacctacacacaacgagctcacaggaacccaacccaactgataaatccacaatacacccataagctactaccattgacctctcaaaaaacaagataaatggggaaaaac

SEQ ID NO: 26591 - DNA, 291 bp, Glycine max
  Clone ID: PAT_MRT3847_124011C.1
ggggtcttgtcttatgatcctggagtggggagggggccatggacgatggaagaggacttaatttggatcacctatattgccaatcacggggaaggggttagggactctttggtcaaggctggtgggcttaaacattccggaaagagatgccggctccggtggctaaactaccttcgtgctgatgttagaagagggaatattacactcgacgaacagcttttgatcatgggacttcatgcagagtggggaaacaggtggttcaaaattgccaagcttgtacccggaaggact

SEQ ID NO: 26592 - DNA, 227 bp, Glycine max
  Clone ID: PAT_MRT3847_124012C.1
gttaagcatccgtctaatatcaacagtgaaggtgtgtgtgcctatattttgaaaggcggtctctagggactgacaaacatcacaatacaccagggtatcgatccgtcagactttgagatgcacttgaaatctgagataagctgtgtgtcgtgtggagtgctctcttcaaaggcacatatgttgagtgacaagtactgtaagatcatgacatggattctgggatagat

SEQ ID NO: 26593 - DNA, 498 bp, Glycine max
  Clone ID: PAT_MRT3847_124013C.1
gagaataaacttttttttttggtaaaatcgttagtgggaaatgggttaacaatggaaaaccagtttggggttactacccgctggctgcctttatggggaaacacctaactttttccatgcaaaattaaaggctttccaggggttttaattgtttggatataaaaagggttaatggatcttaactttaaaacctaagggggtcatttaaactagcagcagtaaattttaaaacggaaaaggtccctacttaaaaattttgtaaaggtccttgaaagtttaaaattcattttaagttaaaaaaaattaacacatttactatttttacacaaacggaaatcctttaaatcccattttaagaagggacaagccaggcctagtagtttgggaaagcaaattttcaaaagtaggctatgtaccacccgcacccagggcaaatttagcccgggaaaaaaaagcaatacccgatccgggctgaagcttatcgttgcacccaaaact

SEQ ID NO: 26594 - DNA, 372 bp, Glycine max
  Clone ID: PAT_MRT3847_124014C.1
gttcctccaccaccgaacacacacgccctttcctttcttcatcacctcgcgctaagctggggcccctgcttaaatggcgcgactccttctttatcccattctttcctcagattcggaaaaaaaaagctttccggtgctggggagcctagggttagggtttctgagagatgtgggatgttccatgcattgatgagccttatcgcgcgctgttggaagccgttcgggcacggtgacgacgccgctaatgccgccgccgccgccggaagagaatgcaaggacggcctcctctggttccgcgacatcggaaagttcgccgccggcgatttctccatggccgtcgtccaggccaaccaggtcctcgaggaccagagc

SEQ ID NO: 26595 - DNA, 1370 bp, Glycine max
  unsure (1)..(1370): unsure at all n locations
  Clone ID: PAT_MRT3847_124015C.1
cgggccggaattcccgggtcgacccacgcgtccgctctttcactcttcttgtatgatggagaagatccagcacagtgaggtggaagtgaagggactgaagcttcacgtggcagagattggaagtggctccaaaacagtggtattcttgcatggattcccagagatctggtacacatggaggcaccaaatgatttctgtggcaaacgctggttatagggctattgcctttgatttcagaggctatggactttctcagcaaccagcagagcctgaaaaggaaaccatgtttgatctggttcatgaaattgtaggccttttggatgctttgaacatctccaaggccttccttgttggaaaggattttggtgccattccaggacatcttactactgcagtgcacccagaaagagtagctggtatcataactttaggcattcctttcatgcttccgggtccctctgctgtggagagccaccttcagcttccaaaggctcctacgttattaagtggcaggtgagcctgggagggcagaagcagattttggccgctttgatgttaagtcagttataaggaacatctacacactcttctctggaagtgagataccaatagcaggtgataatcaggaaatcatggacttgtttgacccatctactgccctacctccatggttctctgaggaagaccttgcaacatatgcatcattatatgaaaaatctggattcaaatatgcattgcaggttccttacaggagtattaatgtggatgctggcttaagtgatgtaaaagttactattccatcacttctgatcatgggtgagaaagattatgtgttcaagtttccaggcatggaggactatattcgaagtggggcagtgaaaaattttgtgccggacttggaaatcgtgtatattccagaaggaagccattttgtgcatgaacaaatgccagagaaggtgaaccagttcatcattgagttccttgacaaacaaaatatatgaacgtttgctttcaggctaaaggtttggtgtaataaagtttgattcacgttatttttctttataacccttacagcttgtattatgtcaaattatttgacatggagagatgagagagtatgtatatttgataattggcgtaagcaaatctaaatgatgtggaaaattcaggactctttcgatgctgcttaaaaaaaaaaaaaaaaaaaaaaaaaaaaaaaaaaaaaaaaaaaaaaaaaaaaaaaaaaaaaaaaaaaaaaaaaaaaaaaaaaaaaaaaaaaaaaaaannnnccccaaaaaaaaaaaaaaannnccataaaaaaaaaaaaanngggcccttgggccccccctttttttccctttttggggggg

SEQ ID NO: 26596 - DNA, 143 bp, Glycine max
  Clone ID: PAT_MRT3847_124016C.1
actctcgaggggtctccctttcttttttttttttttataaccaaacgcggatataaaatgagatccaaggtgcaggaggcggggtacatgaatactattagggtgatcgtatgaggataattgaatttccacagtgtttaatt

SEQ ID NO: 26597 - DNA, 420 bp, Glycine max
  Clone ID: PAT_MRT3847_124017C.1
aacccaaataaaaaatgggattacagataaatcctaaaatcccttttgggggcaattaaaacttgatcctgcacagggctcccataaaactgggtaatttggaaataattcaggaaaattttctacagttaaagccttttaaaaaaaaaaaacccttttttaaaaaaaaaaaaacccaaagaaaattttttttgaggacggggattcatcccgcctttacaggttaattacctttttactttgggcactaaaaaaaaggccctaaattttttttaggggtgccaaaactttggaggggggggtacaaaccttccaaaatgaggcaacccttcctttaaaaaaagggccccaacccccacaattttttaaaaattcaagccgcctggaataaaaaaaaccctaggccctcaacaagaaggg

SEQ ID NO: 26598 - DNA, 205 bp, Glycine max
  Clone ID: PAT_MRT3847_124018C.1
aaatcaataagatcagaaaataaaccaaagtgccgctctaaaggatggacgctcaataagatccacacttacgtgtgcgtgccttcaacagcataaccctactataatgcaacggaaattcaattcaacggccgtcattttgaactctcttgcatgagaaaacctagccgctgctcatcttaccccccttgcatcacatgcccct

SEQ ID NO: 26599 - DNA, 1387 bp, Glycine max
  Clone ID: PAT_MRT3847_124019C.1
gaaccacgcgcccggtttaaatatgatattgctctttctctgtactctattttctcccaccgtcacacatggctacggctgcgtaggataacatctaacaaacctagcgcacgatagtcttccttcacccatgcttggagtactctgcgccactcgccccaaaccttcgcttctctctacctcatccaacctcctagaacccttttctctccggccgcgctgccgcctccatttcgccggctatcttgccccgaggtgatgctgcaccaccgtccggccttgctgtcgtcctcgacttcaaggccgccccatcgcggactttcccccgggacccacgttcggcactgcggctgcaccgccccgcttccgcgtggctactctttcgtgccccggattgtccgccgccttcgcccggttgcctgtgtactgatacttgttttgctgggatcgtgatcgttgaaggtcgcaagggactcgagatcggaacggtggcgcatggggcccgagtccgtcaaagagtgctttggggtccgtgcttgtcgtgggtctccgttgacgtcaatggttcatggcgcttgctttagagatggggaaaaggtgacagaagagcatatgcaaaggcaatagtctgaagtaatcacagtttaggtcgtagatgagctgctgaaaaggcgggaggaaacagaatggtttatagaaggggatttcgatacatatctgcagagaattcaacagccttatgtatggggtggagaaccagagctattgatggcttctcatgttttgaagacaccaatttctgttttcatgagagacacaggctcggttgaattggtaaacatagcaaaatatggtgaagaatacaggaacgataaggacatttccatcaatgtgctatttcatgggtatggtcactatgacatactagagaccttacgaccataattacctgaaaaatgaaaataaacacttagtacagcacaaaactcacttgccttgatggtgcaatttaagacttctcgcgtaaagagctttttgaggggtcattttgggagtgtttcagtgaatttagtaactttttgcaactgtagttcagttgcaattcaatttacgcaagatgctgctggtggaatttttgtagtttgtttgttttcatctgatgttaagatgtcgttataccacaattatcataggaagaaaatgataataatttgcttcaataatttgggatttgggattggcattagcaagtgaagtgttgattttacttaactatatattttgataaacgatgaaaaagagaaggaaaggttctgtaatcattttaatctttatagagttccttaacattaggaattaaaaaaaaaaaaaaaaaactcgagactag

SEQ ID NO: 26600 - DNA, 429 bp, Glycine max
  Clone ID: PAT_MRT3847_12401C.1
atcagcgtcgaggccgcctccatcaccggatgggagaagtacgcccacttctcgatcggcatggtcaccttcggatcctccgcccctcccgatgatgtgttcaagaagttcggtttcactgtggaccaggtatccgagcgtgtcaccaagttcatcgacaccgccaaggcccagtccgccgagattggtctaccgttctccgccggactcctgcctacccacttcgacctgcctcatgctgccaagcccctcatcgccggccacaccctcaagaacggcggccagcattaagcgttcgaatcgcgggagtaggcgagcctgctgagcgtgtgagtccacctgcgtgtaagcccacctgagagtgtggcttgtgttgttgtggttgtcttgtcctgaactgccctcgcttgttctgaacaaaacgcgatg

SEQ ID NO: 26601 - DNA, 976 bp, Glycine max
  Clone ID: PAT_MRT3847_124020C.1
catgttttaaagacaccaatttctgttttcatgaaagacacaggctcggttgatttggtaaacatagcaaaatatggtgaagaatacaggaacgataaggagatttccatcaatgtgctatttcatgggtatggtcactacgacatactagagaccttatgatatgaccataattacacctgaaaattgaaaataagcacttagtacagcacaaaacttacttgccttgatggtgcagtttaagacttctcaagtaaagagcttttttgaggggtcattttaggagtgtttcagtgaatttagtaactttttgcaactgtagttcagctgcagggaacttccattcgattcaacatgctgctggtggaatttttgtagtttgtttgttgtcatctgatgttaagaagtcaatataccacaattatcataggaagaaaatgatgataatttgctacaatagtaatttgggatttgtgattggcattagcaagtgaaacgtggattttacagggcattgattttacttgactatatattttgatgaaagatgaaaagagaaggaaaggttctgtaatcattttaatatttgtatagtttcttaacattaggaattatcatgtgatcgtacaaaatctttaatttttcattcttgatgaacattttaaaattctccaaatttggaggatttttatatagttgttacttgcaattactctcacgttcaagtgaggaggtactcaataagagtgtgaaaggaagatagcatacctaataaggagaaaggttatggtattgtatattggcttaggagcacagcaagtgaggttaggtgagttggtcaaagaagtatagatgtgatcgagattttcgggagtgtcaatttagggatgcaaatttggagtaccaaataccaatgttactcaccaaatctggatatggaatgccaatatcaagatactacttatggggtggactg

SEQ ID NO: 26602 - DNA, 405 bp, Glycine max
  Clone ID: PAT_MRT3847_124021C.1
ttatatctacatatttaaatatttttttttgcggaaatcgcttacaagtatatatatcgcgccgggggtgtcaattcctcctaccttgataacatcattctcatatattatcctaagaaagtataaattcatatccaatgacctatacaatgcccttccatttaaaatgaccaaaggttcaacacattttccaactaatgaaatttgcaacacctttaaccttccctttgaccaccaattaggaatatttgcagatgcttcattcaccatttttacgagagttaccacactttctggaacaccgggtggaggcaaagtcagattcttaggggaagcacaccttataataagatcttttatcaaaactccattctccaatctttccataagttagctcacccttaa

SEQ ID NO: 26603 - DNA, 336 bp, Glycine max
  unsure (1)..(336): unsure at all n locations
  Clone ID: PAT_MRT3847_124022C.1
tacaccgaactattatacatctattaangacattcttttatcgacctcacagttctcctttgctaagtttatcacaaaggggcgggccgcttcccacattttttccccttttactgtcttaatatacatgacttactcccccaccccttatactcatctttcacatttccttcacttttatcaacctttaaaaacccaactcacacatattttgtcacctttttcttcttagactcatgaaacgtataattaccttccagtccatgataattcaactttcacccatgaagtattataccctctactgaacacatgtgattcttcctttcctatctt

SEQ ID NO: 26604 - DNA, 340 bp, Glycine max
  Clone ID: PAT_MRT3847_124023C.1
aaacacagtgtggggattattccagcttttttgctactccccctaagattcacattccttcctttgccctcccttttttggccaattcagtacttattcagcctttgttagagggcgagctgaagaacaaaaataatccttcacatttctacagagctgtacagagtgctttcatacatcttatctcagcagagacccacaagaaccctgcgaagaaggctgcaggcagttggttcaagcccatgtcacctggctccaaactcactgttattctacaatcctacgtaccaatagaatctacttcccatcaattatcttatttactcatcgcaacaactct

SEQ ID NO: 26605 - DNA, 555 bp, Glycine max
  Clone ID: PAT_MRT3847_124024C.1
ctgatttttgttgctgtactttatcatactgggaggtcgatgcaggtgcacatgttgagggatagggtggtgaacacattacaggagtgagtaggtatgcgcttgttaacgctgccatttataccctgggtgaagtaggggatacagcagggaaatgagttgcacacatgtgccaaagaaaggaggggcattcgggctcattgatgggttgcatgctgtgctactgactaggcttggatacaagactcctatacaggctgactacctgcccaactagcatgccatactatgtgttggagttaaggactatggcccttggaggctggtatcttgaggagcacactgctcatcttatccagtcggatcatgatactagaggttattatcgagcaccaggagcatttctatacatgattgcaggataggacatgtgacctggtgatattgattataagcaagaccgcgtactgcttgatgagaaaactggaatagtcaccaggtggagagcccacaggcacttgaggcgtaagaaggtcccttactgtgagctgccct

SEQ ID NO: 26606 - DNA, 256 bp, Glycine max
  Clone ID: PAT_MRT3847_124025C.1
gataagatcgcgcggttgatcacagtggtgtggtgctcggtggcggtgctactgtgcgccgctgcgggcgcgtcgtgggtggaggagacgacgaatccggtacgaatggtgtcgggtgtgcaggcggaggtagatcgggttctagggcagtgccggcgcgcgctggggtttgctaggttcatgagcaggttcagggaagagttagcgaagcgacatcgagatgagggataggtactcgatattctcgcgaaacctc

SEQ ID NO: 26607 - DNA, 208 bp, Glycine max
  Clone ID: PAT_MRT3847_124026C.1
ggctcatcgaattaaccacgactattactatctgttcaagatcgttttgatcggagactcacgtttatgctaattccaacatcctttccaggtatcactagaaacaagtttttgtttggagtccaattccactttgggagttgagttcgccaccagaatccttcaggtcgatggttaaactgttaaatctcagattttggacacttct

SEQ ID NO: 26608 - DNA, 3681 bp, Glycine max
  Clone ID: PAT_MRT3847_124027C.1
cacaaataagtgctatattcttgattgtgggtttgaagtgtttgtctggttgggaagaaatcgctcccttgatgaaagaaaaagcgtgtttgaagctgcacaagagagggacggacgcaatgcccacatgaaactccacatgattcgtgtaagagtaggatgtgaaacggtggcgggattttccaaatctaaatcttggcctcaaacaactgatgtaaggctctgtgtagatggacgtggcgaattagctgcaatgctaaaacgaatatgagtaaataagaaggggttgttgaaagctgattgattgagggaaaaacccctaccccatattgattgcaaaggaaatttgcaggtttggaaactgaatggcccagagaagattcttcttcaagcttctgatcaatcaaaattttatagtggagattgcttcatctttcagtatacatatcctggagaggataaagaagattgtcttataggaacgtggattggaaagaatagtgttgaggaagaacgagcttcagctaattcattggcaagcaaaatggttgagtcaatgaagtttcttgcttcccaggctcgtatatatgaaggcaatgaaccaattcaatttcattctatccttcaaagttccattgatatttaacgtgtgtgaaaagtgggagtgatcccgtattggataaacccagaaagtgatcatgagcatcttatggggaaaggtgtagtattatgccagatccagagctccagactacacattgtagaaggcttatcagttaagatagttttattgtcctaggcttccctttagtatttaatactctagaagatccttacctattctcttgtcattggaagctttaaaactgacaagtaacagagatatacaactattctcaggatgttttgatagctgaagatatattcatctcggaatgtcactcggtaatctttgttagggtttgccagcaggttgactctcaagagtgaaaagccgggtcaaacaattcgtgaaaagtttgttgagcatgattttcttctagaaaagttatctcatgtagctccagtatatgttgtcatagaagggagtgagccacctttcttcacgcgcttctttaaatgggattctgcaaaatcgacaatgctgggaaactcatttcaaaggaacctgacaatagtgaaaagtgggggtgctccagttttggataaacccaaacggagaacaccagtatcttatgggggaaggtcgagtagtgtgccagataaatcctcccagcgttcctcccgcagcatgtctgtcagtcctgatcgtgttcgagtgaggggccggtctccagcctttaatgccctagcagctaattttgagaaccctaatgctaggaacctttcaaccccgcctccagtaattagaaagctgtatccaaaatctgtgacaccagattctgcaatactggcgccaaaatctgcagccatagctgcacttagtattttcttttgaacagctgctctcagcacgggtaactatgatacgagagtctattaaagtgaggggagtagtgcgaaaatcataccctgtaaaaaatcacagcgtgaatttcgcagtatgtctgtcagtctttattgtgttcgtgggaggtgccggtctccatcattttatgctttagcagataattttgattaccctaattctaggacttttaaaaccccacctccagtaattagaaagctgtagcgtaaatatgcgacagactaatctgcaatattggcggtttaatcatctgccatagatgtacttagttcttcttttgaacaaccaccaacagcacgagaaaccatgatacctcgctcacttaaagtgagtccagtaatgcccaaatcaaaccctgagaaaaatgacaaggagaattctgtgagcaccagagtggaatctcttaccatacaggaagatgtgaaagaggatgaagttgaagatgaggaaggtcttgtgatttacccatatgaacgccttaaaataatgtccacagatcctgtaccaaatattgatgtgactaagcgagagacttatctatcatgttcggagttcaaagagaaatttgggatgtccaaggatgccttttacaagttacccaaatggaaaaatttttatttttatattttggggactcatgttagtcttcattttatttttttaatttaaaattgttttggtaaagcaatttgggttgcaaatgcggtctacttaggttgtattgatattgaggataaagtgtgtacagtgagtgtaacaatcagtcaactcgtaatttgttttggaaataagtgtgattctatgttgtcaacatcactttgcaatgaattgaatgtttagcgaaaaatatttaaagagataaatgcatgacaataaattatttttatagggcagagtttgtttgtgagcttgcttttttatttttattttcattttttggggtctcatgttagtcttcattttattttttaatttaaaatttgttttggtaaagcaatttggcttgcaaatgcggtctacttaggttgtattgatattgaggatgaagtgtgtacagtgagtgtaacaatcagtcaactcaaaatggctgttcagttattctgattcttgaaagttttcttagccttctgtcagctccctgcagttaggttgcagtgaggaactaaacatgtggaagtaaaagggacagcatcagtgttttttttagcatagctgcatctgctcccaagaaacttttcatgaagagaaactagagattttctacctctacccatctctttgcaatggtttgaatgtttagcgttatttctttgatgagttagctgcgtggcattaatttttttatagggcagagtttgtttgtgagcttgcttttttatttttattttcattttttggggtctcatgttagtcttcattttattttttaatttaaaatttgttttggtaaagcaatttggcttgcaaatgcggtctacttaggttgtattgatattgaggatgaagtgtgtacagtgagtgtaacaatcagtcaactcgtaatttgttttggaaataaagtgtgattctttgttgtcaatttcaaaaaaaaaaaaaaaaagtaaaaatggctgttcagttattctgattcttgaaagttttcttatcgttctgtcagctccctgcagtttaggttgcagtgaggaactaaacatgtggaagtaaaagggacagcatcagtgttttttttagcatagctgcatctgctcccaagaaacttttcctgaagagaaactggagattttccacctctacccgtctctttacaatggtttgaatgtttagggttatttctttgatgagttaactgcgtggcattaattttatttatagggcagagtttgtttgtgagcttgcttttaattttttatttttatattttggggactcatgttagtcttcattttatttttttaatttaaaattgttttggtaaagcaatttgggttgcaaatgcggtctacttaggttgtattgatattgaggatgaagtgtgtacagtgagtgtaacaatcagtcaactcgtaatttgttttggaaattctatgttgtcaattgcactttcgagctaagtttcccctagatgaataatattgatatgtatcaagttagtc

SEQ ID NO: 26609 - DNA, 166 bp, Glycine max
  Clone ID: PAT_MRT3847_124028C.1
aaagaatgagaggtgagagcctgactaccacagctgaacatttcaatttgatctatcaactctgcatcatgggtcaaacacatctgatcatggtattcatgatcgtataaaaaaaattggaagaagacagattccatatatggtgctgctcgaagagagacaatag

SEQ ID NO: 26610 - DNA, 1928 bp, Glycine max
  Clone ID: PAT_MRT3847_124029C.1
aagactacagatcgaggcggcttataggaacatggattggcaagaatagtgttgaggaagaacgagcttcagctaattcattggcaagcaaaatggttgagtcaatgaagtttcttgcttcccaggctcgtatatatgaaggcaacgaaccaattcaatttcattctatccttcaaagtttcattgtttttaagggtgggcttagtgaaggatataagacttacattgcacaaaaggaaattcctgatgatacatacaatgagaatggtgttgcattattctgcatccagggctctggaccagacaatatgcaagccatacaagttgaacccgttgcatcttccttgaattcctcttattgttacatacttcataatgggcctgctgtctttacttggtctggaaactctacaagtgcagaaaaccaggaacttgttgagaggatgctggatttgataaagccaaatttacaatccaaaccacaaagggaaggttctgaatctgaacagttttgggattttttatgaggaaaatcagaatatcccagtcaaaagattcttagagagcctgaaagtgttttcttccaccgcctgactgagcaacatgcaggaaatttaaaggtgacagaggtatacaacttctcccaggatgatttgatgacagaagatattttcatcttggattgtcactcggaaatctttgtctgggttggccagcaggttgactccaagagtagaatgcaggctctaacaattggtgagaaatttcttgagcatgattttcttctagaaaagttatctcgtgtagctccagtatatgttgtcatggaagggagtgagccacctttcttcacacgcttctttaaatgggattctgcaaaatcttcaatgctgggaaactcatttcaaaggaagctgacaattgtgaaaagtgggggtgctccagttttggataaacccaaacggagaacatcagcatcttatgggggaaggtcgagtagtgtgccagataaatcctcccagcgttcctctcgcagcatgtctgtcagtcctgatcgtgttcgtgtgagggggcggtctccagcctttaatgctctagcagctaattttgagaaccctaattctaggaacctttcaaccccacctccagtaattagaaagctgtatcctaaatctgtgacaacagattctgcaatactggcgccaaaatcttctgccatagctgcacttagttcttcttttgaacaaccaccttcagcacgagaaaccatgatacctcgctcacttaaagtgagtccagtaatgcccaaatcaaaccctgagaaaaatgacaaggagaattctgtgagcaccagagtggaatctcttaccatacaggaagatgtgaaagaggatgaaattgaagatgaggaaggtcttgtgatttacccatatgaacgccttaaaataatgtccacagatcctgtaccaaatattgatgtgactaagcgagagacttatctatcatctgcggagttcaaagagaaatttgggatgtccaaggatgccttttacaagttacccaaatggaaacaaaacaaactcaaaatggctgttcagttattctgattcttgaaagttttcttagccttctgtcagctccctgcagttaggttgcagtgaggaactaaacatgtggaagtaaaagggacagcatcagtgttttttttagcatagctgcatctgctcccaagaaacttttcatgaagagaaactagagattttctacctctacccatctctttgcaatggcttgaatgtttagcgttatttctttgatgagttagctgcgtggcattaatttttttatagggcagagtttgtttgtgagcttgcttttttatttttattttcattttttggggtctcatgttagtcctcattttattt

SEQ ID NO: 26611 - DNA, 279 bp, Glycine max
  Clone ID: PAT_MRT3847_12402C.1
cggtgtgttctatacattcttttctctctttatttttttttgttataaattacattcccttttctctttgttgcttttttcttttctggggaaaaacccacaacccagcacgggggcggggccccccaaaaacagacccattgtttgaggcccccattgcggatataccctccccagcgtcgagagtacgtatcttttgtgtagggaccccaaaactgaagctaccgcgcccttgtgatacacgaactgaccgggaaccccctggcgagcccacaaaca

SEQ ID NO: 26612 - DNA, 392 bp, Glycine max
  Clone ID: PAT_MRT3847_124030C.1
ggagcagacaaagactatatctaaattcatctggtaggagacaaggtagtgaaattgttatttttgtctacctggagtccatatagcaagaagatatttgcctggatcatcaggctctcgtgtgtcccactgtaatgcacaaataattaataaaagatgaacatacagggtaaagcatagctttgattaatagatacatcaatttactaaccccttgtagaagaggatgcgtatctgggagttcataactgtacaagagtaaacacaatcaacataaattgttagaaatttcccctacgttagcatggtggttgtgatgtctgctaaactctctggttttattacatgcaagattcttttacactcatatttgaatattggtggatttataa

SEQ ID NO: 26613 - DNA, 155 bp, Glycine max
  Clone ID: PAT_MRT3847_124031C.1
gatacttctactactatacgatcctttgattactcactccaataagtacttacatctatgggacttcaccaaaggcctaaatacatcggttcttattcagttctttcattaatattcaactgtactcatttacttttcaactgatacttattcta

SEQ ID NO: 26614 - DNA, 262 bp, Glycine max
  Clone ID: PAT_MRT3847_124032C.1
cagagtttaaaattttaatgccactctcttccaaggcagtggcattaaaattttaaactctgaagaaaccttctcacttgacgcctaagaactccaaaccaattgctttcggtgtcaaaccaagctgagacaagtattcagcatcatagaattttaatgccactgccttggaagagagtggccacctagaagttagaactgagggtgttgtagttattgatatagaagatattacacttactaatacaatgttttggggata

SEQ ID NO: 26615 - DNA, 372 bp, Glycine max
  Clone ID: PAT_MRT3847_124033C.1
tcggttttgggccttctaatttccaactttcaattttcctataacccaaagccaaataggaccaggctctaatacccagtgattgagttctggtaacagagttcaattgaaatttgaaacatgtattggcttcaaggagacaccctcggactatgaagcttcactaccgttagtttagcgattccgtctactaatccgtatcagtttccagatgtaaccatcgttaagttcgctgaggctcaaaccttgtgctgtcttataaacgagaaacacatgctggatcgtctaagttcgtcgtatactatgataattcgctgcttccgagactacttcagtttttagaaccgcgttaattactacagtttgttccta

SEQ ID NO: 26616 - DNA, 455 bp, Glycine max
  Clone ID: PAT_MRT3847_124034C.1
tacggctgcgagaagacgacagaagggaatatagtctacatccacagacgttggaggaatttgctgcaactcagtaggcccctaactgggaggttagaagtggatgtgttttaatttatatttcaatttaaatatatttcatttcaattcattacatttaaataatatatgttgcatgacagggaataaggaaaaaggcacaagaaattcaaaaacacaatgactgccctcatctattatctcgtggggattatgatttgattgaaaacaagctattagacgagaaaaggaagagattacaagaagaggcatgtgatgtgaagtggaagttggcccgcacaaagtgatataggaaaatgacatctcaagctgcacaagatatatgtgataaaattatgagttaatgattaacatttaatttcatttttttgtcctaattatatgaacaacttgat

SEQ ID NO: 26617 - DNA, 594 bp, Glycine max
  unsure (1)..(594): unsure at all n locations
  Clone ID: PAT_MRT3847_124035C.1
gccaattatacaaactggtctaagtagtgaatcaaaggggtcagagtgtgtggggtggttggataagcaaagtccaaactcggttttgtatgtctcctttagctttacccaggaatcattccaattaccactacaccaacatcctttttagcaaccattcttccttaagtcctaccctaaccacacacacactctctctctctctataataatggaaaccactcaccgttctagctttcatctgtcactgcccaggttgctctcttctcggtcttccctttccagcaacacccccacttttctcaggcaatctttctttccctgcatgatataataaatatatataatatccttttcatttttctaattaatatcactctcaaatcaaatcaaatatcaaatatatattataaaaagaaaaccctagcctattccctggaagaacaacaacaagttttcactagcaaagtagcaaagtcaaaccaatctcatcaggctcagcaagatctaaagcagatccaagggtttaaaagaggatcatatcagatccatgnngatttggtttcggaatcaacaaacgctgtttcaaacccc

SEQ ID NO: 26618 - DNA, 601 bp, Glycine max
  Clone ID: PAT_MRT3847_124036C.1
tgaaagctaaagatgaaccgaattcatatctaacatctaaatcatagtcatcttcatcatcttccacttcaacttttcaccaaggagacaattccttcttggacacaaaaggggtggtatcaaccgtggctcgaccttcaaacacaacatcatcatcaccttcttcttcttcttactcacacaagatcaaagtcaaacacagtaggaaccgtgtccttggacagtggagtggactcatgaaaccctgttgacccaattgagtatttcgattgtgacaagaaaacaatgccaaggtagttatcacgtgtgcacacataagcattggcacgagtaggggcactaagaaagggacaataacaaagcttgtgaagacaagtgtggaactgaaacgggaaactcaacaaaaggggcatatcaatatactactacgaaggaacctccaaggatgaaacaacaaagcatgacgcaatatatgaaacgttaagaattacacaaaaaataaaaactttgagaaatggagaaagaagaaagcgccagaaggcagaagcgaagaggactaaggcagaactgagcggacgcgtgggttagaaccgaggaattc

SEQ ID NO: 26619 - DNA, 379 bp, Glycine max
  Clone ID: PAT_MRT3847_124037C.1
cgcgaagagtcgagggttgccgttgatttggaatctgtggcgacgcacgagataggtcacgtgcttgggttgggtcactcttcggtgaaggaagcggtcatgtacccgagcctcagccccaggagaaagaaggttgacttgagaattgatgacgtggcaggagtccaagctctttacggctctaacccaaactttacttttagttctttgttgcagtctcagaattcattaaacgctgccgttgggttggaaaccggtttctataaatggaccctcactttacctcttgccttcttcctattatttttaagtgcttgattatttttttttatacatgtattttcattctttgatcatatattatatgtcaaacccccaa

SEQ ID NO: 26620 - DNA, 181 bp, Glycine max
  Clone ID: PAT_MRT3847_124038C.1
cgatatttaaattaagacatttattaacaagagcttgcagatggtaaacttattaaaaaaagtcattataaaattgtattacctattaaaaatggccttataaatgtcaacttgactggatataaaacatttacaaatctttaaaggcgtattcagagaaaccaagcctccattcatggca

SEQ ID NO: 26621 - DNA, 886 bp, Glycine max
  Clone ID: PAT_MRT3847_124039C.1
ccacgcgtccgagactaacaccaacacaaactaaattaccaaatattcatcttcatattttatatatatatgtatgattaatcaaatattgtataggttgatagtatataaattttttacattatcgaataattacaatttatcatttaaggtaaaaaaaattattttatactaatctacataaaagacatacaataaaaatatcttatttagtatttttatgtaaaagtcattgacatgagtaattaagtacttgggtcttttattcaaggtctagccttcaattcctaatctatttttaaaaagaaataattcctaattagggtgtataattgtaattgaatatactattttacttgaaaatatctttgtttgcctcaaccccaaaggcgaaaagaaaggccctactacgcttttgtgtgcctctcaaacaccattctcctatatcgcacatatatatctttgttttccctttggtgtgggctccccctctcgttcatttccttccatcaatcaccactctttcattcaattcttctcccaaatcaaaccacattatacccattacacattcttcttcttcttcttggtattattattgatgataacattgtcattctcatattatatatacatatatatatatattataaaaacacaacattttgatgatggcgaggaggatgatgcaatggaacaccatcaccaatgctacggtgttgcagaccattcacttcttcaacccagatcacttccttagcaaaacaatgagtgtcggatctggaggcataaatctatggggattagaaccagaatacaagttacttctacccaaagtgctcaagtatcataagcattcggttgctgcccttcaccttacaactga

SEQ ID NO: 26622 - DNA, 558 bp, Glycine max
  Clone ID: PAT_MRT3847_12403C.1
actcgttgatgttcacttgccaaatatggatggctatgaattccttaagcatatcaataaggaaattgatatccctgtcatcatcatgtctgttgatggttctacgagtgctgtgaggaaggctattacacatggggcatgtgattattggaccaagcctttcagtgagaaccaattcaagattatgtggaagcatgttgctatgaaagcctggaatgaaaagaagctacaaaaaaaagatttttctgaatttgcttcttctgttcttgatgcaaacttgaaggaccaaaaagagatcagttccaattccaaagaatctgatgttgatgattgtgatgcacaaccaaagaagccccgtatagcatggaaaggagaactgcattgccaatttgtcaaggcagtgatgcatattgggcttgacaaggcacagccaaagaagattcttgaagtgatgaacattcctggtttgacaaaagaccatgttgccagtcatttgcagaaatatagatttgatttgaagaaatctaatgaagtggctgtgcaacagaatgagatgca

SEQ ID NO: 26623 - DNA, 1088 bp, Glycine max
  Clone ID: PAT_MRT3847_124040C.1
ccacgcgtccgctgttttccaaaaccctaatttctcgaaggtagggttttgcagagcctcgtcctcctctcacggtttcttctttttatcttctcacctttcttcttccactgctctaatctaagatgggcaagtcaagcaagaaatcagctctcaaggtcgacgctgttccagctgtggttccgccatccaaaagacgcaagaagggaggcaagagacaagctcaagatgaaattgagaagcaattgagtgccaaaaaacagaagataaatgaggttgctcagaaacaaaaggaggcaaaggtgcaaaagaaggaaagtagttcagatgattcttcttcagaatctgaagatgagaaacctgcacccaaatctgctgttctttcaaaaaagatacctgctaagaatggtgctgcccctccaaagaaaggcaagctcgcctccagttcttctgaagatgactcctctgatgaggatggtgtgcgtgcaaagaagccacagaaaatggttgctgagaaacaaaagaatggagcaactgtgcaaaagaaaaaggtggaaagtagttcagatgattcttcttcagaatctgaagctgagaaacctgcagtaaaagctactgtaccttcaaaaaagacacctactaaaaatggcaatttaagtaccccagcaaagaaaggcaaggcagctagcagctccagttcttctgattcatctgaagatgactcttctgatgaggatgaagtggctacaaaaaagcaaacaaaagaagtgaaagtgcaaaagggtaaggaggaaagtagttcagatgattcttcatccgaatctgaagatgagaaacccgcagcaaaagttgctgttcctccaaaaaatcaatctgccaaaaatggtactctaagtactccagctgagaaaggcaagccagctgccagttcaagctcatctgaatcatctgatgatgactctgatgaggatgaagctccaaaatccaaggtggcccctgcagcaggcaagaatgtacctgcttctacaaagataactcagccaagtgaaagctctgagtctgattctgatagcagctctgatgaggac

SEQ ID NO: 26624 - DNA, 295 bp, Glycine max
  Clone ID: PAT_MRT3847_124041C.1
gcaccagagtgctcacccctcttggtgacagaatgaatgaagatgcaatggacttgattttccaatgggggatcgacgcgtttccttttaggaaaattgatggtattgatcttactctaaaatggaagtggttttgggacgctccaaaaaaaccaaatcttggattccaccaggtaactggggacaggtcctttttcatctctggaggtgctgacaaaaagtggatccaagacttcgcagtggcagtggagaaaacaagagggcatgcaattatcttgaacactgacaccatcat

SEQ ID NO: 26625 - DNA, 389 bp, Glycine max
  unsure (1)..(389): unsure at all n locations
  Clone ID: PAT_MRT3847_124042C.1
gaatggcancgtacggagagaaagagcggcacnggggcacgcggagggaccgaaagcacccgaacggaccgcggccgaaccgagaagngggaaccgggaacaggaaggcaaccggagcggacaaaccagggggcgaaccgaaaccggacgggaacaaaaaagcgaccggaaagaacgccggaaaagcgcccaagggagagaaaaccaaccggaacaggcacgagaaaagcccagcaaacggggaacgagccggacgaaaaaagaacaaaaaaaagccggacgacaggaagccgcgccgaaacgacaacaagaaaggggcaacagaaaagaacaaccaccaacaccgaggggagaccgcaaaaggaaaggcacgcaaggaggacgagagc

SEQ ID NO: 26626 - DNA, 383 bp, Glycine max
  Clone ID: PAT_MRT3847_124043C.1
tttttgaacaatacagcttgctaacggcttgggggggtatgcagaatcgcataattggaacttgggtgttcactgggccaaaccccaaaaataggcgggagtgaagatgttatatcccaatgaaaagaagaatgtgaagagaccatatcaacttgttttacaagttgagagcagttattgcttctgatttaaaataaactccgcagacccgatatacgtttaacctatgctggagttgatcttcttgccttagggaccgagttttcaccccagaaatctggagtatgaaaaaccttttctaaatttagaattggtgccatttgaaaaacaggggccaacttgtctcttacaagacgtctgtgtcatggaactgaaatggctta

SEQ ID NO: 26627 - DNA, 256 bp, Glycine max
  Clone ID: PAT_MRT3847_124044C.1
ggacaaaacggcaattatattatttaaaaataaaaggctttaattttacatctacatactcaaagaaataaaaagggaaagaaaccctaattaaatcgggctaacaaaaaaccctgacataaacacaccgaaccaatcaaaacctggggaatttggggacggccttggtgccttcaaaaacaggatggttggccaactccccagggaggaccaaaccccccgccgtttggatctccctgaaaagaataggggggct

SEQ ID NO: 26628 - DNA, 503 bp, Glycine max
  Clone ID: PAT_MRT3847_124045C.1
taaaataataaaaataaaaaataattaaaagttatgaaaatataaaaagataaaaggaaaaaaaaaaaataaataaaaagaaaaaaaaaaaaaaaaaagggcaaaggggctctcccattatacagggcttacgtttacgtacatgcgatttcataacatattctatttttttagggtaacttaattttaatggcctgccctttatttcacaatgactggaatggcaaaaccgtggcgtaacttaatttttttgctttgcatcacattttcttttgctaacgtgatataaaataaaacaggcccgaacgcatttcctttccaaagggtaggctaaatgtgaatgtggaaacgggccctgtccctgtagcattaacatcaaccgcggtggttgttatgtttaccctcaccgttaccgttacctttgccatagccctagctcctgttcctttcttttctttcctttttttcatgtaaaggttctctggttttccagctctaaattt

SEQ ID NO: 26629 - DNA, 298 bp, Glycine max
  unsure (1)..(298): unsure at all n locations
  Clone ID: PAT_MRT3847_124046C.1
catcatcctcttgctcaccactaccttcctcatcatcatgtgcatgattcacctcagatacagacttgtgagatgcttgttcatccgcaccagtaagaccgtgcacctatgtgttgttgtagactctgatgtgcttgtcatgctccactgtcctgggctgagactggtgcacataagaggcttgtgcagcgtcagacatgggctgccattttgctgcagcangtgggcccacagcggacactagctgtagtttcaagatggctttagtgaatacgctgctggactcctgcatgagaac

SEQ ID NO: 26630 - DNA, 276 bp, Glycine max
  Clone ID: PAT_MRT3847_124047C.1
ctcgagctgggtttccggcccacaaccatcttacagatcaaataaaccacttttgttgtgaaaactgattcgccatacgcatgcggacaatatgtttgaacacgcccatgagcgacgtggattgctttcaccgcgcgaacgctgggcgcctatgcagccaccactacaagtactctgctaccggaggaggacaaggagtctttgacgcacgacacgcacggcttctccaatagcgcacggtggactgtagaatacgtggcctactacaacaacata

SEQ ID NO: 26631 - DNA, 1201 bp, Glycine max
  Clone ID: PAT_MRT3847_124048C.1
ttacgcgatctacactcataaaacattacatggtcatagtatacacctaattagacaaacaccaaacaaacaccaaactagttgcactccattctctttgaatggctgtggaggggttgaattcatcaccagcagccgccactaccgttccgggatgccaaggaagaggaggaggaggtggacctgcccctacgctagccttgagcaaagagaaaacgctccaaaagacccacctttggagtccggaggaagagtagttggccactttgtctcatcatgcctgcacaaagcggtaacaacaccaacacccaattacagtccgtcgtcacagtcccacaaaggaaagcagtgaacgacaacgcctgaaaggaatcacaccgccgcacatctaccaaccagggtttgccttctttaacgagtattcggtggacagagggcccgccgcaccaaggcctcgtcgtcatagcaacgcctctgttccgcaccccgccgtctctgctacaggccaacgacagcgtttccgcttcgaccgtccgcggcggaaggatgcacgagtgttccatctttcacaagagtttcccttctggttaggccctgggtggctacaagcgctgtcactacgacggcgtgaaacaaccacagtaacagcaacgccaacggcaacaacagcagcggcgtcactacctccgacggcggcgctgcctcctcctcctcccacgcgttccgtgggtttgacctgaaccttccggctccgctgacggagttctggtcgccggcggggtttgatttcggaaagaagaaggttggcgttgaacaagaggtggaaagcccgttgccggtaaccgccaagaggccgcgtttgttttcgggggaagataatgaagaggcgtagatttgttcacagaatgtttattttaatttgattgaaattgaatttgttggtacggtgaatatgaattcacaccagttaatttaattttcattttatgtttttttttttgtttgtttttagtatatatataggtgggatcgggattaggttcggattttgtttctgctcctctgtacagacaaaatttgttcattgcttttggattcttgtttgccattgattgaatctaacaattgttttcatcatcagtaatatttatgccaaagataaatatacaggttaattcccattatataaaaaaaaaaaaaa

SEQ ID NO: 26632 - DNA, 160 bp, Glycine max
  Clone ID: PAT_MRT3847_124049C.1
ctttttctacttaccttttctcttagtccaaatacgatgggagacatggcaaccacaaccctctcttcaaacccgaaactctcattcttcaacggaaagcgcgtcacatattctgcccgcgtcgcgcccatcaccaaattatcctcatccatacaaggca

SEQ ID NO: 26633 - DNA, 546 bp, Glycine max
  Clone ID: PAT_MRT3847_12404C.1
ggaattttgcagagggaaaaaataggctcataatttgcccagtccgcgagctcaacgaatcagcccgtaaacctcaaccaggatacccacccctactaaaagggaaggaaaaaactggggaggctatggctgcctcctctccaaagaagctatgcaactggatccagacgtttaatctctcacttcttttcataacattttatataatattttttacaaaccttgtatgatttcatgtaaggtttttattattttgacaaaaattattagacgtttaaatatttatgtaagttatatttatctagacagaattttagcctaagttttctatacgtgtttatatgtgaaaaaaaacaactgtcaaaatgtgtttgaattggttgtcacaaaattgattttgaatgaaattaaatttacaaaattaaaaattaattatgattagaattgattatgaagtaacacaatttttctttggttaacatatgccagaaaagtgatttttttttaaaaatattgcttggatactttgaataaattgatttaaaa

SEQ ID NO: 26634 - DNA, 477 bp, Glycine max
  Clone ID: PAT_MRT3847_124050C.1
ggggcccccaaacaaaggggtttttttatccattccatgttcaaagtgggtattagaaacaaaaataggggctataatcgcccacattgggtttttattccaaaagcctctaaatggacccccctgaaaaccccttccgtatgtggaaaaccagattttttttcacaggggccgaataataaagaccctttaggaaactccttttcctcattttccttattccaacactttagagttgatctaggggaaccccagtccctttttttcccgaatttttgggaaaaaaaaaaacccccccttccaagccctttgggggtcttttctttaaaacaggttcccttaacatccaaaaaggaggtttgctcaaacaacttgtttgtcccctccacatgaagggcaacaaataactttgggggggggaaacatgccaataccctttgtaccattttgttcaaattcaccggtttgaagtctaac

SEQ ID NO: 26635 - DNA, 409 bp, Glycine max
  Clone ID: PAT_MRT3847_124051C.1
gaaaaaaaaaaacatggtcattttatttcattgttggaagagaatcttgtctagcttgtcaagcttataaaaaaacgtttttgttctgacacgaaatgcgaaccaaggacgtacaaactttgggctctccctctctctctttcatattattttttttgggaaaatattctaattaattttttatttatcgggtgcgcctcgaagaaaaaaacaaagaggcttgttttgttattagaagcggcgatcaacgtaaaagcgctggctcatcactttcaccaataagttgacgaacaattttttctactcttgaaccttgttcttaatcatcaccttgccgccgagtctttcttagattgggtgatactttcacacaagtgacattgccgcgatcatcagacacaagtaaaat

SEQ ID NO: 26636 - DNA, 333 bp, Glycine max
  Clone ID: PAT_MRT3847_124052C.1
gggtaacaaatggttggcgtgcaatgcttgaaccataggattatgcaaatggttaaggatgttttgtttggttttttaaggttgggactgctgtggtcactcgccaagatggaaggttagctgttggaaaattaggggcactctgtgagcaggttgcttttgtatatttttgttttgagtttttttttgtttgttcaaggaataaaaattgtattttgagtgtggcatgtgtgacccatttgaaaatcaatggcagattaaggagctgaattttcttggttatgagattattttggtgtcatcagtagctagtaagccttggccgccaaaggc

SEQ ID NO: 26637 - DNA, 470 bp, Glycine max
  Clone ID: PAT_MRT3847_124053C.1
tttgtttcccgctgttgcagcaaattttagtacaatagattagactatcttctgttactgtatatgaaattatgaattatttttattattatcatcattctttagcatcttttaatataactactgtgtatttgttaggtagtacttatttatttgtccttagttctctttgtagtttagtaatgatgtatgtggaggagtttgcaaaggaaaaatgtctttcgctgaatttgttttccatttctctctcgtacatacatgtgtccacacatacatctaaaacataaaatgggggtgcttattaaaaaaacataaaatgaaggtagtgcttataaaaaaaacatgaatgactatgattgcaggagatcctactggttctggatgggactaccggtttgaatatgttgccacaagcaagagaattcaatgatgttgtgggtgttactggtttaattttgaccaaactggat

SEQ ID NO: 26638 - DNA, 922 bp, Glycine max
  unsure (1)..(922): unsure at all n locations
  Clone ID: PAT_MRT3847_124054C.1
ttgttttaaaaatctgaacatcgtttgtgatccacgaaaaccacatcagactcaagtgaaaccagaattgttgtggtcgccaaccattcacaaacacttataatttatctaaattaatactcctaaatttcaaagctcgtccaaatcctctctacggcgatttcattttcagcatagttttctacctttcacagcttcctacgtgtacgtgtgcctttatccacctttattttctgaggcagcgaagtacagaacactctaaagatcgattgttttcttttgctttctttcatcattactcaaattccatctgggtgtgtctataaccggcacaaacaaacacaaatgagctttcccaagttgggtttcattgtttcatgagcactttcattatgttggagtctttagcttggtgccaaagctttaagggatatgaccttaccaaacagaagagtccgggttactcccatgccatttcacgagtttatagaaattctattttcatgctttactcagttaaaaagcaagtgccactactaccacatggtgctagtcatgggatatttcataggacgtgtgtgtcagaaaaattctttaaaaggtctcctctcaatgttccatcatggagaggattgtgtaagtcgcgttgggaacggctacaaacaaatgtagcatatgatgttgctggtgctgttgaagtcatcaatgatttaggattggatactcttactttcttggctgtgaccgtcttaattgtgcctacattcaagtcaattaaagccagtcctatacttggtttcttctgtgctggtgtggtactcaatcagtttggtttaattagaaaccttacagatgttaaagttttatccgaatggnggatccttttcttgctgtttgagatgggtttagagctttcacttgc

SEQ ID NO: 26639 - DNA, 1520 bp, Glycine max
  unsure (1)..(1520): unsure at all n locations
  Clone ID: PAT_MRT3847_124055C.1
atgattgngagtttggaactgaagaaatattacggaaaaagggaaaacaactgggaaagtctcttttggtttttgaagacatttttgatcaagagcagttggaatacattgttaaagtagcatcagactgctttagtttcaactccaaagtcattattacagctgagaaaaattgtttcctaaggtggcctgagattgaaatatatgaggtagaaaggctcacaaagcaagagagtactgatttgtttattttgaaagcgtttaattgtcggaatccaaaaattaagcatttgaaaattatcacacaagcagtaactatggctccttgggttccatatactttggaactgatagcttcctactttcgtgaaaaaagtgcagaacattgtcagcgtatattagatgaatatgaaaaaattccaaatgaaaaaaagaaacaagtgatagttcaaatgatctttgatgctttgagctgtgatcagaagaaaatgttaattcatattgcctataacctcattggacaagaaaaggcaatagttgaagacagacttcatcgtctttttggtgtttgggcaaaagatggtattgacatgttgcttgataaatctcttgtaaagattgatgagcaaggtcaggtgacaatgcaccacttgacacataacatggtagaagatatggagtatggcgacaaataaaaccaacctagataagtataccacacctgatagcgacaaaacagcataggcaaaaacgggtatgtcatggaagaaattcaaccttcgtctaatgattacgaaccaatggaatatgaatatcaaaattgttctacctcctcttcttgagatccttcatgatgttatttaagatctgcttttgtcttttggaagatggacgagaggcggcacatcctctttttatttttttattctgaggagggcttaatgcccaggaaaactgaacacaaatcgtacgggacatagggagccccataatgtccttaaccaagagcatatcacacccaggaggcggtgagctcttaacatgcaggtcaatatcttcatgaaaggtgacacatctgaatcaccctggattagtttttggcttgaagccataggttttgatagtagtcatgtaggtggtattgggggttctcctcgtaactctccactgtctagtgactctggtgagtcttataactccttctgacctttcaaggttagagttggagcttacattccttttgggtgcctaaggatgttttggatcatgtctggtagagttttgttgttcgttaagtgattgtaatgtttgtatgtaacaatcatgtcggattaggtcctgctggagttattcgtgatattttgtatatagttacatgtcacatgtgtctgctttgtagaccttgatgctcttatatttataagtgggatgcaagtttgttcctgcttgttttatattccacaatcctttacatgtttataaaaaaaaaaaaaaaaaaaaaaaatcacgcgcccgcccac

SEQ ID NO: 26640 - DNA, 567 bp, Glycine max
  unsure (1)..(567): unsure at all n locations
  Clone ID: PAT_MRT3847_124056C.1
ggctcgaggttcaaatgatctttgatgctttgagctgtgatcagaagaaaatgttaattcatattgcctataacctcattggacaagaaaaggcaatagttgaagacagacttcatcgtctttttggtgtttgggcaaaagatggtattgacatgttgcttcataaatctcttgtaaagattgatgagcaaggtcaggtgacaatgcaccacttgacacataacatggtaaaagatatggagtatggcaaaaaagaagaccaacctgcatcaaattatgggagcatgtgtgatttgatggaattggacaaaaacgggtatgtcatggaagaaatccaaccttcgtctaatgattacgaaccaatggaatatgaatatcaaaattgctctacctcctcttcttgagatccttcatgatgttatttaagatctgcttccctcttttccaagatggaccagagggggcacactcggctttcaggttagaactcagtgatgctcagctttagtatattactttgcactgaattctaatgttacaacttgnggttgggtatatagtattggg

SEQ ID NO: 26641 - DNA, 276 bp, Glycine max
  Clone ID: PAT_MRT3847_124057C.1
tactatccacatttatatcaagactttttctcttcttaccacagacaaatcaggggggggggcttttagaaatggggaaggtcataacttatgatctcgacatcaaacttatacatttctagcatccaacatttaaaataccgtctgcagagaagtagaagtccaaccaaggacttcgagaatcgactagcacaatccaaattaactaataagcactaacaggcaaccataatgaatgaaacgaaatagaaactctaagtggaaccactactccaa

SEQ ID NO: 26642 - DNA, 453 bp, Glycine max
  unsure (1)..(453): unsure at all n locations
  Clone ID: PAT_MRT3847_124058C.1
tgccacctcaaaatgcgccgctctgttttcttngtaaacttcagtagaattatatcccggaacgaccagnctcactagntccacggccgtcctttatttttttttttttctcttttttttttaagcacaataacttcttattactaagggtaatttttggtattatcacctccataatactaaaatgacattttaaaaagtatccaaaccaccggctttgaatggtgcttcacgattaatgattaacactataaaaatttcttgtcttcacccttagttggaaaatattattacttcttatctaacttgaaactttattgtttttgaatacaccgttttacaaaccgtcaccgagaaaatgcgctaccttgggatgtttcacctattccaattttaacataatcacacttaaattgatcattcagatttttttttattccacgacccattccc

SEQ ID NO: 26643 - DNA, 259 bp, Glycine max
  Clone ID: PAT_MRT3847_124059C.1
acccgcataaggaaaaacaactggtaatttaagggacaacacaaattttctgggcagggattacctaaactggtattcgggagatgggcttcttttgtttaaaaaaacttaggtattgtaacttgtgctttaagggactttaaggacttgttctcactattatatgccgggaataacctataccagctttcaagacctcctgacataaaaaatgcttttttaccttttgaaaccccataaagaacccagataaaaactt

SEQ ID NO: 26644 - DNA, 299 bp, Glycine max
  Clone ID: PAT_MRT3847_12405C.1
cggacgcgtgggcggacccctgggccgacgcgtgggccgacgccttggctttttgattgatttgggatgaagaagaacaagtatggtaattaaagttacatcaattttacatttacatcatttaaatttgaggggtgtttctgtttgttgatttcgtgtctccatacttaggtccaaggaagagagagaaaaaaattgagaataacagaacagaatcatattcgtattcatgtgctgtagctgaaggcataacatacatcactgacccattacataataaacctttttttttctttctc

SEQ ID NO: 26645 - DNA, 242 bp, Glycine max
  unsure (1)..(242): unsure at all n locations
  Clone ID: PAT_MRT3847_124060C.1
ttggtttatgtaacagaagtcattttatagatgtttttgtctttgactcttcttcctttcaatatttaaccatattgattacataccttaatacaaaatgagcaggggtattttcaagttcatggatagatggcattgaatctaactgtcttaggtttatttatgtgtagtttatatgtaatgaaccgcanaaaaaaaaaaaaaaaagcaatgaagggattcggaaacaaagattctgatna

SEQ ID NO: 26646 - DNA, 184 bp, Glycine max
  Clone ID: PAT_MRT3847_124061C.1
gacaccaacgccaaaacaaacccactaagatggctgccttgtgatgcttcctagacgctgattgttgcgacccttattctgatgcgtcacagggctggctgctgtagctacaaagcgcgagcaccaatgctggagaatacaagcgctgagcacgatcgagtgacacacagtgtgcaaaccaccg

SEQ ID NO: 26647 - DNA, 159 bp, Glycine max
  Clone ID: PAT_MRT3847_124062C.1
ttaagaaagagaataccattttttattattcctaaactcagaagaaatgttttttaacatcaaataaagaaaactagcccaaccttattttatccaaaataccttttattttggaatgtggatggtaaaaatggcgccgggcgaaaaccgcccgccccc

SEQ ID NO: 26648 - DNA, 193 bp, Glycine max
  Clone ID: PAT_MRT3847_124063C.1
tatcacaataccttctggttttccatcgttgatatacaacaatgaatagactccaattattgccggatggattattcacaccaacatctttaaaaaccatctcaaccatattcctattaaattctatctttcttttaaccaatatcaacaatttctaaaatatcatcaaaatcaattaattcattaaaaccat

SEQ ID NO: 26649 - DNA, 379 bp, Glycine max
  Clone ID: PAT_MRT3847_124064C.1
ttgtttttttttttttttttaggtactcttgcgtgttttggttttttttttttttgtgttacctaaatttaatttattggccgtgtttttcaacgaaaaaagggcccttttgggggtttttccaacccaatctccgggcaaaatttccgcttttcgccgccggggttagaacgaaaaagtttttttttgggggccctacaaaaaaatgcccggccggatttttaaaacagacgcgctgggaaaaccccggggatccccaaattaatgggggttaagaaaaatcccttttttccaattgggaaaaaaaaaaaaagggcccccccagattccttttctaaaattttccccaccttaatggggaatgggcccccccctttta

SEQ ID NO: 26650 - DNA, 457 bp, Glycine max
  Clone ID: PAT_MRT3847_124065C.1
ttttacgataaaatataaggcatattgtggagattgataactataaaaatgcttggttgctaaggtattcacatcgattgaagaagatttcagagagacttttacgtccatggattattgagctctctgcatgacccttgtaagactgatacggcactcttttgttataatcagtaagcactttatatatcagtgaatcccattttccatgatcatattttatacagcatcattgttactaattatgatcttagcatgcagtagccatatgatgtatttactaacgctctgtgctctagacaggttcactatccgatggcgaacttgggagtgattaaatctgaatctgcactctacaacttgaaggatgctaataagggataacatcaggcctaacaacttccgttgcaattgcgctgtgcttcataataagcataattgttgcgttgaggatatt

SEQ ID NO: 26651 - DNA, 272 bp, Glycine max
  Clone ID: PAT_MRT3847_124066C.1
ttgtggtccaatgcatctgtctttatccacaagtcttcactgcacatccctcatgtagcacttcctgaggaatgcgttcatcaggttgcttctgctttaacaattgagattaaccgagccttcgttattgtgcgggaaattggaactgggagagatttaaagaagttccttagcgttattgctgtattatgggttatctcggttattgggagttggttcaacttcatgaccttgttttacctattttttgtgtcactgttcacgttgccact

SEQ ID NO: 26652 - DNA, 317 bp, Glycine max
  Clone ID: PAT_MRT3847_124067C.1
gacaaaactgtgaaagctttaattaactatgggatttaaaaactaggtgcaatgtcacctgaattgaaaagacggcgcactaaaattgttcctacagtgaatgacaaacaacttggtcaatgttaacaaaggaaactgaacaaaagttttacttaatttagtcaaacagactgaaacccatggcatggacagactcttcaggtggttgtttcttcttttcctcctacttggctgaagccgctggagcaccacatgcggcagcaggagcaagaacgggggcaacggcaaatttacttgggttcttgagagactccttg

SEQ ID NO: 26653 - DNA, 539 bp, Glycine max
  Clone ID: PAT_MRT3847_124068C.1
atctgatttttcattacaagtgaagttgctctccataactggattaacaacaggatgcttaacatggaacatgagcggaccgaaaattccatatcaggtaccgagccacgcgcactctgtttaagttttgagggggtgtgatatcccgagctctaaatgtcattatgagtgcatagatgtgagatatgcacaccttatcctatttctgctagggctagagtacttacacctaacatggaataccgatcattctatgctgctctggcgcttaatgtattttactctactatacttagactgttatcacttggttggtaactaacctgacaaccactaaaagaattcaatataatattattaacaaggtgaggactatgatatcctagaagaataaagcttcacggtcgcgtgaataactggcatgctacgattcttaagcaacgtaattaggaacacaatgttgaccgatgcgcttgatgacttccaactctattacgacatatgatgatggatattgatgatgaataccttaatgacag

SEQ ID NO: 26654 - DNA, 491 bp, Glycine max
  unsure (1)..(491): unsure at all n locations
  Clone ID: PAT_MRT3847_124069C.1
cgcgggacccgtacagcggcctccgccgcaccgggacagcagccgccgccgctgccgccgtcctcccctgactacccggagctgtctcgagctgagccccctaccgggccggatcccgagataaagcctagccatggctgctgtttattctggcatttcccttaagcttaaaagcaagacaacttcctgggaagataaactaaaactagctcactttgcttggatttctcaccagtgctttcttccaaataaagaacaagtgttacttgattgggcaagacaatcattggttgtattttataagaaaaagcttgaactgaaggaagatattgttgaaaggctttggatctatatagataacattttacatagcagaaaattgcagaatctcctcaagaatggaaagaccattaatcttcagatttccctagtcaaggaggctgaggatggcattattgcttatgatgactggggngtgaaactgactattg

SEQ ID NO: 26655 - DNA, 231 bp, Glycine max
  Clone ID: PAT_MRT3847_12406C.1
gaccccatcatatacggcgacgtttttgtcgtctacggtgacctttctcagatgcccattgctccggaagatgctgccttgatgcaaagcgcggtcatctcgagtactcggattaacccaacccggcgtatgttcttccgtcatgtaatccgccgccacaacgaatgaacaggctggtcttgtcggtcacctggacgtcaccgacttcaccggcgaccatcgcgtcacagt

SEQ ID NO: 26656 - DNA, 257 bp, Glycine max
  Clone ID: PAT_MRT3847_124070C.1
aggcgtccgaacacgtcagaaaggaacacacacatgggagtatctgtcctaactaccgggattattcactggctacatagcgggcctcatcgggattcaatcttacgtacgcttgcaatctaacaaatagcatttttatactgaaactaaatgtaattcattttgcgttgttttacaacgtttaaactgcgaaaaacgttgcatgccccaacataatcggcgagcattacattcatatttcgcacaacggccaaata

SEQ ID NO: 26657 - DNA, 376 bp, Glycine max
  Clone ID: PAT_MRT3847_124071C.1
accaggcgtgagaagattacaataatggcagcgctctcactctctatctgtctagagagcatagcgctgacatgtcatcacatacagccagactccatggaggcgccgggagacccacgcgccggtgatgctccccctaaccgatgccagccgatcaccagtccgcacactcgcgctgctactcagacgcgccggacgactggggacctgcatgctggtgcgggagacagtagcgcgtgagctagatgagactgggtccgactggggttactccaaactacaggaggcgctcgacatgtcaagatacatggtcttatgggcagtgacggaggagatgctcgcatgcactaccgccaagcgcccgatcacgccgatc

SEQ ID NO: 26658 - DNA, 552 bp, Glycine max
  Clone ID: PAT_MRT3847_124072C.1
gatgccaccacttgaaggtttcattttcataaattctcaaaattccctctgcttctttgcatattcttccttggctgagtttcttttattttacttttctctccaagtacacccagtttgtgtcatagtggcttcaacaaataaaaacacacttctagttgtttctctattacactgatcttgaagcatggcagggaaaaccaagaacaaagtggaggttcaattgggttgcggtttggtggggagaattttccatctcaaaaccaataataggcctagaaaatcctctgttcattcactacccctgaagccttgcaacactgcacaacagagggatcagggcaaaaacgaatccaaagcccctccaaaccatgaaccaaaagatagctccattgaaaccattcctacactgaaaggggagcagaatccagcaagaaagagtagacaacaacagaaagatcaccctgttgttaactctctggaacttgccaagataagtactagtaccagtcatcatcaaaactacgggacgaaatccccggccaaagaatt

SEQ ID NO: 26659 - DNA, 271 bp, Glycine max
  Clone ID: PAT_MRT3847_124073C.1
gacacaagtaaactggttggtgactacatagaacaccataacccttgaacacaatctaagcattaagagatcggaagttctgtgaatgggaattcagttcagcaagcagtgacttggcgatcctaggtttagactctgctcagcaacatcaactgctactgtgcgtggctcccacattggtcccatacccacctcgactatcatcaccacatctacccctgcttgcaggttagttcaagcctggcgagcagagacagaactacctgctctg

SEQ ID NO: 26660 - DNA, 289 bp, Glycine max
  Clone ID: PAT_MRT3847_124074C.1
ttatttttaacattgaaatgccatgatggaatgagaatcatagacataccaggcgagagggctaatatacaacagcgaccaagaccttgttagccaaacaaaaccatgtaacctaggcttcttgcctgcgagatgcgtgagccgaacaatgccgcggcacaaatacaacctcctagaaaaaagcggacagctcttctggtggcactgcattcaagagtctttgctagctctacaataaaaatacgatggagcgcgacctgcttaacttttatcataactcacttgcccc

SEQ ID NO: 26661 - DNA, 389 bp, Glycine max
  Clone ID: PAT_MRT3847_124075C.1
gggataccataacctataattagggagcaaggataaaggacaatgcatggagcaatccaacctagaaacctactatatcaagcatattgatcattaattaatttgaaaagggatgaatagtgtgggaagtgcgcaaactttgccttaaacaattggttaattgaattgaaataattcccttttaaatcatgcatgttcattgtagctagttgctatcatgctgaaatttttatattttgatgctaacaggtgacaagcctacttaataattgaactcctctttgttgcatgtggctttgcttcctttttttttaatgtgttgagatcgatatacagtaggaccaagaaaaacaaacaggctacacacagtttagagaagccacttgcgt

SEQ ID NO: 26662 - DNA, 285 bp, Glycine max
  unsure (1)..(285): unsure at all n locations
  Clone ID: PAT_MRT3847_124076C.1
gagattaagaaaaatggaggggataaattatgtttgggttaaggggtcatgctgccttcgantggccccgtttttttggtatttagaaaccagacacaacctttgggcaggtatgtcttgtctacattggcacattcgcacatctagggtgactttccttgcaaagggatacggttcatggctgctctcttcatgaaagagagaacgggtataaaatgaaaaactgttattggtatgtacggactgagaggatattgccgcgccttaagccttggctgaataatt

SEQ ID NO: 26663 - DNA, 1257 bp, Glycine max
  Clone ID: PAT_MRT3847_124077C.1
gggagggagaattacatacatacattattcactgaatagaaatgatttggtccaaaacatttgagagaggcagaagaagaagaagaaaagatggtgggaccagtgagacctcagtttgtgctctttggttcttccattgttcagctcagttactctctccaaggttggggcgctattcttgctcatttgtatgctcgcaaggcggatataattctgcgaggatactctggttggaattcaaggcgtgctgtgcaagttctggatgaaattttccctaagaacgccactgagcaaccagatttggtaattgtgtactttggtggtaatgattctcttcttccacatccaagtggtcttggtcaacatgtacctctccaagaatacattgaaaatatgagaaagattggtacccatctaaagagcctttcaaagaagactcgccttatatttctcagtgctcctcctgtcaatgaggcacaaatttatggaaccagtgtgccactggggcagcgattaaggaacaacgaatcatgtcaaaaatattcagaagtatgtttgaagctgtgccacgagatgaacatcaaggcaattgatctatggtctgcactccagaaaaggggtaactggagagatgtttgtttcacggatggaattcatcttacttctgaggggagcaatatagtggcaaaagagatcttgaaggtcatcaaagaagcagagtgggaaccttgcctgcactggaattcaatgccaactgaatatggagaagattcaccttatgatcctgttggccctgatggaaagacaactgtgaatgtctccaactggaccttccttgaaactaaggaatgggactagagtgatgtgtatttgaaaactatagacatgcccctattcatagaagcctaagcaataatcacaaaataactggaatttatatagaactgtggctaaagaaaaatatattgttcttagttcacatatctgcatcatttgtcactggtttttcaccatgtgagtgggatgatttggtgactgtaattgcactttgattgagctaattgcctagttattttcaccattttatggttgtctttcactaaggttatacacaatagttggataggtgggggcacattatagaaacaaaagtcacatgatcaattgtgggcctgtatctgtgtatgacaatattttttcattttgtgcaaaaaaaaaaaaaaaaaaaaaaaaaaaaaaaaaaaaaattcacaaacc

SEQ ID NO: 26664 - DNA, 272 bp, Glycine max
  Clone ID: PAT_MRT3847_124078C.1
aaactagggagcgacaagcactgggaggggaaagagcgatgggaggcatatggcatgggaaccgttggcgctaaaagcctacacgcgttaactacagggggggaagacttgaagaacccacagatggtagtaagggcctaggtgggaagacgcccggcttaataaagggaaagaaggactgacccgacagtgcgatgaaagaatgaaaggagggcgacgaccgcttggataaaaaccagttgtgaaggaaccaaaaaataatgcatcagcag

SEQ ID NO: 26665 - DNA, 852 bp, Glycine max
  Clone ID: PAT_MRT3847_124079C.1
cttgaagggtacaacaacatacaagtgcaatggaatggaaaagccttccagaagatgaagaacctgagaattttgataattgaaaatacaaccttttctacaggccctgagcatctaccgaatagtttgagatttctagactggagctgctatccttcaccatctttaccatctgatttcaatccaaaacgagttgagatactcaaaatgcctgaaagttgccttaaaatcttccaacctcacaagatgcttgaatcattgtctataataaactttaaaggttgcaaggtcttaacccatctgccgagcctaagagaagtaccactcgtaacctttttgtgtctcgattactgcagtaatttagttaaaattgattgttcaattgggtttcttgataagctcctcaccctgagtgctaaaggatgctccaagctgaaaattctagcacactgcatcatgttgacttctctcgaaattttggatcttggggattgcttgtgtcttgagggcttcccagaagtattggttaagatggagaaaataagagaaatatgtttagacaacacagccataggcacattgccattttcaattggaaatcttgttggacttgaactcttgtccctggagcaatgcaaaaggctgattcagctaccaggtagtatctttacactgccgaaagttgaagtgatatttggttttaggcattggagatatctattctttgaagagaaccaagatgggaaagagttgagtttagaagtgtttccaaaggccattcttgtttgccatcttgatcccaggcattatcatcatcttgacctgtattatctgtacatgagtcctaataat

SEQ ID NO: 26666 - DNA, 531 bp, Glycine max
  Clone ID: PAT_MRT3847_12407C.1
ggggggaagggaaaaaaaagcaagtttttttcgattggttttataaatcataataaaattatttacaagcttaaaatcatttttttgcccccatgaccccgcctggaacccaagcgttgaaagaagggcccaaacccccccaaatttgaaggaaatgaaagataactaattccccccccggtataaaataacatccccttcaagggacaatcaatggctcggaaaaacattgtttgaaacacccccctttaacccagggaaaggggttccccacccccactcatttttggaaaactttccccacaaacccttgaaaggagttccccaccccggtactgacagcttttgccaaaaactgggcctcttgaaagggtttctttatatcaaaggcatttttcactcgagcctcccgaaaagcccctgtttcacggaaatcaggaaagctttctggcaacatataaaactcaggtggtgagtatattcccccaaggacagtgcccttggcataccaatcaatggcggaagcctttt

SEQ ID NO: 26667 - DNA, 661 bp, Glycine max
  Clone ID: PAT_MRT3847_124080C.1
cacagagagcaagttttatttggtgaaggcaaacatcatccaaaagaaaccagacaggcaaggtgctgtgattagggagcctctggggccacacaggaatctcacactgggcaaggagcaggctcgagacacgtaaatgtcctcagccattcagcaccatccggacaagctcttcatagttaatgcaaccgttgctgtcctcatgccccgccactagcatctcgacttcttcctctgtcatcttctcccccagggtgactaggacatgacggatttcagcacccatgacagtgccattcccttctttgtcaaacacacgaaggccttcaacataatcctcgtaggttccttggtccttgttcttggccacagtctgcagcatgggcaggaatgctcaaagtccagcaccttcacattcatctaatcgctcttggggttccccagaccttgagcacctcggcgttggtagggttctggcccagggcccgcatcacatccccacactggctgtacaggatcttgccatcgcctgttcggtcaaacagctggaaagcctccttgaattctgcggtctggtcctcggtgaagtcacacatcttggctgctgagctatgcgggacctcgagccgaattccgagcttacgtacgcgtgcatgcgacg

SEQ ID NO: 26668 - DNA, 339 bp, Glycine max
  Clone ID: PAT_MRT3847_124081C.1
gacttgtttaagtatattagtgtaacccgcccgtagtgtcatataataccagtggccagttaattgatcttcttgagccctttctcgtcttcgttgctgtagcgaccgtagcgctccaacttgtccttgctcatcttcttcaggtcatcgtaagagaggtagtacccgaacaaccggtccaagtagttgaaccacggctggaagcacgtcagcggtcgcatgtggtgcatgtcgtgcgccggtgcgcctgcgtagaacggcaggaacctgtggagcatgaaggggaagtcgtagcccatatggacttcgtaggagacgctttgcgccaccacgaaccaa

SEQ ID NO: 26669 - DNA, 162 bp, Glycine max
  unsure (1)..(162): unsure at all n locations
  Clone ID: PAT_MRT3847_124082C.1
ggagggcaccgaagaagagcgagaanacgaggnacgacgaaaaccncggcggcnccaagaacgccccgcaggaagaacngaagaaggcggacaagaaagccgccannaagaaacaccccgacaagggcggngancccgagaagnnnaaagagcnggcgcaag

SEQ ID NO: 26670 - DNA, 448 bp, Glycine max
  Clone ID: PAT_MRT3847_124083C.1
tcgaccagctcatttgtcggcggccgcccttaacaaaacagggggaattttgaaaactattcggtttactccgattcaactaggtctaagtctgagaacctgactcattacgcatgaatactctgagtcaactagttccacagatagaaagatggctagggaacttagagggacatatgatcacacgtcatgcatagataggttatgctaagtagtgaacgtaattggcaatggctctgatggggcataacacataccatacctacaaaactagcactgagatgcatgcaattgtttatcaaatactcagatcataatggaacatatttttccactgctgcggacagtgcagatttgggaccggcgccaatgatgcttactcttgtctctccattcttgaagaacagaactgttggtatgctactgatgccgaactgagctgctatgt

SEQ ID NO: 26671 - DNA, 348 bp, Glycine max
  Clone ID: PAT_MRT3847_124084C.1
cccacgcgtccgctggcgtcctgtacatctcacgatgataaagagcaccaccgggctcgggatctccatcttggtcctctcgcttgcctcccagttctcatggtgtgcagaagcagctgagggaagcgccggaatttccacagagcctgatctccaggtgcaagaacaagtgcacggcgatatgaaaaaccggctggaaatgcagggtcgcaaccggaagcttggccatgaggtgaccacagtggagtcgaagcatcacatgaggattaccagtgggcacaatggtggcagcgcggatggaggcgccggcgccggtgccgagggcgcaggcacgggtgggcataacgt

SEQ ID NO: 26672 - DNA, 154 bp, Glycine max
  Clone ID: PAT_MRT3847_124085C.1
atccagcgacttcctctcactcgcctgtccacagaacttgccacctacatggcagctccaacatctggtgctgcgtcaaatgggttcggatcttccttctccagtggacgaccaggagccacacctttggccctgctattggaggcaaagttgg

SEQ ID NO: 26673 - DNA, 802 bp, Glycine max
  unsure (1)..(802): unsure at all n locations
  Clone ID: PAT_MRT3847_124086C.1
aaatttcctgtttcacagaaatggctgatagtgttgttgtttttctactanataacttgtctcggctgcttgaagatgaacacaagttgctttctggcgtggaggacaaaatcaactctctttgcaatgagctcaagtttatacacatcttcctcaagaattctgagggcaagcgcagtcacgagatggtgaaagaagtggtgagccagatcagagatgtcgccctcaaagctcaagatgtggttgacacctacctttccaacatcgccccacaaaaacagaggagcaaactgagcaagttattccacctcaaagaacatgtcatggtgcttcaccaagtcaactctgacatagagaagatcaggagtcggatcgatgagatctataagaacagggacagatatggcattggagaaagtgaattccgaagcgaagaagctgctgcagaagcagaatcactcctcaaaagaaggagggaggtggaggaagaagatatagtgggcttagtgcatgactcaagccatgtaattcatgaactcatggaaagtgagtcacgtcttaaagttgtgtccataattggaatgggagggttgggtaagaccactcttgcccgtaagatctataacaacaatcaagtgcagctgcggtttccttgccttgcatgggtttctgtgtccaatgattacagacccaaggaatgtcttctcagccttctcaaatgttcaatgtcttccacatctgaatttgaaaaattaagtgaggaagatctgaagaagaaggtagcagaatggttaaagggaag

SEQ ID NO: 26674 - DNA, 2452 bp, Glycine max
  Clone ID: PAT_MRT3847_124087C.1
aatatgtcgtgtttcacagaaatggctgatagtgttgttgtttttctactagataacttgtctcggctgcttgaagatgagcacaagttgctttctggcgtggaggacaaaatcaactctctttgcaatgagctcaagtttatacacatcttcctcaagaattctgagggcaagcgcagtcacgagatggtgaaagaagtggtgagccagatcagagatgtcaccctcaaagctgaagatgtggttgacacctacctttccaacatcgcccaacaaaaacagagaagcaaactgagcaagttattccacctcaaagaacatgtcatggtgcttcaccaagtcaactctgacatagagaagatcaggactcggatcgatgagatctataagaacagggacagatatggcattggagaaagtgatttccgaagcgaacagtttgaccgttcacgtcagggtgaagtttagattcacttgaatggcaacatgtcaatgactttaaagtgcgtgaactggggcacaatcggttaggtgaagtttctcttgccttgcctggcagcttcccaactactaccaatatgtgcttatttactttggtctcagtataggatatatgttctcagtgcctcctccaaagcactaatatactttcacttaccaaatcaaatggatactgaaatcgatgagagcaacgacgaggccgatatcagttttgatgcaaggagttatagttccagactgaacagtatgataaggagtgatactgagtcaatttcgggagcatcccaagtctgtagttattctttcagagtggacagtgcaatagcatccccgctcggtagttttgcttccagagaacacagtgcaataaggagtcagactgcgtcaattttgggagcatcccctgtccatgagggagctgctgcagaagcagaatcactcctcaaaagaaggagggaggtggaggaagatgtaattcaagaactcatggaaagtgagtcacgtcttaaggttgtgtctataattggaagggaagggttgggtaagcccactcttgcccgtacgatctataacaacaatcaagtgcagctgcagtttccttgccttgcatgggtttttgtgtccatcccatacagtgtctgcagactttttaatatcgttctcaaacgtgtaaaatattacacaacagaataagtgaggaagagctggctgaagaggaaggtagcagattggttgaaagggaagaagtatctggtagtgcttgatgacatctggaaaaaccaaataggatatgaggataaaggagttctccgataagaacacacaggtaataattttctcataacaagtcgcataaaagaggtggcatactatgctggaactgcgcttccctactaccttcccatcctcaatgaaaatgaaagctgggaactcttcacaaagaagatttttcgaggtgaagaatgcccgtctgatttagagcctctgggaagatccattgtgaaaacttgtgggggtttaccacttgccattgttggtttagcaggacttgttgccaagaaggagaagtcacaaagagagtggtcaagaatcaaggaagtgagttggcgtcttacacaggataagaatggagtaatggatatgctgaaccttaggtatgacaacttgcctgaaagattaatgccttgctttttgtattttggaatctgtccacgagactatgtggaaagctatgaggagaggaaagcgaaagaattagagactgttgaagttttcatccactaatttcgcacttttataattaactaaataaagaataacggccacttgaccagaactctaattggcgcacaaccacataactctactttcgtgtgttccacgaccacttgaccagatttttctgataggttagcattgaagcctgagagaaattatgcatcatttcatttgcttgttgtacaaccatctttaattttgcattaattaatttaaacttttctcccttgtttttcgattctgttccagactgaacagtatgataaggagtgatactgagtcaattttgggagcatcccctgactatactttttcttccagagtggacagtgcaatagcatccccgctcggtagttttgcttccagagaacacagtgcaataaggagtcagactgagtcaattttgggagcatcccctgtccatgagggagctgctgcagaagcagaatcactcctcaaaagaaggagggaggtggaggaagatgtaattcaagaactcatggaaagtgagtcacgtcttaaggttgtttccataattggaagggaagggttgggtaagaccactcttgcccgtaagatctataacaacaatcaagtgcagctgcggtttccttgccttgcatgggtttttgtgtccatccattacagacccaaggaattttttctcagcctt

SEQ ID NO: 26675 - DNA, 250 bp, Glycine max
  unsure (1)..(250): unsure at all n locations
  Clone ID: PAT_MRT3847_124088C.1
ggncaacaaagaaccaagccggccccggtgggaaagggaggttttattaagtccccttgaaccctttggaaaaattttgaaagggcttaatgacccctgggtagggaaaatgaccaatctcacggagtttgaccaaggggaaaaataacctgaggtggaattccgaagggaatatttaacccaattccttggggaataacagggctttcttattgggcttaaccatggcaccaccagaaaaatggttcca

SEQ ID NO: 26676 - DNA, 381 bp, Glycine max
  Clone ID: PAT_MRT3847_124089C.1
aacctaaaaaaaaccaaaaagatttacctatttacttttgagttcataacatacttaaatccaaaccttggatagaccaaatgggtcaatgggggggaaaccccccccctcaagagcgagattggaaattaaaaaattttgaccgcccggcaagtataaggccccctaggagcacaagctggccccttttcataaactattaactaacattttaacaaaaactacccgccgtttattaaaaccaaaacaccccgtgggggggttccattggttttctcaaacagcctcttattcatttttttggaacaaaaacccatctcctggaactcttcaagcatatgggccccttcaaaaaccccccagacattaaccccccaaagg

SEQ ID NO: 26677 - DNA, 410 bp, Glycine max
  unsure (1)..(410): unsure at all n locations
  Clone ID: PAT_MRT3847_12408C.1
aataattaccatcaagcgcccncnggagaacaggaggggaacaaagcagcaaaacggccagaccccaagcnggcagagggacccaccagggaggccgacaaagacactaaggcccacacccagaccaaccccaaaaccggaaacacaggccaagaaggacctcaagagcaccccccagaagcaaaaaccagaccaacccagggcgacaaccagaaagacaacgaggacagagacccccgtgacaacccacacgacacggccgccaaagcaacaaaacccgaagaagccacaagcagcggtccaacaccaacagacagagcagggctgagcccacaaacggacaatcacgagcccaaacggggggcacaacaccagaacccgggcgcagagggggcagacaacgcaccccc

SEQ ID NO: 26678 - DNA, 600 bp, Glycine max
  Clone ID: PAT_MRT3847_124090C.1
agggcctaggggacatgagtgagctcattaggagagaagaagaacatttcaccaaactaggaccaataggaaccagaaagatacaaaataatgggggagatgtgttctatttacagaacttattagtgggtatctcatgtagggggataaggctttcatgttgttatattactaagtatctaacaagtaataaattaaccaatcaagctaacttttccaagcttcaagaatgtgaggcatttcggctagacatatcaatttagaaacgtaataaaaaacactagaacgtggaaaaatcttcaaaaaggccatctctttcccatatgttggtcatcttactatacacttcaagcatcgggggccttttaggaggtaaaggatgaacacagtcacatgcaactctgagtaaagcagaaacctcatcttcaaattctatctcatttagacatttatccacgggatcataaaagccaaaagggtcctcgaacagattagtagcatatgtgtaagttgtaaaaggaccattagtattagcattgctaaaacatttacttgtttgggcgaatgccttccccctaatcaccctaaaaagcaaagttc

SEQ ID NO: 26679 - DNA, 157 bp, Glycine max
  Clone ID: PAT_MRT3847_124091C.1
cccttgccgactacaacatccaaaaggaatccactctccacctcgtgcttcgcctcaggggtggcatgaatcttgtcaagatttgatggagaatccctgagtgatctgaacatatattagcaacagcagagtccataaagtttttgacatagtgaac

SEQ ID NO: 26680 - DNA, 225 bp, Glycine max
  Clone ID: PAT_MRT3847_124092C.1
acgagatcatgaccctcaccttagaatccgtaagccattacttaccatacaaattttttcatggagatgattggattaaagtcactgggattccttactcctctgctgtcacagcccccaataagcactaattatctttcttagggaggagcatccgtgctaatatgcatccagagactagttatttttaatgcttgtgtctttcacatttattttatttgtttc

SEQ ID NO: 26681 - DNA, 165 bp, Glycine max
  Clone ID: PAT_MRT3847_124093C.1
gcatgcacacgatactcagaactcagctcgagtttcacctgataccttgagagagatcgctcacctagccttcgatctcttcgtttcatacttagagatcaccatgctttgattccacttgatttcctttctgggtattctgaggggctcttggaggactactct

SEQ ID NO: 26682 - DNA, 321 bp, Glycine max
  Clone ID: PAT_MRT3847_124094C.1
ctgcgaacatgggagagtgtatccgttaaaatcctatttctgcatatcacttaaacgagatcaaacccaccctagcacgtccattacataattaaagcgcctcctaaatatttattggctcatccattggccttataaatggaagattctaagggcacgtttacacacactacttcaccggtgttgggttgcaagacaaccctacttgacaatgtaaatttgacctgaaaagccttcacccttgaaaagcctattaagcatgtctttgacccctggacttaacgggactgtgcatatttgggggggccacaaatatgaaga

SEQ ID NO: 26683 - DNA, 2549 bp, Glycine max
  Clone ID: PAT_MRT3847_124095C.1
ggatttgtgcacttgctgatagatgtgatcagaagggactgagtgtcaatgagcgtcttggcagaatggctgaaacactagaaaagatgatggaatcatgtacacaaaaggatacccaacaaatggcgggaagtaccgatgttgcaaaagtgtcaaattctagtatgactgaagaatctgatgttccttcacctaaacttagagattggtctcgcagaggctcggaggacatgctagactgtttccctgaagccgacaattctgtttttatggatgacctaaaaggattaccacttatgtcatgtaaaactcgttttgctccaaagtctgaccaaggtatgacaacatcatctgcagggagcatgactcccaggtctccgttgatgacaccacggacaagtcagattgacttgctcttggcagggaagggtgcttattctgaacatgatgatctgccgcagatgaatgaacttgctgacatagcgcgctgtgtggcaaatgctcctttggacgatgatcgcacgacgtcatatttattatcttgtcttgatgatttgcgggttgttgtagatagaaccacagtccttcctgggaattttgatgcacttactgtggaaacctttggaacgcgtattgagaagctgattcgagagaagtatctgcagctcactgagatggtggatgttgaaaagatagatacagagagcactgttgatgatgatatcttggaagatgatgtggttcgcagcttgagaacaagcccaatccattcttcaagggatcgcacctctattgatgactttgagattataaaacctatcagtcgtggggcatttggaagggttttcttggctaaaaagagaacaactggtgatctttttgcaataaaggttctcaagaaggcagatatgatccgtaagaatgctgtggaaagtatattagcagaacgtgatatcttaattacagtacgcaacccttttgtggttcgattcttctattcttttacatgtcgcgagaacttatatcttgtcatggaatatcttaatggaggtgacctgtattcattattaaggaatttaggttgcttagatgaggaagtcgcccgtgtatatattgctgaagtggtgcttgcattagagtatttgcattcactgcgtgtggttcatcgtgacttgaagcccgacaatttattgatagcacatgatggtcacatcaagttaacagactttgggctttctaaagttggtctcatcaacagcacagatgatctgtctggtccagcagtgaatgggacatcactacttgaagaagatgaaactgatgtatttacatccgcggatcaaagggaaaggagggagaaacgttctgcagtgggcacacctgattacttagccccagagatacttttgggaactggacatgggtttactgccgattggtggtctgttggggtcattttatttgagttgcttgttggtattccacccttcaatgcagagcaccctcagattatatttgataatattcttaatcgtaagataccttggccagcagttcctgaagagatgagtcctgaagcactggatcttattgatcgattattgacagaagatcctaatcaaagactaggatccaaaggggcatcagaggtaaagcaacatgttttcttcaaggatataaactgggacacacttgccaggcagaaagctgcatttgttcctgcttctgagagtgctctagataccagttacttcactagtcgctactcatggaatacttctgatggttttgtatatccagcaagtgatgttgaggattctagtgatgctgatagcttaagtggcagcagtagttgtttgagcaatcgacaagatgaagtgggagatgaatgtgggggtcttaccgagtttgattctggcacatctgtcaattactcttttagtaatttctcctttaagaatctctcccagcttgcatcaatcaactatgatctcaccaagggatggaaagatgacccggcaacgaactctagtgcatagctgtatttattatcctgtgtcaaagttcagaatttggttttcgacctatgatccaagcaattttgggggcataaacacctttgtcatttgtataccttgtacatatttagaggttcaaagtggttcaggatgtactctttgcttgttagtttacagggcaacaatggggggtttcaatcttacggttattggtattcacaattgtgtatgaattgagaattgtaaatttaaaaaatgcagatcacagttgctcacattattctgtggtgtgctctttattggcaatgagaacacatccctttttgttcaggccactgtaatattatttacttacagaattgagatgctgctgtgaagtcttttctgaactccccttcaagcattttcgagactttttttaacaccttgcgtccttaatgatcactaaacgatgtataagctgatgtcattgacttgttccccgtgagtcctattggttttattaactttgctaaggaaatgttggttttg

SEQ ID NO: 26684 - DNA, 410 bp, Glycine max
  Clone ID: PAT_MRT3847_124096C.1
gaaaaaaagaaaactcccttaaaaccctcctttttaaggtcctttcctttcttcttttgggtctaagaaaaaacaacaattcggaacaaaaccaccaccttggcggcaggggcaaaaactcccttaaacactttctcttttttaacattaacactctttttttaattctttttcctcaaactttttttttcttccccaaccaccatcaacgaccttttccgttccaagggcttaccaccggggttcttcccggggggggggaaatcttccaccttttttgaaactgggcacttggaagggttcctggacgcaccatgcttaacaaattacgagaccagagtcctttttgaccaagtcgtaactgttaacctaacttacggaggcctcataggggtggggggtttccagta

SEQ ID NO: 26685 - DNA, 556 bp, Glycine max
  Clone ID: PAT_MRT3847_124097C.1
gagacgccatctttatgaaggtaagtgagtagtgggaacccactttggtgcgtgatgactgatggtatagtagggaaacaaactcactaaaaaaaagtactaatattttatttaaagggaagaggaatcttgtcgttttataaaacatgttatattgttaccaaaaacacatgtttttatagaaccaaaaacacatgttatattactatacaaacagcttttaaaattagttttaagttttaacttctaaaaagtattaaaaatttaggtgttttatttatttatttttacataattactaaaaaattaaacgtatttttaatttaaaaatacgttctaaaaagtaaaacaaagaggcccaaaatcattttatatttaattgaagaaaaattgaaattttatctaatagttaaaattatctttattaattgtagacgtgtggcagactatcattcatattttattgctaaataatcagacagtattcagttatcaataatataatacttgcttatatccagctaccaagaaaaaaaatattatttatttttaatta

SEQ ID NO: 26686 - DNA, 992 bp, Glycine max
  Clone ID: PAT_MRT3847_124098C.1
ggtctgttggggtcattttatttgagttgcttgttggtattccacccttcaatgcagagcaccctcagactatatttgataatattcttaatcgtaagataccttggccagcagttcctgaagagatgagtcctcaagcacaggatcttattgatcgattattgacagaagatcctaatcaaagactaggatccaaaggggcgtcagaggtaaagcaacatgttttcttcaaggacataaactgggatacacttgccaggcagaaagctgcatttgttcctgcttctgagagtgctctagataccagttacttcactagtcgctactcgtggaatacttctgatggtcttgtatatccagcaagtgatgatgaggattctagtgatgctgatagcttaagtggcagcagtagttgtttgagcaatcgacaagatgaagtgggagatgaatgttggggtcttaccgagtttgattctggcacatctgtcaattactcttttagtaatttctcctttaagaatctctcccagcttgcatcaatcaactatgatctcaccaagggatggaaagatgacccgccaacgaattctagtgcatagctgtatgtattaacctatgtcaaagtccagaatttggttttcgacctatgatccaagcaattttgggggcataagcaccttttgggtttgtataccttgtacatatttagaggttcaaagtggttcaggatgtactctttgcttgttaggttacagggcaacagtgggggtttaaatcttcggtttattgtgtatgaattgagaactgtaaattttaaatagcatattcactgttgctcacattgttctgtggtgtcctctttattattctggcaatgagaacacatccctttttgttcaggccactgtaatattatttacttgcacaattgagatgctgctgtgaagtctttttctgaacacatcccttcaagctttttcgagatttttttt

SEQ ID NO: 26687 - DNA, 443 bp, Glycine max
  Clone ID: PAT_MRT3847_124099C.1
gttttcataaaaccgctttgttgtttttattctctcactttctctctcttctcttttatcgggtagtgtagtgaccctctctctcattctatcgttcctgcttcttcgctgcctcgacttcttctctcgcggtgctgaaggagctcacgcatggcgactcaacttcttcatcgctaccccttgcacttgatttggatgctaattttttcatcagccagaaatgcttggagagagcccattgcaactctgcatttgctacaccatgaaagtgtgaggaaatcaatattgtactttctaattcctagttattggatgggaaaaggaggtcaaaaagtgaaagagggtggggtcttgttgatgcaaatgttgttgttcagatacgtggccttgcaaagacatatcctggaacacgtagcattggttgctgctttaaatgtaaaaga

SEQ ID NO: 26688 - DNA, 436 bp, Glycine max
  Clone ID: PAT_MRT3847_12409C.1
cggctgcgagaagacgacagaaggggggaggtgagggttggttcatttgatctgcgactgagagaagagaagagaattgtgatggggggaggacagggtcactgcacaacctacaaaggtgttaccattcatcagccaaagcgctggcacgctatcaccggcaagggtttgtgcgcggtcatgtggttttgggtattctacagggcaaagcaagatggtcctgttgtattggtaacactgtgataattaattcaatttgtttctctcacccctcctgttctgttcacaatacccctctttttttttctttttttttcattttcgatcttttctagggctggagacatccttgggagggtcaccatgatgatcatggcaagggccattagcattccttaggtaccttacttacccttttttttttaactttactcct

SEQ ID NO: 26689 - DNA, 588 bp, Glycine max
  Clone ID: PAT_MRT3847_1240C.1
aagtaaaggaagaacagtaatgaaatcattatccatatatcttcttttacattatactagtaaaacaaggaagctcacatgcagcacaggaataattttcaaataagcttgacctcccacacaaacatgaattccttccttgaaacccttgtcttgtcgtgcacgtgcacgcagatgcctatgccctcacttattttcctttctctctttcaactttctcactaaaacgttatattacactcacaccacttaacaaattattacaccacaccatctatcccgggtacgcattcggatcccgggtcacccactataactagcaagtcttcaaggggttcccacacaagcaatcattgctagtaaacgacgacgcttcgaggtgatcgaagggtgctccgagaggaatggatccacacaaatggttatggctaagatccaaatgcccgataaacttagccgaagccaacgaagagggtacccgaccctttaaattattgaaagacaaatccaaagccatgaaatacgagtgtgacccgaacacgtcgggtatggacccttaaaacccgtttcgactaaggttcaaaatgc

SEQ ID NO: 26690 - DNA, 481 bp, Glycine max
  Clone ID: PAT_MRT3847_124100C.1
tacggctgcgagaagacgacagaagggtactaatatataatcatttaactaattaatatatacatacttatcggtataatatcatattattctttgatagatatatagatcaaattattttgtatataaagttaaatatgtcattttataacctttgacacttaatatcaactaatcttatgtcatagagagagataatataacataaaagcaaccaaaaatcatactattatcgtgaaaatgatttattttattttattcttaattaatgtatatatagttacataattaaaattaattctcacttgagaacaattctgatcacttgacatatgctgtataaatataaaaatatatatatcagacttgactagctcaggtagtcaggttaatttcatatttttatcattgtgtcaaacaattaattttcaatgcttaaagtagcaaaatgaaacaagtgagatattgtacatgatgcgta

SEQ ID NO: 26691 - DNA, 560 bp, Glycine max
  Clone ID: PAT_MRT3847_124101C.1
ggctcgagatgacattgagccatggatgatgtggggctattatctatctcctatgatgtatggtcagaatgccatagtaatgaatgaattcttagataaaagatggagtaaaccaaatacagaccctagaattaatgcacctacagttggaaaggtgcttctcaaatctagaggcttctatacagaagagtattggttttggatctgcattggagccttgcttgggttttctcttctcttcaatctcttattcattgttgctttaacttatttgaatcctttgggttattcaaaagcagtcattgccgatgaaggtgacaaaaagaataacaagtcatcctctagccaacatattcttgaaggaacagacatggcagtgaaagaatcttcagaaatggctagttctttgaaccacgaaccaagaaggggaatggttctaccatttcaacctctttcacttgcattcaatcatattagctactatgtagatatgcctgcagtaagtctctaaatcctagaaagtggtttcatttctgctttccttacaactggcatgtatg

SEQ ID NO: 26692 - DNA, 259 bp, Glycine max
  Clone ID: PAT_MRT3847_124102C.1
ctccgtcgccgaccgcctcgcccgcatgaaggtcgactacatgagagaaggaatgcgtacaagtgttgaagcaatcctattggtgcaagagcacaaccaccctcacatactgctcctgcaaatcggaaatgcattctgcaaacttcctggtggacggttgaagcctggagaaaatgaaatcgaaggtttgaaaagaaagctgtgcagcaaacttgctgtgaactcgccttccttcccacctaactggcaggttggagag

SEQ ID NO: 26693 - DNA, 365 bp, Glycine max
  Clone ID: PAT_MRT3847_124103C.1
agcggttttatattagtctgttatgcagttggaatgcgggcacggtaccttaccagtatcctcacgttatttcattcattttttatgtgatggatgatcagtgaaactataagtaaaatactagaacactaatcatacttattttctggactaattaagatgatgatgatgataaaagaaaacgagtgtgtattggtaaaacaaatgctcatttaatttttctattttcagaaccataaatttacttaatgcagcgatatcttttaagtattattatatcacatattgaagtaaagcatcaaccatttaacatgttttttaagtgtagattaaagttagcattattaacatgtctggggtgcaat

SEQ ID NO: 26694 - DNA, 1042 bp, Glycine max
  Clone ID: PAT_MRT3847_124104C.1
ttaaacgcaaaaccaaaagagaaacaaatcaaggttcaaatcaaatgggttcaaggacacagccagcagcagctgatcgtgtctacgaagactttgtaccattgtatgaatgggatagaaatgaaaggcttgtcaatgttatgctaccaggttttagaagggatcaattgaaggttcaagtgacctcaaagctcaccctaaggctaatgggtgaacgactgatcactgacaacagatggcgtcgtttcaatctagaattgcctcttctttctgattatgacaccgacaatgtgactgccaagtttgagggtgctaagctatcaattaaatttggagaactttcacagactaagcctaaggaaacattaatagctcccccatcacaaaaaattgaacagcaaaagccaacccaagaaggtaaagtctctgatcaaaagacaccacagaataaggaggaaaccaacaaatctgaaacaaaaggtgctctggaagcaaagactaatgaaggctcaagtgatacaaaagaagcaccaaccccccctactgctcctaagactaagcctgtttcaagaaccaaaacaaggctaatagatttcagcctcggttctggatcaaatcatgttgatgatgaagtcattgaagatttggaggcagggaagaacaagtgcaagaaattggtgaaatggatgctgataatctacttggttgtggcccttgtgggacttggggtttactatggcaaaaatgcattgacatcatactctgaagaatcatacttccaagagctgtgagattttcgccctcaagtagtactactacttgtacacgtaaagagaagaacacttgcattcatttgcgtgtaaatgcatgaattcaataaaagaataaagtaaaaaatgtttgaggtttcacaactataatttgagctcattgtatccgttgtatttctaatacattcatccagaattaaatgactcaaattctgcagtataatttcccgtagtgttgcttataaaatctatctaaagattcaggagcaaaa

SEQ ID NO: 26695 - DNA, 1313 bp, Glycine max
  Clone ID: PAT_MRT3847_124105C.1
ctcgagccgaatcggctcgagcggctcgaactatctccgaatcaggagcataagctatgtgtgaagatgctttccatacactatttgtttttcttatttctatataattaattatgccctcttatccctccattccttgattctctctctcacaaatggaagcaaaattggttgcacagtgcaatagtccaacactaactttagctcactggaaactaaaacaaccttgtgtggttggagtgctggcaaggcctgctgatgacatttcaggagaagcaagaaaaactaatcatgtgtacaaagatggcttgtttgatcgcatagccataaactatttatcaaaatgcgttcaagaggcaacaggactcaaaaatagtaagagtggttatgagagcctggtagaggcagctaccctggcttcgcagagatttagtcctattgaacagcatcaacttgtcattcaatcccttgacagagcctttcccaagccaatgcttttactgataaggacactgctaccaccctctaaattcgcaaggaaattgtttgccatcttcaccactttgttctttgcttggttagtcgggccctctgaggtgagagaatcagaggtggaggggagaagagaaagaaatgtagtccacataaaaaagtgcaggttcttagaagagacaaattgtgtaggaatgtgtatcaatctttgcaaactcccatctcaatcgtttataaaagattctctgggtatgtcagtcaacatggttcctaattttgatgacatgagttgtgagatgatatttggcgaggatcccccagaatcaactgatgatccagcactgaatcaaccgtgttttaaactatgcaaggcaaaaagaagccatggaaccaattgcctcgttataaattaatgcagcagggtttgaggtcagcaaggaagaaacaataatggcccacctttcatatgctgacaaagctgagactcatcacgcatcatttttttatctcattattattaggaaaacagctaagtggtccaatgcactttaagccattaacgtctcatgtgcaagtggatttctgtcatttcattcaacagttagaaagttactaattggcgctctagtgtgtagaactagaagtagagaaagtggacactggaatttttatatatatagtatactgttctttccaatgccactttcctcctcccttttttattcttatttcacatattgttatagtacagaatatataatggttaccataaataaatgactattgattattttaaaaaaaaaaaaaaaaaaaaaaatttt

SEQ ID NO: 26696 - DNA, 269 bp, Glycine max
  Clone ID: PAT_MRT3847_124106C.1
caaattgtggtcatatgggctcactcctggtctttcatgttctcgggttgcgcgcacgattcctaagtgcattctacagcaaactgtttggaatctactggcatcagtgcgaccaccactaggtagggattctagcctgtgtaccgttcgccaaattcctatagaccttcctggtggaggaatattagtgcacatgaccgctgatctggtcaaactaagactacatgctgcaattagcctcttgctgagagttgctgcttggtataaag

SEQ ID NO: 26697 - DNA, 301 bp, Glycine max
  Clone ID: PAT_MRT3847_124107C.1
gtggctgatttttatatcacatgtctgcaatacgtgtaatacgggatcatctagtgcccctagtgaacaggaccaggccacaatacactgaactcgaatatgatgcgaagcccataccattgcccatactcgaagaaccacccatcctagctacatggatatgatgaatacatcatacgctatatactccagacctcctgatgagaatctacggacttgttggactacgaatgctatcctgacgtcataacaggtccactctgattggacagtggcatctgcagtctgcaggtggcggaga

SEQ ID NO: 26698 - DNA, 1326 bp, Glycine max
  Clone ID: PAT_MRT3847_124108C.1
acgcggctccactctcattttagtgtgctactagtgatgtcagttatataagggtggtgaaggggatagttcccacttgggcttcatcattaccaaacttctctacaaaacaaaaccaacccccccctccttaaggccttaacttttgagtcaaaatttatcatttcaaagcactctccaatagagataagtttgattcatccatcccagttggttggttgtaacccggctctggcactgttaaaggtttcaatctctcattgttgccagcttttgtgtacatgccagtttatagcaacctttaccacttcttttaaaccaaaacaataagcttttttcccttcattgttgtctcagaaaaaaaatggccccttctggaaggacaacaacagcatcaacaaggacaacctcaaagacgacaacaacaacaagaagaacaagacagcagagaagaacaacagcaacaacaacaaacttcaagaagaagcagcacaacacaaagagcaacaacaaaaaacaacaagaacaggttcttgttccaactgttttgccctctagctgcagctcctcctccataagctcacaagactcttctaattcaaaggaagtgaacaacaacatgcatggttctgccgaggtgattgatgttgtttgcaacagcaacaccaacagtccatgttccacaccaaagggtcagaaattcaggattcctgagatttcaacatgccctccagcaccaaagaagccaagggttctctccaattgctctttgcgtaggtctccactctcattctttgcaccccctgacttggagcacttcttctttgtggcacttagagatgtctcggtttgattttgtgtgttaatagaagattaagaaagatacatgtgttatagtaataagatcataacactttagaagatggacttttgaagtggttttttagtatattattatgtacctctagcaaatcacagaggtatgtatgctttgagaactttagatgttggtgtgtgttcatcttaggaaaatagttactctttaatttctgctaattttaacaatttctagggtttgccagtcactaaatttagctggggtggctctccaactaaatttggattttaagcttacttttttttctcccttttcctcttatagaagacatgttctgacctttaagtgtgtgctgagtgcaaatgtaatgggtttggtttaaggtttgtgagtgttcaagcttgcaactctacaaagcttcagttgtcaattagagaaagtaaagtcatacactttccttttgtatgcaaaaatctcttttattttca

SEQ ID NO: 26699 - DNA, 262 bp, Glycine max
  Clone ID: PAT_MRT3847_124109C.1
gtagcatctgaaactgatcattgcagaccattcttctgttctcgtagtattaagatatttgatgtgctgagttttcaattgggaaacgaaccattcactttgttttagattcgtattcttttgctcaaacgcatggcttgacagtttacaatgtggcaattcaattattttccattttttaaaattaaaattagaactctacatttttatttttatttgttttcaaacatgttattagtttcaaggtctagcttctgtaagt

SEQ ID NO: 26700 - DNA, 594 bp, Glycine max
  unsure (1)..(594): unsure at all n locations
  Clone ID: PAT_MRT3847_12410C.1
ccacgcgtccgtccgccctgtcttaccgtcacggcacagcaaccactcctcgctagccgttcgtgaccttcccccttctctgcttcacctccacaccgcgccgtactttcgaattcgaagcactctgctttcaatactgactgataccttcattctctggcgcttcagcttcgtttagcagaaagaaaaaatgagtccctcgaagaagatcgaacccgtaagaggtcgaaggagaaataatcggcaccacggattacttcttcgtgaaagttggcgaggcccttcggtttgaagtcctccgaactccgttttcgacgccgaaaccctcccctcgcagcctcttgcgctctccgaacgctttcgcctcacttttcgttgctcattcttcaaggtttttttcgttgcaaagacgaaggaccttattgattccgcgaaggagcttaaggacaagggaagtggctctccagtggagcaactgagtctgnncgatgntcctgttgnggagggntngcgcattggctctttccaccgataattcgacgcttgcggcttctgtctctggcgactttgggttactcggttgagagctttctc

SEQ ID NO: 26701 - DNA, 481 bp, Glycine max
  Clone ID: PAT_MRT3847_124110C.1
aatactaaccatatttgtatggaaatattcactcaaaagtctccaatataaatataagaagcaataaaaacagacatcataattacatgattcgatcatatagacctatatccacggacatagtaacgaacaaatttcactataacaaaaatttgagtacaatctacttgcaatttaaaaaatataaccccaaaaaaagaaaataataagctaaatgacaacaagtaaagcaaaaagggatctttgatacatgacaatgttgttcctttaggatcggcatttggacacaacatgatgaatgatgatctttcggcgtaaaattgtcatgctgcttatagaactcatgtttgcaatacattgtacaacaatacatttcacacttaaaaaattgactaatctgatctttgtcttaatgactcacttacctgtacatttaaattatataatctaataaaattaactctacttgcaactaaattat

SEQ ID NO: 26702 - DNA, 318 bp, Glycine max
  Clone ID: PAT_MRT3847_124111C.1
cgtcgccatgggccttgttatcttttgacagaggaagggctccgggtaagaatgtttcgctcacatgaaggaccgtaaaggcgctgctcgcctgcgcgccttggatttcgctgagcggcacggctacatcaaggtcattgtcaaggacatcatccactatctcttccgtggcgcgcccttcgccaaggtggtcttccgggatccgtatcggtttaagaagcgtacggagctgttcattgccgtctagggcattcacacgggccagtttgtgtattgctttaagaatgcccatctcaacattggcaatgtgcttcctgt

SEQ ID NO: 26703 - DNA, 638 bp, Glycine max
  Clone ID: PAT_MRT3847_124112C.1
tttttttttttttttgtcaatagccgtagtattcatgtatagtcaatctaatgtacagctcatagagtcttgtttgtatcattgacatgacacatatgctaacattgcctacatatttgaccttgtaagcaaaggtcaatgaattagcttctctgataaaaacaaaaaacaaataaaacgcaccagcaggctttattcctcaacccaacttagccttgagcactctgactctaataattttggttatatcacttgaaatgctgctaaccaggaccatatatcagtggttaactggttgttcaaatacttaaaaccagaactagatagtttgcctcagtcatcagtcaacagatggatatgtcatgtcatggtatgtcttttggaacagaaaccgtttctttattctcttcctctgccttaagcaaggggtttgttagtgatggctcagtcacttttttttcattgtttttgccccaaaggaccaagtatagaccaagcacaatgagaattgcaccaataagcccttcagagtatagctgatcaccaagaattagtgctgccatgacagcaaactagatagttgcactggctggagacagcaacaacacaggaccaccctttgaatacaccatgttttg

SEQ ID NO: 26704 - DNA, 1011 bp, Glycine max
  Clone ID: PAT_MRT3847_124113C.1
caaagtaaagcagaggatgtaaatggcttcctctctatcataaaccaattatctcttccctcatcttctttcttttctttcagcttcaacagccatgcctcgcccacattctccttctttcctcctctgtcaagaacactactctttcactttccaacaacattctcaaactctctccaacacccaaccttctcctttgacttttcccgacaacctccaacacgacctccttctctctctactctccaaacagcgcgccacgcattccactctctcccctcgccaccacgttgtacgtttgatttctaaactctccaacttccacggcttctctcctctcaccaccgttctcgccgttaactacttcgacaggttcgtcgccaccctaaggtttcagagcgaactaaaaccatggatgactcaactgaccgcagttgcttgcgtctctctcgccgccaaagtggaggagacacgagtgccacttctttcggacttccaagtggaggaatcgaaattcttgtttgaagcaaagactatacagagaatggaactcgagccgctcgagccgctcgaatggaaaatgaaccctgtcaccccaatttctttcttccaacacttcctcgctaggcttggtttaaagcgccacttgcattcggagtttctgtgtaggtgccaacgtcttcttctctctgtcattgcggattcaagggttatgagttatcttccttctacactggctgctgctataatgatccacattattaaagagattgaaccattgaatgctacggagtaccaaaatcagcttcctggtttacttaaaactagtgaggaacaagtgaatgagtgctacaaactgattctgggactttacgtttgcagcaacggcattcacaatttgaggcgcaagcgtttgtccgaacctagtagtagcccagatggggtcattgatgcatctttcagttgtgacagttcaaatgattcatggacagttgcatcaccttcagttga

SEQ ID NO: 26705 - DNA, 323 bp, Glycine max
  unsure (1)..(323): unsure at all n locations
  Clone ID: PAT_MRT3847_124114C.1
gancngggcattnagcngngnctnnggtgganggagnananagnacnaatttngcanngaagnanagaggtgatttaatngntgngcatagnggtatantatngtgcatgatantgnaatgnctanantancangagagtnagtcattngcgtcaagttgacaancataaacaatatgtgtgcatatgggancaatcntggtatgtcagggnctcgnctgntgggcagcantncctcagtccatgtcacagnaaactgtgtggaatcanatggcaanagtgagaacaccatttgaatttgattctagcaagcagcagcttttn

SEQ ID NO: 26706 - DNA, 153 bp, Glycine max
  Clone ID: PAT_MRT3847_124115C.1
agcgagatggacttatatttcgttggactgaactgaggcgttgggattaacatatatactttcatacactaaaagtgtcctcaccccaatgaaattgtaggggtcctatggggggaacacatttttgttagaccgcctcatatttaaggaccc

SEQ ID NO: 26707 - DNA, 889 bp, Glycine max
  unsure (1)..(889): unsure at all n locations
  Clone ID: PAT_MRT3847_124116C.1
ggctcgagggaaactttttcgattttcgctttctgggtcggttccataatctgtgtcagcaaactctttcacgagtttttcactctcttgttgttaagtgatttctattgacaccatgcatctaactagttttttttcttgcccccttttgggatttattcaatttgcttaattttagaggtgtgaattgttgtttgaaagtcacaagcaatggtgaaggacactgcgtattatgacatattaggtgtcaattatgatgcatctgctgcagagatcaagaaagcttattatgtcaaggctagaattgttcaccccgataaaaatcctgaggatcctaaggccgcagaaaactttcagaaacttggtgaggcttaccaggttttaagtgatcctgggaagcgtgcggcatatgatgagcatggaaaggagggagtaccacaagattccatgatggaccctacaactgtatttggaatgatttttggaagtgaattttttgaagaatatattggacaacttgcactggcttctttagcatctatagaaattgaggaagactcacaggatcctgaagttttgaggcagagaattcaagaaaagatgaaagcttggcagaaggaaagggagcaaaagctttcaacatttctgaaagatcgcctgcaaccatttgttgatggtcgagaagatgaatttacagcatgggcaaaatcagaagcacgtagtctttctaaagctgcttttggagaagccatgctacatacaattggttacatctacacacgaaaagctgcaagagaacttgngaaggatatacggtatatgaacgttccctttttggcagagtgggtgcgaggcaaaggacactgtataaaatcaccagtaacagcag

SEQ ID NO: 26708 - DNA, 416 bp, Glycine max
  Clone ID: PAT_MRT3847_124117C.1
ccaacttgtacgcccaggcggacgcgggacgcacagggggctatattgagggaagatggggccatgcgctcgctggagcaagccaatccaatacacggactcaatcaaggactcatccaagaactgagggtagaatggctggctattggatgcatcccatatgtgtgggcagagcctaaatgggaaggatgcagatgcattacttgaaaagcaagtcattgcagatgaagacaggctagcccctgggactgggacatagacagtatgtacagaagaaagaagaggggcaaaagaagaatcagaaagtactagagtgacggatgaccacatagataaggcagtgaatgcgggtggttaggataaagagctggctcatatggaggaacacatgaaggttgtcatgggcaaaggggggg

SEQ ID NO: 26709 - DNA, 182 bp, Glycine max
  unsure (1)..(182): unsure at all n locations
  Clone ID: PAT_MRT3847_124118C.1
cgtacgtnagctcggaattcggctcgagcnctcccnnnagcngntncngntntntttggtcttagacgcngcangnnannancggtcactnatggananttctggctgtgcttanaatnctttncaagctattnatcagganccntncaacnncggacaattnccancntcttttgcgcttt

SEQ ID NO: 26710 - DNA, 333 bp, Glycine max
  Clone ID: PAT_MRT3847_124119C.1
cccacgcgtccgcccacgcgttcgttcattcttcatccatagacatgggggtcgtgacttttgcagccgtgagctatctcgtcattcactggcctcaaggcaggcgcatgcaatgtgagtaccgtatttaaagtctaagctacataagccacaacgttgcgcatcaaggctttgctgactgacgttgtaatcgatgttgtggccactggcgcgagtgcaactctggctagcatcgcccttgccattgaagtgatgctggatggtcatgactggtctctggctgacgtatcaaacaatgtgtccttgacatatgtggagaagatcgtgttccag

SEQ ID NO: 26711 - DNA, 436 bp, Glycine max
  unsure (1)..(436): unsure at all n locations
  Clone ID: PAT_MRT3847_12411C.1
cccacgcgtccgcagatttcgaccaccaggacatttcaattgtaaaacttatataattataacttagttcaagatcaagggatcatcgttcatcaaacgaccacatgcaccttatcaacatcttattttcgtgttcatttctttcacatgtgcataatcgagtgtcacgttagataactgtcaatttcgtcaagccgaataatatttaagaattaaggaattaacattcaagacacacatgagaatctcaattgacacttcctctatttggttttgaatggtcaagaagtgattacatatggacaccatccttttgtcttcatacctcgctcacatttagttaaattntgttgaccaaaaatcacttacacaattgtcacacttatttcaccattatcaagtgaacatctaactaatagtttaaccatatttcact

SEQ ID NO: 26712 - DNA, 536 bp, Glycine max
  unsure (1)..(536): unsure at all n locations
  Clone ID: PAT_MRT3847_124120C.1
tccggttttttccttttttttttctttttttttcttatttatccctaaccttaaccnnnagcanncgaagnccacnccncnncgcgaaancanggcgacgacnnnggcnacaccaaaacncagngagganaaagncaggcagggggnnganacaagacnaggaggagaanacccacccaaagcngnngcnaagnagaagggcagncnggccccggggagcgggngnanggaggnaaannnacagcncngccncngcnccgaaagagcanncnccaanaacggnnncacnccnnncgggcgcaccgcngcagaaaaaaagaaagaaacnnnaccagcncnaagagaaancagagagcgangcancaancaacnngagcaaaggcgancngaccacangaggaggcnnaacccaacnccananaaggggagggggagngcaaaannanacgacnncanncannnnccgggggcncaaggaggcaccagnnnggggagcnacagnaaggcnaaaaaaagggnggcgngccnncagaacc

SEQ ID NO: 26713 - DNA, 303 bp, Glycine max
  Clone ID: PAT_MRT3847_124121C.1
tttactctttttctcaatcacttacacactgagcgtcatcaatagcataaacattgggcggaaaccctcttgaaacggcaccgtctagttcataatctacttcttctaaggattccccttaaggtcctacatatgccactggttcgtggccttgcttcaactcaatgacggggctttgcgcccaaacgtttgctgtgacggatgggggtgttatcgaattagctcccatctgttaactctagttttggcgccggaagcaggacctttcgtacacagcgccgcgctttgtgatcggctacccca

SEQ ID NO: 26714 - DNA, 228 bp, Glycine max
  Clone ID: PAT_MRT3847_124122C.1
tgctagttcagcatgagatgcagcaacaattccgaagccttagctccagggaacttggctccaactctgccactgttgctgctgccgctgccgccgctggttcccctgccaattcttggtcaaatatgggagtctccaactgcacgcgtgacttggcctacaagtcatattaactatggaagcatcgatgatcaacgtcaatttagcacgggtactacaggtagcagc

SEQ ID NO: 26715 - DNA, 411 bp, Glycine max
  Clone ID: PAT_MRT3847_124123C.1
attgatactgggggtttggcacctttcaaaaaacatccttttaatataacactgtcactgtccatgttagtttcaagcccaccacatgaaatttttccttgaaaaagcttcatcgattttgctcaaaaagtcaatgctattaaacttgctaagaaatctgtcaagaatataaacatggatgcccttccttgacaaacttatagagttatacctaatcttaatcccaagcacttgttttctggtaagcaatttcaatttaaaaactgagagacgcttggacatgggatactttttaatgcattttatagtacacctgttagcatttttcaagtcttccaaataaaaatgttatttaatggtaattttttgttggactttaatgttctgtgctggctacataatttacttata

SEQ ID NO: 26716 - DNA, 400 bp, Glycine max
  Clone ID: PAT_MRT3847_124124C.1
cgacgcttttacttacattgcttctctctaacaagaatggaccagtttcctcctacttcatggcgcactacaagggcaagtacaaagaagagctctctgtcctggttacagacttcgggactcatggcatggggcactctgaggctagtgagtgaacactatcctatgtgaagtggacgtcaggacaaatttaaacaacatgtgattctacatcaatatctctgtacgaagctgagttacactgtgccgagatgttcggcaatatgctaccagtgtcatatctggtatagaactcctctagcagactacagtatgacgctacttcttttcgctcgatttgaatgactgatgccgcagctgactggcatagaggtcttcatagacacacactagctcgctg

SEQ ID NO: 26717 - DNA, 1601 bp, Glycine max
  Clone ID: PAT_MRT3847_124125C.1
gacttgacagaaaagaaggtttattcaatcttttggaggcctgagtgtcgtccccaatccatagcttggaattccagaaaggcttcagcttcagcttgctgctcccttctcaacttcaacaatttcgatagcacttaatgtcctgttattgtagggacatcagtattgctaatcatgatatggtcaaggctaagtaggagaactcatctcttgccataccttagggctttgcaaacagactcaattgaatccaggtgcctatctatcattcctaaaggatcaagttacaagttcattaatcctaataccagcttccaacacaatttctcttgtaatatacggctatcaaagtttaagcaagaattgagtacaaaaccattccatctgtgttaccgctcttcagctttggcttcacagtatgttggaaagtcatgttccatgcctggtttccgacacttctcttctcatgcatccaaagaacagaaatcacgaaagatgctttatacttgacgggcttagtttttgctatggttgggtgcacatatgctgcagttccccttacaggagattttgccaagcaactgctatgggggactgggaaattgtggtccagttcaatgctgatattgctgatgggatgcaatggaagtttgttcccacacagagagaggttagggtcaagcccggtgaaagtgcccttgcattttatactgccgaaaacaaaagttctactccaataacaggtgtttctacgtataatgtcactcctatgaaggctgcagtgtacttcaataaaattcaatgcttctgctttgaggagcagcgacttcttcctggagagcagattgacatgcctgtattcttttatattgacccggaatttgagacggatcctaaaatgaatggtatcaataacattatattatcatataccttcttcaaggtttctgaggaataagaccaacttgaatgttcacatgagattcaaataacaagctccctccatttcaaaggacaaagatgcatagcacattgatgaagttaaagttttggttacctatggtggctgacataaaagacaaattcattttcttatttgtttcacacgtataaagaaggctgcctcttctgtatgcttgccaagttcttgaatattttcagcttcagcaaaactactagaaaacccatgtgatcaacttttgaaggttcaaggtaccatgccatgacatttggaattatgctgattttctggtgctcctaagttaatgcaagcagggatttggagtacctcttcaaattagccatttagatgaatgaataattttgcttttagaatttattgatagtaaaacttatctaagaactgtaaaaggttgagatatattcacaaaatggtaagtgacaatgacgtctacaatcaggggaaactagcatggtatgaatattggtgatagtttaacggggcatttatctttatacttttacaaaacccaattattttcaatatatagttaacagtttatagagtttgcttaaaaaaaaaaaaagaccgctgtacgctctacaagattcaggacgcgggcagggtgcatcataggtca

SEQ ID NO: 26718 - DNA, 977 bp, Glycine max
  Clone ID: PAT_MRT3847_124126C.1
gtcgtccccaatccatagcttggaattccagaaaggcttcagcttcagcttgctgctcccttctcaacttcaacaatttcgataacacttaatgtcctgttattgtagggacatcagtattgctaatcatgatatggtcaaggctaagtaggagaactcatctcttgccataccttagggctttgcaaacagactcaattgaatccaggtgcctatctatcattcctaaaggatcaagttacaagttcattaatcctaataccagcttccaacacaatttctcttgtaatatacggctatcaaagtttaagcaagaattgagtacaaaaccattccatctgtgttaccgctcttcagctttggcttcacagtatgttggaaagtcatgttccatgcctggtttccgacacttctcttctcatgcatccaaagaacagaaatcacgaaagatgcttttatacttgacgggcttagtttttgctatggttgggtgcacatatgctgcagttcccctttacaggagattttgccaagcaactggctatgggggaactgttacccggcgtgagactgttgaagaaaagattgctcgacatgatagcaataatacagtcaccacaagggaaatcgtggtgcagttcaatgctgatattgctgatgggatgcaatggaagtttgttcccacacagagagaggttagggtcaagcctggtgaaagtgcccttgcattttatactgccgaaaacaacagttctactccaataacaggtgtgtctacgtataatgtctctcctatgaaggctgcagtgtacttcaataaaattaaatgctgctgctttgatgagctgcgacttcttcctggacagcagattgacatgcctgtattcttttatattgacccggaatgtgagacggatcctgaaatgaatggtatcaataacattatattatcatataccttcttcagggtggctgag

SEQ ID NO: 26719 - DNA, 451 bp, Glycine max
  Clone ID: PAT_MRT3847_124127C.1
aacggctttgcctgcaagattttgcacgaattgatggatggtttttgccaaattcaagttccaaattatcaccattttcccaaagtgagtttggaagaacagaatctggtgccataatattcactgacattaacatgataagtggtatggaacagaccagttttctatttcagcaagcttctaaggtcagcttccaagcaggtcaaaatccttacaacgtaacaagtctttttctcgccgtgaaggaactcgaaaagtgtttgtcatttttggaggtaacacatcagaacggcaagtatctcttatgagtggtacgaatgtctggctcaatttgctagccttccatgatcttgaggtaactccatgtttgctttcccctacaagggagtgtgcatctagcattgatatgggaaaaaaggctgatgatgtaatgaatagaacagtttggtca

SEQ ID NO: 26720 - DNA, 301 bp, Glycine max
  Clone ID: PAT_MRT3847_124128C.1
ggggagttcatccagtatcagtccaaattccaattaaaccataactttatacaaatcaaatccatgtccccacgaggttaacggtgaggagcgtggttcctctaaaacccacccaccccacgaggttcttgttgttctccctatcccaatttttcgcaacccccaattgtgacaccgcaattctggcgagtctgaaacacgaagtcactctgaaacacaaagctttgacggtttctccacgagtgatagagtggaccgaagccgatttgttctccaaaaatcaaaatcgcggacgcgtggg

SEQ ID NO: 26721 - DNA, 1792 bp, Glycine max
  Clone ID: PAT_MRT3847_124129C.1
ataagctttgcttgtctgatttagcaaagcatctagctacgcttttcccatacctttccggtatacactggccattttgtgaaagtggtggcattcagcaattgcttgaaaagtataatgttccatttgttggcacgggatcaaaggagtgctgccaagcatttgacaagcataaagcatcattggagctcaggaagcatggattcataacagtacccagtttcttagttcaggggtatgaaacagacaaatcagaactatcagaatggtttaaaaagcaccagctggacccagacttagggaaagttgtggtaaaaccaacaagaggtgggtcaagcattggtgttggagttgcatatggtgtgaatgattctcttgtaaaagccaatgaaattatgtctgagggaatcgacaagaaagtgctaatagaaatatttcttgaaggaggaaatgagttcacagccattgtccttgatgtaggatctgatttagatagttttcctgttgtactacttccaactgaggtggagcttcaattccgtggtgcaaatgatgtgaaagagaatgatgcaatatttaattaccgtaggaagtaccttccaacccaacaggttgcttatcacactccaccacggtttcctttggatgtaattgaaaatattcgcaaaggagcatctctgttatttcaacggctttgcctgcaagattttgcacgaattgatggatggtttttgccaaattcaagttccaaattatcaccattttcccaaagtgagtttggaagaacagaatctggtgccataatattcactgacattaacatgataagtggtatggaacagaccagttttctatttcagcaagcttctaaggttggtttttctcatacaaacatccttagaagcattattcaccatgcttgcttgcgatttccaaatcttgcatcagttagtggtatatcaggtcagcttccaagcaggtcaaaatccttacaacgtaacaagtctttttctcgccgtgaaggaactcgaaaagtgtttgtcatttttggaggtaacacatcggtacggcaagtatctctttatgagtggtatgaaaatctggctcaatttgctatcaatcttcgatcctttcatagagacggatgaaataattgtgacatccaaatttgaggatgcaactggtcatggcctcacttggaaaggacacagcagatgggtggaaataactgttggcgtcataggaaaacgtggatcaatgcactcgctaagtcctagtgtaactgtcaaggaatctggtgatattttgtcacttgaggagaagttccaaggtgggactggcatcaatctgactccgcctcccttgtcaattatgagtgagaatgctttgaagagatgtaaacagcatattgaactgattgcaaacactcttcaattggaaggattttcacgcattgatgcatttgtaaatgttgacagtggagaggttttgattatagaggtaaatactgtgcctggaatgacaccttccactgttctgattcatcaggcactagtagagcaaccaccgttgtatcctcatcaattcttccgtaagcttcttgatttggcatctgaaaggtccatgtaaatctatttaatagaatgtttacattgtctatcaaatgttgttaccacttgaagttattgtgaaactttaatttcctatctggaacttgcgtccctttataatgtgaaactttaatttcaataaaaaaaaacttcctttcctcgagactagttctctctctctc

SEQ ID NO: 26722 - DNA, 277 bp, Glycine max
  Clone ID: PAT_MRT3847_12412C.1
cacaagcaggctaactgagatactctacctctactatacatctataccacaactagcattactgtctgtcgagcccatgggaaatgtcggactaataggactggacgatatgagggatagcctgatcctcaacatgtaacacgaggggtgcaccgaccggggctacaaccgaaccaccttctaggtcgaccacttactggagaacgaggacaggggcaccaacataatctgccccgtgtccgttgaggagctctgcaggaacctcaagcgaccccga

SEQ ID NO: 26723 - DNA, 255 bp, Glycine max
  Clone ID: PAT_MRT3847_124130C.1
aaacacactcattgcacatagtaatgcgctttatttaagtgaataaaatacttcatactagtttacaaatgcaaaagggcactcattaaccagatttttgggacttttacaggtcttaagaagttgcgtaagtattggattagtggcgtttgaacttaaaatttatttctttaacgccaaaaagatcatccagttaatgctttggaaaaggatcaacttttgttagaataaacattttttttatctttttcaaat

SEQ ID NO: 26724 - DNA, 1050 bp, Glycine max
  Clone ID: PAT_MRT3847_124131C.1
agttcacaaacaaacactgttattgcagtgagtggcttgtgagagtaacacatgattttgcctatggaaaaaggtgctaacagtctaacacacagcacagcacagcacaacacagaggttaatgctaagaccccaaaaaagtaaaaggggtgggtcatgaaatgaggtaaatttcacagcaaagaaaagaaaggaaaaaaaaatcaaacacaaaacaaactcaattcgactcacactcccaccacaccacacagcatagagatctattcgcttctctctgcaaaagtaaaaagctttgcaagcaagcaccccaacatctaaaaacccagaaaaagaaaaggccatttctttacatcttccatgacctgggtaaggtttgtctctgagtgaatcagacaaacctttcctcactctacacacaaaaaaaactaccccattctctctctctctctctatatctatttttgttacatctctttctgccagctctttgtaccaacatgccattgcaagttaagttttttttttttttttgctggtcccagagtgaaatctttggtttttcttcttcccttgaaaagaacttgaggggaaagtggtgaaagagggtggataacagtcctctacagttctctttctggttgttggtgctgtttgcatttgtgtgtgtggtttttttatttatttttgtactctgtgtacttctccttcagagtttgggtttgcaaatttgcattcgtactgaaggatgaggaagaatgggtggcagctaccttatcatcctctccaggtggtggctattgctgtgtttatggctctggggtttgccttctatgtgttctttgctccttttgttgggaagaagatgtatcagtatgttgttatgggtctctacacacccctgatcacttgtgtctttggattgacattttgtgtgcagcatctgacctgcaatcctgggggttttcaagtccaaaaatatcttaaattccagatagcaaaagctgatggactcagaatctaaactagagcgaatcactcgtcatgctg

SEQ ID NO: 26725 - DNA, 265 bp, Glycine max
  Clone ID: PAT_MRT3847_124132C.1
agacatatgcgaggtcactgactgggtcgacgggctcactagctggctgccgccctgtcgtcctttttttttttttttgttaaatacatagtttatacttaaagacacgtggttgcagatagatatgcgctataattcagcgaactgactattccattcatgcaacaaaaagctaaaggatcactataagcctaatattgtgagaatcttaccgttgataagaagtatattcctcatactgatacaggcgttagaacttaaaatt

SEQ ID NO: 26726 - DNA, 500 bp, Glycine max
  Clone ID: PAT_MRT3847_124133C.1
acccgatcaaaacagtttccttctccttcttcttctctctttcaatggaagacgaagtcaacagagaactcgaccttctgccatcttcgcgctccaactcctccctcctccgcctctgctcggcggtctcctcctcctccaccacagactgcggcggaggcggcggcggtgccccctcgctcgacctgcagctctccatcagcgtgcggccgccggcggccgtgctgatgtgcgacggcgtggaggcactcaagtggcaggccgcggagcaaatccgcctcgccgcgatggagaaagcctacgcggagcgggtgagggagctcacccggcgcgagatggagatggcgcagacggagttcgcacgtgcgcgccaaatgtgggagcgtgcgagagaagaggtagagcgagccgagagaatcaaggagcgtgccaccagacagcaggtggattccacgtgcatggagatcacttgtcattcctgtaggcaaaggttcaggccc

SEQ ID NO: 26727 - DNA, 511 bp, Glycine max
  unsure (1)..(511): unsure at all n locations
  Clone ID: PAT_MRT3847_124134C.1
ctatcaattacctagccatttctcactccaatcatattgcaattcatgcaatggaaaaaccgacataatataattctagttatttctctctcaagagttttaagacacataattagttggctaatttgcacaagtaggtgatcccagtcggaaatccaatatgactagtgtggcaacactatgggcaagtgcgccaagaacaacaaaaacatgaaaaatttgatggctgtgccctgcgatatcaaatgctcctggcttccatcgctctggtactctgaaaagcccattgagaggaataatgacgccctgaggggtcgaaatcgaggtgtaaaaagtgaaggtgcgagtagggtaataatggcaaggactccaagcacagatattgatgctaaatagaataaccttgcgttaggattgcagaaaaaagcataataaattggagcaaangaggaagagacaatcataagagaaatgccagcataatctagacgccagaaaaataggttaaagc

SEQ ID NO: 26728 - DNA, 357 bp, Glycine max
  Clone ID: PAT_MRT3847_124135C.1
aaaatataaaaaaaaaacagacatagtaagtagtagtatgattttaatttggaaatttaaaatttgaaaaaaaataataattgggtgtttccgatagtagtagttgtagcgggcaagccgagccgattcgatgacgcgagccactcacacactgggggttcccccaacaacacgcgcccctccccggcgaccgtaccgtattatcccccacccttcccactctttcgccttgccgtttctctttctctttttccctttcactttctctctcttcaaagcctaatttcctttttccgatgccggacttccaggactccctctcgagcacgccgccgccgcagccgtcccggcccgtcc

SEQ ID NO: 26729 - DNA, 718 bp, Glycine max
  unsure (1)..(718): unsure at all n locations
  Clone ID: PAT_MRT3847_124136C.1
cnnnttttctggcgtctagattatgctggcatttctcttatgattgtctcttccttctttgctccaatttattatgtttttttctgcaatcctaacgcaaggttattctatttagcatcaatatctgtgcttggagtccttgccattattaccctactcgcaccttcactttctacacctcgatttcgacccctcagggcgtcattattcctctcaatgggcttttcaggtataattcctgcagctcatgctgttgccctatattggggtcatccgcatatatttgttgcacttggatatgagcttgttatggccattctgtatgctactggagctggattttatgttgctagagtaccagagcgatggaagccaggagcatttgatatcgcagggcacagccatcaaatttttcatgtttttgttgttcttggcgcacttgcccatagtgttgccacactagtcatattggatttccgactgggatcacctacttgtgcaaattagccaactaattatgtgtcttaaaactcttgagagataaataactagaattatattatgtcggtttttctattgcatgaattgcaatatgattggagtgagaaatggctaaggtaattgacagagatgagagtgcaattttaactttttgttcaaaaatagcagagtaacagtaatgttgtgttatagcaaaaaaaaaattggcaacttattc

SEQ ID NO: 26730 - DNA, 279 bp, Glycine max
  Clone ID: PAT_MRT3847_124137C.1
ggcccaaaaattccattctactaaattcaaaagggaaaaaaacttcatttaaaagcaagcagttttttttttcaaaacaaaaagaaaaaaaggaaagactcaagattctttattgcctaaaaaacagtttgaatcgaacaaaagaaatgggaagggaagggcttatatttgcaagggttaaaactccccccagccaggggttcaagaaaaaggaaaaaccccccttatattggccattcctggggaaaaagggaaaagttttttaaacccaaaacaaaa

SEQ ID NO: 26731 - DNA, 427 bp, Glycine max
  Clone ID: PAT_MRT3847_124138C.1
gcctctcgtacgtccacgcgtcctgttctgaatccacaaaatcctcttgtgttaaataggtggatgggaaaactgactctcccccagggcacttcccgtagtgataaaagaactgcctctttctatagggggaggcgctggtgcaaagaatgctattctcatgaatatgccacatgctgctatttcaatgaggagatattttgtcgtacatcccgtctttggagcatgtaccatgactcattcctacattaaatgaacagtctctctcttcatatgcattgggaaatttggctgatgacaccatcaattgtgagggctttgaccacaagctggcgtcttttggagagattcaagcaaaaggggtgtagaaattgtcacaagatgaatttcttacagcctgagcaactcatgtgcatactacaacaac

SEQ ID NO: 26732 - DNA, 475 bp, Glycine max
  Clone ID: PAT_MRT3847_124139C.1
gtccccatgacaccatctcccacacccaccagaagcaaccacaccgtgttgttgccgtcaatgcgtcgaccaccgagagccaacttccgccgacgccgtaacgacactgaaaccgtcgtctacgacgatccctctcttttcaaatcttgaaaccacaaacacatttctcaaatcaggaaaaaaagtcacctttctctagcgcgcacatcaccgccaccaaccaccacgaaccacgtcggcacagaattccgaatccaccactccataacggcgcgacactcagacccaaaccaaatgccctcaccaaaaaatcgtgctgccagcgtcagcaccgcgcaaccagcgccaccgtcgcgcgcgacatcatgtcccctaaccttcgtcttctatagcaaaacaccataaccacccatcaacgtccaagcaaaagtccgttacatacctaccagaaaccaccatccaccattagaaagcg

SEQ ID NO: 26733 - DNA, 632 bp, Glycine max
  Clone ID: PAT_MRT3847_12413C.1
ggctcgtcttcttgttctgtgccgcactctcgctcgcagttacagaaaccatgacgacggtggtgcccacctccgaagaagacgctgctctctctgttgtccgattcgcctctgaactcgcctgggccgatgccggtcccgaggttgctgagcctcaagttagtagactctgcatggaggctgaagagtttatcgttatgggaaaatggttggaactagcatcattgatgattacctctgctgaattggttttctcaaaggtttctgaaacagatatagagtccatcttcactatcatctgcaatcttgtgacaaagactgagaatccagatgaagtgatggagattgtaaaagttataactgcaaaaataattcagcagccaaacgaaaagcctgctgtgcgattgaagactttgatcaatctgtacaatcttttggagactccatactgccagttttatgtctacatgaaggcattgaatttagctgttaatgggaaagtcacagaatacattataccttcattcaaaaagatagatagcttcttgaaagagtggaaaattgggatacctgaacagagagagctctttctcactatctctaatattttgaaggaaaataaaagcatgtca

SEQ ID NO: 26734 - DNA, 534 bp, Glycine max
  Clone ID: PAT_MRT3847_124140C.1
acaggacaggggaatggcaaccatgtcccttacatttgcagttgcagcaccgtctcttaattaccctccttcaacaacacagaccgttatcatgtgtgagccttgcaatggaacaggctggctagtttgtgacttctgtaatggccaaaagaccaacgtcaaagcccaaaacaataaacgtatctacctcgatgtccttcctgcaaagcccttggatatgtcttgtgttcaaactgcaaagtcttcaagtgcgtcactttccctaatttcaacgattctcagaactgaatgccaaaattcagcaacaaacattctttctcttgtttattttgcattcttcacacctgctcgtctcctacttgtacaattttactacttttagagaaattgatttcgtctacttgtcaaataattgaagaaagatagtaagatatgattcactgttttactgtcatcatttttgtatttcttatggattgtactgtaactaatgccattcaaaaaattgtatattcaaagcttgtcatgcattat

SEQ ID NO: 26735 - DNA, 112 bp, Glycine max
  Clone ID: PAT_MRT3847_124141C.1
gaaacaacttggaggcatagtaactggccatgatgctaagcatgagaatgacttcgcgtgtccctcagagactgaattctgcgaagcacttggatcagtctcatatggagag

SEQ ID NO: 26736 - DNA, 446 bp, Glycine max
  Clone ID: PAT_MRT3847_124142C.1
cttggggggggggggggggggggggggttggcacattgtaataggatgctatgagctggccgtaagacactagatagaaggaaagcgctaaacaagtacggagacaggggagagacggaagaacggcacataaggtaatagttgtacaataactatgtggttagggcccatgcaaagaaaatatgtttttatgtgtacaattaccaagaataaaacagaaaccaaatcccgcagccattagaattacagtgatggttagtaggttgacttttggaaagcggcaatggggcgccaatcgtaaacgtagtaaacgtagagtgggcgtgtgtgtggttacttggacataaagataatgcagtctagcaaagggcggtcgtgcgtctacgaacgggttggcacacgcttaggaggtgggccaggcagcaagtaagagcggtaagtagggt

SEQ ID NO: 26737 - DNA, 689 bp, Glycine max
  Clone ID: PAT_MRT3847_124143C.1
gtgaaaaatcttgtttctcattattatataggttacacgaacaatgcacatttggattcaatgattttccctagatgttacattacaacttacatatagtatatgttaccctctaattccccatatcccccatcatggataatcttaaaaattcactcaattcttttcagtggcacttctgtttgtagcccacaacttgctaaacattcgtttgggctgagtgggaagaccaagacccttaaatttagaagttcttccaatctcatcacggggcacaacattttcatccaagtcatcctcagctagcttcattctgagggtagggttcctagttgttgactttggtgacttgaatccagaaacactccaattgtcatcagcatgaatactagtcgtggtgctcaatggtgctgtgtgctttgaagggtcaatgccatgagctgtgagcaatgccttgatgttgcttggcatgtcactcactttgccaccagctgctgctgctcttacttgctcaaagaagagaacttgcactacaactcttaggggaagaagctcattctgtgctgcatgcatgcatgcttccatagacagctttttgcagtctagaattctacatagcctcttcctttcactcttgctgagttctggatgtgccttgagataaatgtcaatagctctgtacagatcat

SEQ ID NO: 26738 - DNA, 387 bp, Glycine max
  Clone ID: PAT_MRT3847_124144C.1
tgaagatacttcattggaaagtgggaaggatctcaagattgactacaacctgaggacaaggtcgttttggatggccgcgggaatgttgtgattaagaaccagaacaaagagcaaaacccagagaattatgcagaaacagagcaggaagaaggaaagaatgaaagcagtggcagaccaaaacgtggaagcaacagaccaaggtacctggaggattacgtggccaagtgatgctgagctggcaataccttccagaagcagaatccaccaattctgcagagctgattaccgttagatgctgtccccttcggttttgcaatttcacaattcctccaagacaaataatgccaaaatctgttaggattatacctaggatttgcaatagaaatg

SEQ ID NO: 26739 - DNA, 1073 bp, Glycine max
  Clone ID: PAT_MRT3847_124145C.1
ggcaaacttattcctagcatggtaccaatttgatatcatctacctgcttctatgatatatcttagtcttctcaataaaatgcattgtttgcattttggtttatgtcacaggttgcaatggcaatggctgccaaagcccaaactacttcttcgggagttgaagactgtcaaagctgatctggcttttgcaaaggatcgatgtgctcagctagaggaagaaaataaaatcctccgtgagaatcgggaaaggggagatagccatgatgatgatgatttgatacgacttcaacttgaatctcttctagctgaaaaagctcgcctggcacacgagaactcggtttatgcccgtgagaatcgctttctaagggaggttgtcgagtatcaccaacttacaatgcaggatgttgtctaccttgacgagagcaatgaggaagtcactgaagttaaccctcttaaccttcccccagtgcctaatatggccctggattctattactccatctgcaacctcccttttgcattctcctgaaccgaaccttggcatggcttcagaattaacaagaggcacctcatctactatatctggaaaagatgcaaagagtaatgagattactataaaggattcacggagttctgaagcgactagataactcttctgtcacaggacatgatgcaaaataacatgaaattcttctgttacaacttacaatggtgatgcaccgcgttttgatgcttcatttgttattatttgtgtgctgctcgtttcatgtatcgtgggtgacattaccttgatgtaattgtgtaccgtatattgtgtaactcgagttttatttatttattttttccattatatcagcatacgtttatttgcaagtgtctgtatagcaatacttgtcaaaaaaagtttgtgtatcattacagtcacttgttgactatttctatttattttatcgtcactcttataccatcaaaataattgtattaataactttatttcaggatgttgtctactttgacgagagcaatgaggaagtcactgaagttaatcatcttaaccttcccccagtgcctaaga

SEQ ID NO: 26740 - DNA, 269 bp, Glycine max
  Clone ID: PAT_MRT3847_124146C.1
gatctactgctgttcttcacacaaaaccacagctactatttcactttttatcacaagcagaccacgatccatatttgcttaataacttacatttacctactcctctcaaaactcaaaataaactataaactatcaacatagaactagttgatctagttcttctgccgcctcacggaaaacccaaacctatgcatccagtacttttttgccaactcctcctacagtcaggcagaccactacgagctaagccagacagcattgttagtatc

SEQ ID NO: 26741 - DNA, 250 bp, Glycine max
  Clone ID: PAT_MRT3847_124147C.1
taactcggattcggtggggcaaagaggtacccgccctcgagggaattgcgctaaaggcgtgtcgagaggctaatccgcctgacgagggtgaccaacggcacgagccttaggggggccgaggccccctactgatggagggcagacggacggggggcgcacgcggggctactagcccggattgggactgagaggggtgcagcgataatccaacgcacggtaggcttcgcgccactgggttatgaaccaagcg

SEQ ID NO: 26742 - DNA, 251 bp, Glycine max
  unsure (1)..(251): unsure at all n locations
  Clone ID: PAT_MRT3847_124148C.1
cgcgacgcnncgcccgcgatctagaaccaatatancccaagccntatacaacnaaaccctaatacacangcatacggattcagtttccatggctngcctcaaggttgcatttttggctggagtgntctgnatggntgtggtgagtgacanccatggtcacangcagctatcacgtgcgggnaggtgnngantagnctnancaattgcntcggttaccnncanacnggaggaacggccgcngtcgggatgnc

SEQ ID NO: 26743 - DNA, 1012 bp, Glycine max
  Clone ID: PAT_MRT3847_124149C.1
gccccgccccgagcccgagccacacacaaacaaaaaaaaagagaacgtgtcgcattgtgagcatgatggaggagatggaagggtctgggcgggtccaaccgttcggttgtccctccccttccgccgaggaacacaaacaacaacctcaacttaacgcattgtgtgcatgatggaggagatgaaagtttctcggcgggtggagtggtggcagaacatgatgttccccgttcggagggtttggtttgtcgttgccaagcgcctcggcattcgcaaaactgggttactgaagctaagtaatgatgtgagggcatgcgaatatgaggacattcaagtgatgtgggagatactaaacagaaacgaatcagagtttggtcgttcttctagcactaggaaaggcaacaacaagaaggggcattgctggaaattattgaggtgggcaaggtgtgctccatgcatgtgccgcacatgatcatgattgctgtgtacgtgagaagaaaaaaatccaacctatgtgttggtgtggtttttcctgcttcaatcatgaataaaaaaagggttctgaagggtttgtgtagaacacggttcttctttccttttgaatcaaccaactcaaccatatgtaaatatcaactgcatccaccaagttcgatgtgtgtgaccatctcatactccatccatgtgcttaattagtgtggtatcgaaattgttgtatgtgtagtttctgctgtgtttcatcatcatcatcatcttggtatgtgttcaaccagacgttcatgtattgcttttagagatccatgaatcgtgtctatctcaggcttaattccagcttggtttttgtatcagaaaactatatatctgcattctgcagaagaaggtatataaatatgtgtagttattataaataaacggcatcgcgtgggcatcataaacgaacctgcgggggtggtccctgcgtcagcttttaaaaaaaaaaaaaaaaaaaaaaaaaaaaaaaaaaaaaaaaaaaaaccac

SEQ ID NO: 26744 - DNA, 463 bp, Glycine max
  Clone ID: PAT_MRT3847_12414C.1
ctcacgggtcgacacacgcgtcagctcaggttatggtttccttggggtacatgcacagtcaaggtgttcataccctttttatataacattctcaagaaagcaaacttatggtacttttttttttggtctatttacatgatataattattgtaggtgataatgggttaatgaccttaaaaaacaaattataagggagaagttagctacttagtttgagaagaatgatcttcggaagctgaagtacattcttgggatagaagttgcctactctaagtaaggtatctttaattctcaaaggaaatatgtgcttgatctccttaaatagactggtaagttgggttgtaagatgtgcttgaccatgtgtacagggcccttaaccagctaaaatactcctaaagaaagacacatcagataaatctggattctaccatattttggaggaggaaactccaatacatgaagc

SEQ ID NO: 26745 - DNA, 822 bp, Glycine max
  Clone ID: PAT_MRT3847_124150C.1
ccacgcgtccgggcatcttaggttgtcgattcggagcatcttatgtgagatcccatattctccaaccatataataaccttcaccacatttctctctcgcattcaattaattcaacatacacgtcatgaacggtgtttctcctctagaggcccaagccttcaactacctgagcttcggtttcctcaccctcctcaacaatttctggacatggctcgccttcactttctggaggacccgagcccccacctccgagttgctgccaccacccgatgacccggttcgcgacgagtcggatcctgttgccgtgaccgggccaagtccaactgtggttgacgttgacggtgcgaggaaggggaaatttaccttgtattacgaggatgagtctgagagggaatgcgagagccaccaggagacgacggcgctaacggagagagacggaagaggcctgaagtggtgggagagttgggaagagttgttgaaaataagacgaggagaagaccagaacggatggtacacgtgccaggatttaacggtgcttaacggcagcgttgttaggttatgggatggtggcttcggctttggtacctcaccacagaacccagggacactacaagatgtgttcttgtatggtaaattatataatagcatatctaccgatatttattagcttaagactgttagattatatattattcagaatatgtgtatatggtaatttgctagtagtacttgtttggatgatgataattaatgatcatcgtgtatgataatttgaaacgcaaatgatcaaagcaatcttaatttgcgtactttttttttttt

SEQ ID NO: 26746 - DNA, 300 bp, Glycine max
  unsure (1)..(300): unsure at all n locations
  Clone ID: PAT_MRT3847_124151C.1
ggctttagggccaananaatttcccttcactttttacaccccccatctccaaacatgggtttgtaacactacaccgttttggtgagcgaaccaatccccgaaaaaattccctacagccccgagctcgatttctggaagaagaagaagaagaaaaaaaggaagaacatgaacaaagacaagcaccaaactgtttgcagcaccaaaccaaagcttgactaacaactcgaccctcaaaaccgcaccgtattgaattataagaaaaagaagcacctctagttcaaaaagaacaccttgaaacca

SEQ ID NO: 26747 - DNA, 1928 bp, Glycine max
  Clone ID: PAT_MRT3847_124152C.1
ggttaacttgtagcattgaagaaggtgaagatgaacatagagagggatggatttccaatgtcatccttgagagaaataaacattctcttgtcttttaatcatccctccattgtgaatgttaaagaagtagttgttgatgattttgatggtacttttatggtaatggagcacatggagtatgacctgaaggggctgatggaggttaagaagcatccctttagcatgagtgaaattaaatccttggtacggcaacttcttgaaggtgtcaagtatctccatgataattgggttatccatagggacttgaaatcatcaaacatcctgctgaaccatgatggggagcttaaaatatgcgactttgggttgtcaaggcagtatggaagcccgctgaagccatatactcctgttgtggttacactatggtacagagcacctgaacttttgctgggtgctaaagaatactcaactgcaattgacatgtggtcagtgggttgcataatggctgaattaattgccaaggaacctctgttcaggggtaaaagtgaacttgaacaacttgataagatttttcgaaccctgggtacgcctgatgagaaaatttggccaggattatccaaattacctggggctaaagcaaattttgttaagcaactgtttaatacactaaggaagaagtttccagctgcgtcgtttattggtttgccagttttatctgagcttggatttgacttgttgcagcagctgctaacttatgaccctgaaaagaggataacagcagaagatgctctccttcatgattggttccatgaagcccctcttcccaaatctgatttcaagccaatttttccttcttggcagtgataggacaggactatttagtaatagatgatggatttttgctctggaaatgctcctgaaaattttggcttcattgatgcacaagcattggtagctgttggatgtgtagaaaaataaatcaattgcaaggaatattcattttgagcatggtcagcaggtaatgatgttaggtttctcaatttgaaagtggttccctgaaataaaatgatagtgttgttggcttttattaataatgtctcttttttcacacttccatattatgttgctcaacaaaataaaaggatctaaattcttttttactgtacaagttcaatttgaaacttttgatatacagtaactgtcagcaagataacgtgatgtaatcttcatggttatgctatcgagttttgttccttttttgcctacatttaatttttacaccaggaaatgctcttttaaaaattttgggtgcattgatgtgccaagcattgatagttgttggacttgtagaaaaataaatcaattgcaagcaatactcattttcaacatggtcaacaggtaaacaatcgtaggtttttcattttgaaagttggtccttgaaataaaatgatgtatgcccctttaccgaaatatgaatttttaaattaaccagaggtggaattatgagtttaggcagtggattgcatgttgaactatggtgaagcagggtttagaagcgcttgtggagctgctgagaaaagagacacaggctgttacatagatggcgaagtccaccaagggtgctgaagtgaaatttgcgctcaatttgtgccttcttaacactgcaattggtgtaataatttgatgaagttcaagggaagtagcctcttgtaatgaggagatttttgttttttgtattgaaaatcctgtggtgatgaataatttatatcccttaattacagtggggtcttgtggaggctggtgaagaaatattgaagctatggagtactattttgttcgtttgaacaagacgtatatgatttgattttgtgtataattctaataattcagaatccaacagaaatctaccatccccccatggataacctaaa

SEQ ID NO: 26748 - DNA, 742 bp, Glycine max
  Clone ID: PAT_MRT3847_124153C.1
acgcgtccgcccacgcgtccgcccacgcgtccggttttatctgagctgggattggacttggggaagcggctgctaacttatgaccctgaaaagaggataacagccgaagatgctccccttcatgattggttccatgaagcccctcttcccaaatctgatttcaagccaatttttccttcttggcagtgatgggacagattagaagcggcagattgatgtatagacctgagaaggacaatttagtaatagatgatggatatttgctctggaaatgctcttaaaaaatttgggtgcattgatgcacaagcattggtagctgttggattgtagaaaaataaatcaattgcaaggaatattcattttgagcatggtcagcagaaaaataaatcaattgcaagcaatactcattttcaacatggtcaacagaggtggaattatgagtttaggcagtggattgcatgttgaactatggtgaagcagggtttagaagcttgtggagctgctgagaaaagagacacaggctgttacatagatggcgaagtccaccaagggtgctgaagtgaaatttgcgctcaatttgtgccttcttaacactgcaattggtgtaataatttgatgaagttcaagggaagtagcctcttgtaatgaggagatttttgttttttgtattgaaaatcctgtggtgatgaataatttatatcccttaattacagtggggtcttgtggaggctggtgaagaaat

SEQ ID NO: 26749 - DNA, 646 bp, Glycine max
  Clone ID: PAT_MRT3847_124154C.1
gcgtaactaaccacgcgtccgacgaaaacgcgtcaacgaaggcggcttctctctctcgtctctgcttttctcctttcgttcgctttcgcttttcgtgtcgccgggcgaaaaagtgtttctctgagaagagaattttgcaaatatggttccaccatcgggtttgatcaccatagcactcgttctttcgatgtggaagtgggtggttctcgcaaccaccacttgtctcgttcgggagtggagcggttccatgttgaaaaagaggaaggtgagatctatgttgaacacgagcttgcctctgtggtgccaccgcccgagaagagaaggaagttttctccaattatatgggacctagcagtgaaggaagaaagagtctcttcaaagagtaggatctcgcagattgctgctctgtctcctcctcgtccatctctacctagcagtcctggagcctatgttgttgattgtgggaatgttatggagggaggtttttgccagattcacgaagctacaaacaagatgtggaggaagagaatgatgtgcaaggttggacaatcaaaaagtcaagatgggattgtgatgatgttccgtcaccaaggggggctgatgaaaaacagaagcccggtaaagtgagctccagtcctggaattgg

SEQ ID NO: 26750 - DNA, 778 bp, Glycine max
  Clone ID: PAT_MRT3847_124155C.1
ttgaaatttgctcggaagagcaagggcgatgcaggttccactggctggtctagcccgtctgttttttctgaaggagaggatgatgctgaggaatttaaaaattctaataaaaggaatgctgacaatctactgagaaaggccgcactcaatgtgaaaagctatggacaaccaaaaaattcagtacatgaaggatatgaaagaaatttaggcagagatgatggcaagggttcttacaagatgcaagacgggcgtgatttaggtgctggttcaaccacaagagcgtcaaggtcattcttttctctttcagcttttaggggaagcaagccctccgagtcaaagtttcattagtgctatgggaacctaccattaattttgccatcatcccctgacgtggtttttgtcaggtttaatatggagtgttctccctattgcatcaactaaagctaaatcagaaataatttcagtgcgttgatgatataaattatatggcaaagtggggtctttggtggaatgctgtaaattcattaaattgtgtcgcgctattacaatacattacccgaaaattataattcatatcatctggcttttccctaggaaattttcctatagctggattatttgttgtaatattgtccccaacgttcatttcatcgtatgttgctgttacttcgaaatattaatcattgtagataactgaattatagttcaaaaaaaaaaaaaaaaaaaaaaaaaaaaaaaaaaaaaaaaaaaaaaaaaaaaaaaaaaaaaaaaaaaaaaa

SEQ ID NO: 26751 - DNA, 4027 bp, Glycine max
  unsure (1)..(4027): unsure at all n locations
  Clone ID: PAT_MRT3847_124156C.1
ggcacacgtcacgtcaagcgaggcgaacgaaccaaacgcgtcaacgaaggcggcttctctctctcgtctcagcttttctcctttcgttcgctttcgcttttcgtgtcgccggtaaggcaattcgatacctctgaaccctaatcagacgcagccaccgtttagggtttccatcctcctctcatactttgcctgattgctttcgtgtttcgtttctctcttttcatttcaatttttgatacggtccgctgttgattgtattatatcctggaaaaagtaaagaacattataattggtttttgtcgtgtggatttttgaatgattgattagggttgtgtgaatcattgaaaaaaaattgaatcctccgttctgatttttccggagggttagggtttggaaatttggggatttttttagggtttgggtttgaaatacatttctcttcgattcttaattgcttattgagaagacttgtgcttgtgcttgtcaatcacatggaggcagggcgaaaaagtgtttctctgagaagagaattttgcaaatatggttccaccatcgggtttgatcaccatagcactcgttctttcgatgtggaagtgggtggttctcgcaaccaccacttgtctcgttcgggagtgaagcggttccatgttgaaaaagaggaaggtgagatctatgttgaacacgagcttgcctctgtggtgccaccgcccgagaagaagaggaagttttctccaattatatgggacctagcagtgaaggaagaaagagtctcttcaaagagtaggatctcgcagattgctgctctgtctcctcctcgtccatctctacctagcagtcctggagcctatgttgttgattgtgggaatgttatggaggagtttttgccagaattcacaaagctacaaacaagatgtggaggaagagaatgatgtgtatggttggacacttcaaaaagtcaagatgtgattgtgatgatgttccttcacaacggtgggctggtgaaaaacagaagcacggtaaagtgagctgcagtcttgaaatcggcatttaatcgtcagagagcacaatccctaggtcattattgagcaatgtaagagcacattattcgggttcctcgtctgatgacaccgattcagaacatgacttccttttggactccatggtcgatgttggggaacaaagtgatgatgattattctctgtcagattctgatgagactggtggactgatgcatgggcagagaaacataaacatgcttcagagttgcagaagtgtgtgcgagtttgagatgattaagaagataaacgaaggaacttatggtgttgtctacaaggctagggataagaagactggagaactagtggcattgaagaaggtgaagatgaacatagagagggatggctttccaatgtcatccttgagagaaataaacattctcttgtcttttaatcatccctccattgtgaatgttaaagaagtagttgttgatgattttgatggtacttttatggtaatggagcacatggagtatgaccttaaggggctgatggaggttaagaagcagccctttagcatgagtgaaattaaatcgttgatgcgacaacttcttgaaggtgtcaagtatctccatgataattgggttatccatagggacttgaaatcatcaagggagcttaaaatatgcgactttgagttgtcaaggcagtatggaagcctgccaaagccatatgctccttgttttgattaaactatggtacagaggacttgactattggctagatcacctgaacttttgctgggtgctaaagaatactcaacatcatttgacatgtggtcagtgggttgcataatggctgaattaattgtcaaggagcctctgttcaggggtaaaagtgaacttgaacaactcgacaagatttttcgaaccctgggtacacccgacgagaaaatttggccaggattatccaaattacctggggctaaagcaaattttgttaagcaaccgattaatacactaagaaagaagtttccagccgcgtcatttactggtttgccagttttatctgagctgggatttgacttgttgaagcggctgctaacttatgaccctgaaaagaggataacagccgaagatgctctccttcatgattggttccatgaagcccctcttcccaaatctgatttcaagccaatttttccttcttggcagtgatgggacaggtactcttgctggatgcatgaaataccaagatcaatgctatttttactgtcattatttccaactttgtcttaccttgttaatgatcatatacaaagaatgatatgattgcaagggacagggtaatggacttcattaggctcttgtttgttataaattagattagaagcggcagattgatgtatagacctgagaaggtatggcattacctgatttttttcctttactgaaacaaaaatgtatcctctcttgtgctggtgaaaatgatgtacatacatttcaggacaatttagtaatagatgatggatatttgctctggtatgttgttttccttcctgtaccatctatttccatttacaatggtttgttcctatccttttagctgccccattaaattgggggctatcaagacttgttcttttttctcctacatttaatctttacaacaggaaatgctcctgaaaattttggcttcattgatgcacaagcattggtagctgttggatgtgtagaaaaataaatcaattgcaaggaatattcattttgagcatggtcagcaggtaatgatgttaggtttctcaatttgaaagtggttccctgaaataaaatgatattgtgttgttggcttttattaataaaaaaaggctaaaatgcaattttcattttctcaaatctttgagtctcttttttcacacttccatattatgttgctcaacaaaaaaaaaggatctaaattcttttttactgtacaagttcaatttgaaacttttgatatacagtaactgtcagcaagataacgtgatgtaatcttcatggttatgctatcgagttttgttccttttttgcctacatttaatttttacaccaggaaatgctcttttaaaaattttgggtgcattgatgtgccaagcattgatagttgttggacttgtagaaaaataaatcaattgcaagcaatactcattttcaacatggtcaacaggtaaacaatcgtaggtttttcattttgaaagttggtccttgaaataaaatgatgtatgcccctttaccgaaatatgaatttttaaattaaccagaggtggaattatgagtttaggcagtggattgcatgttgaactatggtgaagcagggtttagaagcttgtggagctgctgagaaaagagacacaggctgttacatagatggcgaagtccaccaagggtgctgaagtgaaatttgcgctcaatttgtgccttcttaacactgcaattggtgtaataatttgatgaagttcaagggaagtagcctcttgtaatgaggagatttttgttttttgtattgaaaatcctgtggtgatgaataatttatatcccttaattacagtggggtcttgtggaggctggtgaagaaatattgaagctggagtactattttgcggcagacgtttatcatttgatttgtgtataattctaataattcagaatctaactgaaatctaccaccccttccaaggattcactatataatgtatataatgtttttttttattcactataaaatgtataagattttaagggattcattgcttacttttcagaagagtaaaatcttcaaattagtttagttcacgagattgtacaggatagatattatagtctgatattttaaactcgtatatttagtgtcttgtataacgtcatttgtaacggatgttcaacttgcaacattagtccgaaaacctgccagttgaactcattgttaggaaatctaacaatgnnnnttttcagggtacatacacaagtagtgaacctttgcagcgctgagcacta

SEQ ID NO: 26752 - DNA, 1172 bp, Glycine max
  Clone ID: PAT_MRT3847_124157C.1
gtcaatgcttctgacttggtcagtcagcattcagatggggacacagtgacacctattcatcagaatgctgctacagaaccagacccacagatacataaccaactgcaatgcagtgagacagaaaacttagaccaaaatcctacagatggtgaggtcttaacatacacagaagagtcttccttaaatataaggaatgaagaagaatcaaccatatcaccttctgcctggttggagacagaagaggatctggaaatgcccaagccatgtgaggatgacaccttccaatctgcatctctagccaatgctgccccagtgggatcagctagtcctcgtgttcgtcattctctgtcacagatgctgcaagaagaaagtagtgaacctgacacatgtgagtggggaaatgctgagaatcctcctgccatgatataccaaaaaaatgcacccaaaggtttgaaaagactcctgaaatttgctcggaagagcaagggcgatacaggttccactggctggtctagcccatctgttttttctgaaggagaggatgatgctgaggaatttaaaaattctaataaaaggaatgctgataatctactgagaaaggccgcacaaaatgtgaaaagctacggacaaccgaaaaattcagtacatgaaggatatgaaagaaatttaggtagagatgatggcaagggttctcacaagatgcgagatggacgagatttaggtgctggttcaaccacaagagcgtcaaggtcattcttttctctttcagcttttaggggaagcaagccctccgagtcaaagtttcattagtgccatgggaaactaccattaattttgccatcatcccggcacatggattttgtcaggtttaatatggagttcttcctatttcttctgctagttgcatcaactacagctaaatcagaaataatttcagtgcgttgatgttataaattatatggcaatgtggggtttggtgggaatgctgtaaattcattaaattgtgacgcggtatttcaaaaattataatttatatcatctggctttccctaggaaattttcctatagctggattctttgttgtaatgttgtcccaaacgttcatgaatatggtgctgttacttcgaaattttgatcattgtagataactgaattatagttatccttcaaaa

SEQ ID NO: 26753 - DNA, 268 bp, Glycine max
  Clone ID: PAT_MRT3847_124158C.1
ctctgtccataatgtaacattggatgagatgtaaagagggatggtctagtattacatgtttgacctgatattaggttcttaaatactaatgaattaagatgttacggacgttcaataactacattgtatactcatgttggatttacactcgattgtttatgtcgaagtcacctctatgaatcctacaagcctaaaacacagtaaaatgcaattatgagaacatttggatcacccgaacaaaacccgcactattcactacgcggccgcc

SEQ ID NO: 26754 - DNA, 505 bp, Glycine max
  Clone ID: PAT_MRT3847_124159C.1
ctcataacacggcttccggctccgatcagcataatagggatcggtttgttagccgcccaggagcagtcgcaaggaattgaacggaagaagttttccatcgccgtcgatcagctccaccacccgcacattctcatgatcatgcgcttcttcacaccggtgggtgtgaaggacgagggtttgcatgtgtttgtccgctacttctacatcgtgatcgcgatgatgttcaggatggagaatgagcacatggttcagacgatggatcagcacattgacaacgatgttgtgcgctcgaccaatatgttccacgactacgtgcgcgcgatgaacgggaacagcgacaccctgagtggtctcttccagtaggatgcgattgtgaatgccatctgcgagcttcatcatgagtgggattctcgcggaactgcgatcttgaacaaccttctggagtatatgcaggtcgctaaggtggtctctgatatctacgctcaccacaccaatatggttgctc

SEQ ID NO: 26755 - DNA, 1876 bp, Glycine max
  Clone ID: PAT_MRT3847_12415C.1
tttggggttaatcctttatagaagagcgatgcacccatcgtacgagcttagtatgacctagtcgcgtgaagtcaacaacgcaatctaccggcgaactgaacttccccgttaaatagtggaatcgaatttcccttaaaaggaaaaaaaaaaaaaaagggcccttaggttttttttattttaagagtgaaaatatactaatatgaatttgatagttgaattgactatgcaatcagggcaacaacaatcgcactggttaacttagactacagaaagatatttagaaatgaggctggtctaaattaaaaatggaaaaacttcaatcaaaatggctctgccaaagtttagtacaaattagagtcaccagccaactaaaataaatggaaaaataaattgcaacaaagcaaattacactcttatcctctgtttaagataaaaaaattccacctggataaaatctagatactcagataattgcttcactcaatcgtcctcaccgaactaccaagccttgggctgcctgggacccatcctccgttattttgttggcctgaatggtactgatcacatttgcaatgtttcccctccatgtcactagctttgttctcagtgcttgccattggtgctgaccaaacacacgctcagtaggatgactgacaactacaacttgattcatttggtccatcttacagtcaattaagttagcagttaatcctctaactacccatagttccacctcatcatcactgatctgaagtgtgtccctaataagttcatatggaatttggccagatccatcagagctaagatccaccaatgacaaaagcctcattttggcaatgcattcttcatgcacaaggccataacttttcaacaaggtggaattggcagcatgatagtctaagtatgcatccagcctctgggtaagaaaaatcttaagaagctgatataacagagcatatttggcatccttctccagttgtgtaacagcaggcaagtctagtaaatcacactgaaatacgtcaggtgccctcacaaattccacaattgcacgtgcagcctcctccttggcttcactcaaaacatgtgagtcatctcccgaaaaagttgccagataactggtcaggaacttaaaagcatcctttgacatgcttttattttccttcaaaatattagagacagcaagaaagagctctctctgttctggtatcccaattttccagtctttcaagaagttatcaatcttattgaatgaaggtataatgtgttctgtgactttcccatcaacagctaaattcagtaacttcatgtagacataaaactggcagtatggagtctccaaaaggttgtacaggctgatcataatcttcaatcgcacagcaggcttttcatttggctgctggagtatttttgtagttataacttttacaatctccatcacttcatctggattttcggtctttgtaacaagattgcagatgatagtgaagatggactctatatctttttcagaaaccttcgagaaaatcaattcagcagaggtaatcatcaatgatgctagctccaaccactttcccataacaatgaattcttcagcctccacgcagagtctgctaacttggggctcagcaacctcgggaccggcatcggcccaggcaagttcagaggcgaatcgaacgacggagagtgcagcgtcttcttcggaggttggcaccacagtcgccatgttttctgtaactgcgaggttctaaaccctagctagctcgcgccgcagagaacacgatgtgagcgcaaccacaaccccggtggtgggcaccgccgttagtcatggtttctgtaactgcgagcgagagtgcggcacagagcaagaagaacgcac

SEQ ID NO: 26756 - DNA, 501 bp, Glycine max
  unsure (1)..(501): unsure at all n locations
  Clone ID: PAT_MRT3847_124160C.1
gtcgcangcacgcgtacgtaagctcggaattcggctcgagcgaacttctgaaagaatctgggagccagagtattaagaattactaggaatttttacgaccaacacaaagttgaaaaatgaaactattgccatttgcagcaagtatggccatggtacgaaggatgtggggggtcagcccagcccactctttgcctccacccctgcctagttgtggcctggcctgggcgggccttggtctttgttctcttgtccagcttggagacagggctgcagctggtgtctggctgtcccccagctgcagggtttctatccagacctccctggtggcagctgtgggtgggcagcaggtagggaggctgtgagcggggggtggggggtggccatcccacctaggcatagggcagtctgctcagctcagacgctgctcaagggttcaggactctagatgcctggacaggtgtcagtcttaaattattaaaaagccaaagctgcttcccctgg

SEQ ID NO: 26757 - DNA, 399 bp, Glycine max
  Clone ID: PAT_MRT3847_124161C.1
ccgagccataatcaaggtcttttaacagcaaaaattacttgttggcgcccaaacttttatcaaggattctgggggggggacaaattcccgcataaacaaataacaggattttttcctataaccacattttttttaccaggggcaaaataagaaaagggacccgcaacaaattcggactggccagattttggggggaaaatccattttaaaaacctttaaaaacaacctggaacccccttttacattaggacatttttgaacaccaacaaaacccaacttcctaaagggccttctggaaaaaaacctctaccggtggttggcccttggagggcggtcaccctggtggccattaccaaggtggggccttccaatttttttaaggggcggagaactcttttt

SEQ ID NO: 26758 - DNA, 112 bp, Glycine max
  Clone ID: PAT_MRT3847_124162C.1
cgaaataatagggttgatgcccaaaaccatgaaaccccacccctcccacatgcaggcctacgaattcaacacactgcgaaaaactataaaccccaaggacatactaaccccc

SEQ ID NO: 26759 - DNA, 605 bp, Glycine max
  Clone ID: PAT_MRT3847_124163C.1
ataactcattgcaattaaattttactatactttcaagccttcaacgagagtcctaaatgtacaaagtttagaattccatgccgcatcaaaatgatgtcgatgtatggccttataaatacaaactaaggaaatgctcatcatcatattggggatttcaacattcagaatttattcaactgggaaaagctccacattgcagttgccattccatgcaatcttcaaaatcaaaactacttgcacaacccaacaacgcgttttgttgttgttcataacggcatatgtaattgagtcccataagaagctggcatatagcttcctctgtcttgtccttatcagcaaagtataatgtctgaaatagcagcacatttgtcctgctaacaatttggtgctgctcaaaattcctctcactttgccacctgatcatgttatgggcaagtggagcaagccacttgagtatcccatcaagagtcaccttccagtcatgagcaagaggcgcatcatatatggccaagttcttcacatagctcttaagtttgcctttcagagacaaccttaagctcgtcggtagcatctgatatagattattccgagcttcctcgccaact

SEQ ID NO: 26760 - DNA, 430 bp, Glycine max
  Clone ID: PAT_MRT3847_124164C.1
ctgttttggcaggggatccggtccactttgaggcaatcagctattactactaaagatacctaatatattagtatggcgtatcagctatctgctctgtacaaagctcatcttggagctgcgatgcggcagcccaacttggtcaagttatccggcctggcccggccacgccaagcctctcatcggaagccgacccgatcacctgagcggaacgtgaagagcgcaaagactgacgatatgatatgctggatatgctggatatcctgggtattcctaggtattcggatggtcctagtgaatttatatgccagattaacagttctgacataaagtttctattcaaaggggatgtactgccgaagctactcatgatcatgtcaagcttgaatcatactacaaccggattttttaaataatagttatgtatttatgt

SEQ ID NO: 26761 - DNA, 1669 bp, Glycine max
  Clone ID: PAT_MRT3847_124165C.1
gttgagtagccttttactcctagagaaattttgtagctatagagaggaagccaaagagaccttgattatctttattataataataatggaccaggcgaccacgttcaacaaatatgcctttgcttgtgctgcagttgcttcaatggtatccatcatatctggctatgacacgggtgttatgagtggagcaatgatattcatcaaggatgacattggaatcagtgacacccaacaagaggttctagcaggaatcttgaacctatgtgcattgggggggtccttagctgcgggaagaacctccgattatattggtcgtcgctacacaatcttgttggcctcactcctcttcatggtgggtgcaattctcatggggtatggtccaaactatgcaattctaatgcttggaagatgcattggtggtgttggtgtaggctttgctctcatgatagcaccagtttactcagcagagatttcctctgcatcatcaaggggttttctaacctcgttacccgagctttgcatcggcattgggatcttacttgggtacatatcaaactactttttggggaaattgactttgaggctgggatggagattaatgcttggggtagcagcttttccctcgctggctttggccttggggattctggggatgccagagtccccaaggtggttgacaatgcaaggtcgcctaggggatgcaaagaaagtgttattgcgagtttccaacacggaacacgaggccaagcttcggtttagagaaataaaagttgcaatgaggattaatgattgtgatggtgatgacaacaatgtgaaaccttcttacaagtcacaaggggaaggggtgtggaaagaattgctggtgaggcccacaccggaagtgcgttggatgctaattgcggcagtggggattcacttctttgagcatgcaactggcattgaggcagtgatgttgtatagtcccagaatcttcaagaaagctggtgtcacaagcaaggacaagcttcttcttgcaacggttggtattggcctcacaaagatcattttcttggtcatggctttgtttttgcttgacaaagttggtagaaggcgtcttttacaaatcagcactgggggaatggtttgtgggctcacacttttggggtttagtttgaccatggtggatcgttctagtgaaaagctcttgtgggctttgagccttagtattgtggccatttatgcttatgttgctttctttaatgttgggcttgggcctgttacttgggtttatgcgtcggagatttttcctttgaagttgagggcgcaaggggctagtataggagttgcggtgaatagaaccatgaatgctgtggtttccatgagttttatttcggtctacaaagcgatcactataggtgggagctttttcatgtttgctgggatatctatagtggcttgggtgttcttctactttttccttcctgaaaccaaaggtgtgcccttggaagagatggagatggttttcagcaaaaaatacagtgggaaaaatgtagcgatagaaactggtccatgattgagaaagtgtagtgtgttatatagtgagaaagagcacttcagagaataggtgtgattatgtagcattgtgggctacatgttttaaaattcaacacgctagactttatatatgttc

SEQ ID NO: 26762 - DNA, 217 bp, Glycine max
  Clone ID: PAT_MRT3847_124166C.1
atcatgtcccacttatcactccatgatattcactataagtttcactagtctttctatcatcaagtctttagttatttcattacaaaattctcttttatctgtccatttcttatctgtaaacaatatctttaaattcaattgatttaattgctatactaatcattactattatgaacttttctcctaaatctcataatcttccattctctattactaa

SEQ ID NO: 26763 - DNA, 631 bp, Glycine max
  Clone ID: PAT_MRT3847_124167C.1
ccttcatttcccgagtgattcaccgatctgataatcgattgaatttagggtttgggagatggcgtcgagtgtgttgaagagcctcctcctgagattttcctcatcgaggaacacgacgaccaccagaagtttcagcctcgttacccctcaaatcagcaaccacaccgccaagtggatgcagataccgatcctgccctcggacacccgattgaatttatatgccttgacttgcccgagccagctgtttgcaaatattgtggccttcgttatgttcaggatcatcaccattaggactgctttctacaagtattctggtgtgtgtgcatagtaagtaattgtgagactggaggtgctgcttcattgagcgatctattttatataattcctaatttgcaagctcctgaatcctctgataacactacttttcagttttcacgatcctggatagtgaatgttagaagcaaccttaaatgggggtagacggctgcctagctcatttaaatttgccttttttctatcttcgaggtcctaataaagtaaagttttaatttatagtcttactctttagttttcataaaattgtatttcatttaaaagtttatccaatgattaatggaaatattttaaggat

SEQ ID NO: 26764 - DNA, 317 bp, Glycine max
  Clone ID: PAT_MRT3847_124168C.1
gatgaacagaacactgcagttgagcaagtaatagaaatagaaaactgtgctgaagaagaagtacaagaaaacattgagaagatcgttttggtagatgaaggacaagaaaaaggaagtagcttggttttgaaagaagaggagaaggaggagctagatgaagaaactgaactattggatgtaggtgatgaagaggaagataaagggtcagaaactgattacattctgattgaagaaagcatagaagaggacgaacaagatgtagaagaagaaagctgtatgttgagcacagaggagttgaaccaaaagtttgaagattt

SEQ ID NO: 26765 - DNA, 427 bp, Glycine max
  Clone ID: PAT_MRT3847_124169C.1
ggctaacaacgccaccttttaatgattgcggggactctttcttaatattcatcaaaaactcactttcatatcaaggacttttaaatactttccttaaaccacataatccatttacagcctcataaatacacataaaactccaccacaattctaatatcacgtattaaattaaacacctaacatttgattatcattcccccaataaaatccatgcccgagactcagcatcaaaatctgaaccaaatggagcaatatcaacaacttcaccaaaaagtgccacttttcttttaaacctaccggcaactcatttcctaaaaatcaactaagcggcataccccacgcgacagccattataaccgaccttaatagcaagtctaatttcctgataaaagagctactgttccaaacatattcgcccatcaataat

SEQ ID NO: 26766 - DNA, 386 bp, Glycine max
  unsure (1)..(386): unsure at all n locations
  Clone ID: PAT_MRT3847_12416C.1
gacccacgcgnccggnaggactatggacgaggcaagnngggggggagcgcaccgccgacgagaagagaccnggacacaccacagaggcaaaggaaaagccgcggcgacgccgccaggcaaacggccgcccagacgaaagaaaaaacagcagaagagaagcgagcagncgaggcccccgcaggacnngcgcacgaggggggggcaaaggaaagaaggacgccgngacagcanggnacaacngngccacacacacggagacaggaggaagaacgaccgaggccggggcagggacagcccccaggaggagaggggaaggaaagagcnncagaagaaccagcaggagcacagccccccgagcgaccggcagccaaccggcgccaaagcag

SEQ ID NO: 26767 - DNA, 379 bp, Glycine max
  Clone ID: PAT_MRT3847_124170C.1
ggaattcggcttgagatttaaaggaagaggaagccgactggcttcgctagatgcaagccaaggtccattaatgatatcggcagcgttcaagatcctgctaatgcatctgtttctcatgctgacaaggacgaggctgatgctcggtctgctcctgctgtcgatgatgattcttattactctgcttctataattagcgccaggcatgtgggatgctatacattggacttgtgcagtgtgtggacacctgtacatgggcagatgacttgatgcgttgagctagagagaaagagcccttgcatattgtgtctatcaaatgtattgatatatcacatcaccgtcatcacagactcttatattgcagagacagagactgatttca

SEQ ID NO: 26768 - DNA, 152 bp, Glycine max
  Clone ID: PAT_MRT3847_124171C.1
cacatcaccaggtattaaaccaattaccaggcaaagggagaagtatactgacgcagaagacgagggtcaaagttcaatggctgagaagacggaaatgattccgcaacaatgtgacatcgatgccacatgggacgcctgcattgatctcccgt

SEQ ID NO: 26769 - DNA, 480 bp, Glycine max
  Clone ID: PAT_MRT3847_124172C.1
tggccttaaaaatggcagatgagtgggtagagctagcttatgcacgagatgataataacgagacagctttgcatctcttggctgtaaatcaaaaccctttggattcgtgttgtcattgtccagagatggaaggttccttccggatcaaccctgacacgaaacatgtgatgtttcaattggttaattttctctggaaaaaaattctccagcacaaagaccattcggaggcaatgagaatcataagtgagccttctcaactattatacgatgctgcagaagttggtaattttggattcttgtcagagcttattagtgcttaccctggcaagatcatatgggaagtggacaacaatgggcaaagtataattcacacagcagtttcatatcgccatgctagcatcttcaatctcgtacatgaaatagggttcattaaggatattctaatatcatatattgtcaaagaaaacaacactttattgg

SEQ ID NO: 26770 - DNA, 362 bp, Glycine max
  Clone ID: PAT_MRT3847_124173C.1
gtctcatgacagtagataatcaaccagatcaggaattgatgcaggatgaagttaatcttattttgggtaactctttatttttctcttctagtatgtttgaaatgaaaaaaatacctagcctttggtaatattctgttgcaactgtcttaagcctcaaatggtgatcgggccacgtactgattctagttgttattattatgatgtgtcgtgggggaaaaagggatttgttcaatcaagcaagtgaactagctaacttataaattaaatcactaacttgaaatatcactcgttcaggacttcagggtacatgttttacctttccctctcattttccatgatacaagatttgattaacacatcag

SEQ ID NO: 26771 - DNA, 463 bp, Glycine max
  Clone ID: PAT_MRT3847_124174C.1
gccgtcggaccggttgcaaaagaactcaaatgggggattttattgcaataaggttagaaatgggatagggtttgggaaggttgaaaatgagatgagaaaagttgtgaattggatacgatagtttttgtggtattttaccgagatctaaaagaaagaacgaaaaatgcaggatatataagctgacaaaaaaaaaaccctgtaatgtgaaagtattagaaattcaagaagacaaacaaaatgtagcttactatagtagaattcaatttggagtggtaaaagaaacccttaagttcgaggtttataagacatgtgtgatggagtatgtattaatttgagaattctaagcgcaaacaataaagacttttctacaagggtatatatttttgtgttacttagggctgaaccatagatagtattagatatgtttccttgggatataaaaaaaatctataaatgcatgctt

SEQ ID NO: 26772 - DNA, 499 bp, Glycine max
  Clone ID: PAT_MRT3847_124175C.1
ggaaaaaaaaactgattccaccctggtggcacgccgtttttaatttgaaaagacccacgactcgattgcgttgttccaaatcgaaaagcacgcgatccacccatgcacgtccggggtacccaggaaaacaagcagaaaaaaaaactgggcatgcttgccaccggaacaatagatttcttgcacttgaaagggaattttttccaccaaagctcagaggactaacggtgtatcctcaaaatgttcttgcccgccacatatgcgaggccaaattgaggtgggtaccccgcgtcccgtccaaaggtatatgggaacgaccatatttggtgccccttaaccttaactttacttttaatccactaactatgggatttccaagggccctcatggactctaatctgaagcccatccttttgcgcctcatggagcgcgggggagcgattgtttgattccccacctcctttctggcaaggaacactgggggattatcgtaggggcccct

SEQ ID NO: 26773 - DNA, 369 bp, Glycine max
  Clone ID: PAT_MRT3847_124176C.1
acgcgtccgaaggaaaccagcttgcacaaaagcaatgactatgtcatttaaaccaaacccgagtactgacgcatggagctaggaatatctgaagcgaaccggaattcaaagtgataacactacgtgacactggatggacagccacaccaaagaaggatgtacaggtaacaactgattggcttaaaacctacaaggaaagggtacccaggaccaaaggagttacaaacacacaaaaacctagtgagcaaaacaggaggatggggaaacagacatacccccagggcacaaaccgaagtgttaaaagaaagcctccctataaaagggggaggagccggtgcaaagaaagcaatactatgaaaatgccaaaag

SEQ ID NO: 26774 - DNA, 334 bp, Glycine max
  Clone ID: PAT_MRT3847_124177C.1
cccgcgagcacgcccttctcgcctttacccttggtgttcgtcagctcatcgttgccatcaacaagatggacaccaccaagtggtccgaggcccgataccaggaaattgtcaaggagactttcaactttattaagaaaggcggattcaaccccaagactggtgcttttgtccccattttcgggttggaccgagaccacatgttggaggaatcttccaacattaactggtttaagggattgaagaaaggaaaccaattttggcaattccaaggaaaaaaccttcttgagggcattgaattgattcaagcccctttgggaaccaaccaccaagccct

SEQ ID NO: 26775 - DNA, 154 bp, Glycine max
  Clone ID: PAT_MRT3847_124178C.1
tctttttatcctttttttctccttactcaaagagcattagaaggttctatagattttggccagtccatttgtataagtcatattcacttgctaaaaggtatcaaatatattacaaataacagactttataacaataacctcttctctaataatt

SEQ ID NO: 26776 - DNA, 415 bp, Glycine max
  Clone ID: PAT_MRT3847_124179C.1
cttggtgcttgggatgcaaatgcagcagatcagacaaaatctaatgaatggtcagactggggaaagaagaaagaagttacccaagaaggcaatgtccaagattcttggggctccggtaagaggaaagacaaagttacccaagaagacaattctgggtctggtggttggggtgccaacagaacagatctggcaaaatccaaatctagtgaatggtccagctggggaaagaacaagtctgaaataccagctggtggatctgaaaatgtgcagaatgactcatggggctcgggtaaattggaagatgatacccaaaaagaaaattctgggtctgcatgggtgagaaataaagcttaaacaatagatggtgggtcagaaaagccccaagaggatgcttggaattctggtaattgaaagc

SEQ ID NO: 26777 - DNA, 210 bp, Glycine max
  Clone ID: PAT_MRT3847_12417C.1
ggaactcgtgctagagtgtgagtggttgttactggaacttgttcttttgctgttgtgggtctgagtttgagtttgctcttacctgtcaactgataacggcttgctgcactggtaactgtggatgcggtagctgctgcaaatgcggtagcgactgcggaagatgtaccatgtaccgagactcgatgtacactgcatcaaccacaacctaga

SEQ ID NO: 26778 - DNA, 250 bp, Glycine max
  Clone ID: PAT_MRT3847_124180C.1
ccctcgcccgctgcacgacacttcttcgccagactcgtcgacctcgagctcttgccctttcctttctttccccccaccagacaacatcaacaacatcaacaacaacatctccaccactccacctcctcactcgacacacataccctcacctcctccaacagtgtgcaaccatggccactggcgaatgccccatcaagcacgccaacattggcggcggcggcaccaggaaccgcgactggtggcccaacga

SEQ ID NO: 26779 - DNA, 454 bp, Glycine max
  Clone ID: PAT_MRT3847_124181C.1
acgagattaggttcccaacctgagaatgtgaggctctaccattatttgtagtatcagttaaggttatcaaactcgtgagagttttataaactccattgttagacttgtaagagtcgatttcatataaaaataataacaaaatatctattaataacatactaattaaatatttcaacaatataataaagtaaaataataaatcataaagttcagaatatttaaataaccaaatgtattaataatacattactactagataataatttgtagaagttatagtagtggtataacattttcattgagagtagtttgatgttattagagaataaggatttaatattaataaaggtaataaatatgagaattttgtatttgagaataacaccttaaataaaagtatgttgaatgttaaacatacaaataacaataaaaaatgaatgatattttggtctaa

SEQ ID NO: 26780 - DNA, 1002 bp, Glycine max
  Clone ID: PAT_MRT3847_124182C.1
aacaaatctataaagatcgccatgtcttgtgtttgtgtctatccattccatttctttccaacacacactttctctctctatctttgggtgtctttctttttgttcattgttgatgatgtcacgcgccgccgtgctattacacgcgccggaggaagatgcggcggcggaggagtgctgtacctcgacttcgtcgtcgtcgatcgggaggaacagcgacgtgtcgtcggagagatcaatggaggaaggagaaaacgaggtggaaagtgcttaccatggacctttgcatgccatggaaactttggaagaggttcttcccatcaggagaggcatctcgaacttttacaatggcaagtccaagtcattcacgaccctggctgatgcagtgtcttccccatcagtgaaagacatagcaaagccagagaatgcatacaccaggaggcgtaggaatttgatggcattgaaccatatttgggacaagaataatagaaactaccctctaagaagcagtggtggtggcatttgcaagagatcaatcagcttgagtagaagttctctggctcttgcagttgccatgaacaactccgacagcagtagtagtatcacaagcgacgattccggttccagctcgaattcgatacctcctccctctccactaccgccactccatccacgaaacagagtgtcttccttgcggaatttctctccctggagatcattttccttgactgatctccagcagcattgtgccattgctgcaacaataaagatttcaagtccctccattggaaatgaaactgctcatccatcatagtaataaacaaagaggataacaaactatattattattaacttttagcttatttgaatgactatcttgctctagtcctatttgtttgagggagcaacaagttggagaagcagtgcctttgtgtacgtacgatcacttcaaattaacttcactaggatatgatatggcagtccttagagcatttaaaaaaaaaa

SEQ ID NO: 26781 - DNA, 1111 bp, Glycine max
  Clone ID: PAT_MRT3847_124183C.1
cccacgcgtccgcggctgcgagaagacgacagaagggggatgtcttgtttttgtgtctatccattccatttctttccaacacacactttctctctctatctctctctctctctctctctggttgtctttcattttgttcattgttgttgatgatgtcacgcgccgccgtgttattacacgcgcaggaggaggaggaggaggagtgtagtacttcgacgtcgtcgtcgatcgggaggaacagcgacgtgtcgtcggagagatcaatggaggaaggagaaaacgaggtggaaagtgcctaccatggacctttgcatgccatggaaactttggaagaggttcttcccatcaggagaggcatctcgaacttttataatggcaagtctaagtcattcacaaccctggctgatgcagtgtcttccccatcagtgaaagacatagcaaagccagagaatgcatacaccagaaggcgtaggaacttgatggcattgaaccatgtcttggacaagaataatagaaactaccctctaagaagcagtggtggtggcatttgcaagagatcaatcagcttgagtagaagctctctagctcttgcagttgccatgaacaactctgacagcagtagtagtatcacaagcgaagattctggttccagctcgaattcgttacactctccctctcctctaccgcctctccatccccgaaatagagtgtcttcttcttccggctcaggtccatcctctcctttgttgcggaatttctctccctggagatcattttccgtggctgatctacagcagcattgtgccattgctgcaacaataaagatttcaagtccctccgttggaaataaaacagctcatccatcatagtaaaaaaaaaaaaaacaaagaggataacaaactatatgttattaacttttagcttatatgaatgaatatcttgctctagtcctatttgtttgagggagcaaaaacttgtagaagcaatgcctttacgtacgtacgatcacttcagattaacttccgtaagatataatgatatgcctggcccttaattagagcatccaaaaaaaaaaaaaaaaaaaaaaaaaaaaagcggccgctctagagga

SEQ ID NO: 26782 - DNA, 429 bp, Glycine max
  Clone ID: PAT_MRT3847_124184C.1
cgcgtgggttcgggtgggtgcatttcttaataccattgcgccgattgccccagacatgaattcaaggttttagcttttgagtaccactaccaatggtgattttgttcaaggaaaagatcttgcaatggttaaagttcatgtagcaacgtgctgttgctggcttgacattaagttacactttaacttcattgttgcacactggtttgcaaaaagacagagggtgaattgtggaatattttggagggaggtggtactatgataataagggttgtcttgccccgcactaagtattttaaaggggtgatttaaacctttggtcacaaatggtattttttgaaaatacaaggatatccattggcctgggccatgaatgtgtgtggtaaaacgcttcaacaatcgtttttaaatttaccaccactctgcttttta

SEQ ID NO: 26783 - DNA, 1097 bp, Glycine max
  Clone ID: PAT_MRT3847_124185C.1
cggctctagaagaagaaaagaagaagaaacagaagagagtcgaaaacggcagtcccctccctcatcggaagggaggaacacagccagccacgacaggattactccctggaatcgggttctgtcttcttcattgcagcagatctcactacactgcatgcatatgggagcagtggttgtcttggaccctttaaaaagcccccactaattgctactgcagatgttccgccaaaaggattgaggaaacaaggtaaggcagcaaagaaacctagcacatcagaagatttctggatcaccagcacgcatgatatggacaacagtgctgttcagtcacagggaagcatctcatcagccagtataacaaaccaagctgcagatcctcatggaggttcatgcaaccccactgagtttgtgaatcatggtcttattctatggaatcagacacggcaaggttggataggaaataaacggtctaagaaccaaactgaacagttgcgagaacccaaattgagttggaatgcaacatatgaaagtttactggggagcaacaagccattccctcagcatattccccttgcggaaatggttgattttcttgtggacatctgggaacaagagggtctgtatgactaacctatagaagactgaaggggtgtcaattggtttgatcaacagattaattatagttctttcttctgagtgtagaggaaaattgggcatactgcagtttgtaactttgtatatctgttgtaatgttatctttcagttgataatgacgaggaattttattagtttctccagaggcctggacataattgtattattattctcctttgcattttaatgttgaaacgaaaatttcctgtcaaaaatacattatgcagctttgcaaatcacatattggttgaatttgtttaagacaaaattagttaacccatgggctcattattgggcgaaccaatctgtgtctggcaaaatgtacctgatgcatgttgatataatatatgaaatgtggtctgagtgtagttcccttctgtcgtcttctcgcagccgtacccttctgtcgtcttctcgcagccgtacccttctgtcgtcttcta

SEQ ID NO: 26784 - DNA, 464 bp, Glycine max
  Clone ID: PAT_MRT3847_124186C.1
ggtccgaccgacgcgtgcgacctcacatcctatatatttcaacaaataattaatcttatatattacatcaaatcattaagataaggcacaataaaccggagtgtaatctaagaatatatatactgataacataatgatacattcagagtaaactaaatttggacctacttaaatttatctattaatactcatacataatattattaattgaattgaatttatgttaatatttgcacctacatataaacaaaatctacctattcacaaataacgttactctaattcaataattcattgctatgcttatacagataatcctactattcaaaataatatttattaatattactattacctacatattctatatattcacattgcccatttacttactaatatatgcacatactaaatatactccattatatctacataccatacttgtactaatcaataaatgaata

SEQ ID NO: 26785 - DNA, 444 bp, Glycine max
  unsure (1)..(444): unsure at all n locations
  Clone ID: PAT_MRT3847_124187C.1
taccnngcaaaaacagagatgaatattactgacaacctaaaatgaatctttagacagtgtagagggtatatgacgaactgaaccagattcatccaaacaatattagttatcatttcttatcccnnncgaggggtgaaccaacaaatctcatgatctatgnttattatgaatcggttggcgagacctatccttttttagagccccctttgctacatttgtctgaaaaaatgagctcgaatttaactatttgacttcacatatcagaaaggctgcctgcttactttcagtgagcctgatgttgcgcattactnnagtacgaggaatatgattacttgttgactgnctatagatgatcgttnnctnttcactttcatagtattcgtacagtcttactattacagttgannnaaggacnnagatcttatctatatctatgctatacga

SEQ ID NO: 26786 - DNA, 190 bp, Glycine max
  Clone ID: PAT_MRT3847_124188C.1
aatgaatgctacaagcagaatttctgccttgatagattaatattctgatgatgatgaagattttcaaatattagaacctgaactagaggcataccaatttggtcttgagtatgatgtgagacaaacagccttggtagaagaaccggcacatgaaattgccttttcttccttttcgggcaatttgcgccga

SEQ ID NO: 26787 - DNA, 633 bp, Glycine max
  Clone ID: PAT_MRT3847_124189C.1
ttggagtggattttgcattgcgatgtgaagcctcaaaacattctccttgactcggatttccaacccaaggtggcggatttcggtttgtcaaaacttttaaacagagacgagcgtgggaattctactttctcaagaataagagggacacgaggttacatggctccggagtgggtttacaatctgcccataacttccaaggtggatgtttatagttatgggattgtggtgttggaaatggtgactggaaggagccctatggaaattcacagccttgagaacagtaggggcatagagcagcgacggttggtgatgtgggtaacggacaagataaacgatgcacccacgagtgggttttggattgaggagatacttgatcccaacttggaaggccaatgccaagtttcgcaagttgaggttttggttaaggtggctttgcagtgtgtgcaagatgacatgaatcaaagaccctccatgagccaagtagtggagatgcttctgtcccatgaaaataatgtgctccctcgttaatctttttttatttgtttgtccttgtttttaatttttaatttgctgctatgtaatagtccacggttagtttttactgactgaattttcaatttttcaaaaaattaa

SEQ ID NO: 26788 - DNA, 163 bp, Glycine max
  Clone ID: PAT_MRT3847_12418C.1
agctcggaattcggctcgaggtgagacttcgagcacacgagttggtttccaggccaacgaaccaaccacgcggggggggtttttgtgcaagaaacgccacatgtccccccagcaccgaaaggaggatccccaccaagggaacaacggggaagcccacccgggc

SEQ ID NO: 26789 - DNA, 189 bp, Glycine max
  Clone ID: PAT_MRT3847_124190C.1
aaacttacaacatcacaacaacaacactaaaaccctccacataataaagaggagaacataaccactattaacaatgctttaatacaactaaacaaaagtgcaactaacatctactgatactctacaaacccttacttttaaaaatgattaaaataaaaatcatatttgtgaatccaaaactcttccaaa

SEQ ID NO: 26790 - DNA, 1769 bp, Glycine max
  Clone ID: PAT_MRT3847_124191C.1
acgacgggctcatttgtgatacatgacgttgaaacccggaaggaaagtttaattggcagcattccatttccataagaacctccgctagctagctgcgtataaaatataaaatataaaggggaaaaaaaaaacgagaaaacagtgtcatattattattccttccttctcactgtgtctggtgcataaacctcaacaacacactcttcaattttctagggtttgagttttgctccctttttcttcgccttctccaatggccgcttcctcgctcctgagatccgcgcttctcgctccttcctcctgcgatcgccccaaggtatataccaatgcctcaagttctaatttaaaatccaagggattacatagcagcatttttggtacttcaattcaatgtgactccttagtcttacaaaattgcaatggtcgtgggatccagcctattaaagccacagcaacggaaatccctctccccacccagcaatcaaggagcactgggaagacaagagttggaataaatggttttggtagaattggaaggttggtgttacgtgtagctactttccgagatgatgttgatgttgttgcaattaatgatccatttattgatgcgaaatatatggcatacatgttcaaatacgattctactcatggtccattcaaggggtccattaatattttggatgactctactttggaaattaatgggaagcatgttaaagttgtgagcaaaagagatcctgcagagatcccatggagtgattttggggctgattatgtcattgagtcttcaggagtttttacaacagtggagaaagcttcatcacatttgaaggctggtgccaagaaagttgtaatatcagctccatcggcggatgcaccaatgtttgtggtaggagtgaatgagaagacatacaacccaaaaatggacattgtttctaatgcaagctgtacaacgaattgtcttgctcctcttgccaaggtggttaatgaagagtttggaatagttgaaggtttgatgacaacggtacatgcaacaacagcaacacaaaagaccgtagatggtccttctatgaaggattggcgaggaggaagaggggcagctcaaaatataattccaagttcaactggtgctgcgaaggccgttgggaaagttcttcctgagctaaatgggaaactcactgggatggcattccgtgtaccgactcccaatgtttctgtggtggacttgacttgccggcttaagaagaatgcttcctatgaagatgttaaagcagcaataaagtatgcctcagagggaccactgaaaggtatccttgggtacacagacgaggatgttgtctctaatgactttgttggtgattcaaggtcaagtatctttgatgccaaggctggcattgcactaagtgcttcctttgttaagctggtttcgtggtatgacaatgagtggggttacagcaaccgagtattggaccttatagagcacatggcattggtgggagctcaaaattgaacaccattagtgtatgttgtgttgcaattcttgttgaatagggtttaatattggtagagtggtttaggttcagattttggttttgatctgatttttataagatgtgaggttaaatgatcacatcatgtacactgaataaaataaaaaaggatattatcctggttacctgttttggaattaccagcatgaattttacaatctgccttttaaaatgatagacaatatgctgtgttgcaattcttgttgagttaaaaaaaaa

SEQ ID NO: 26791 - DNA, 232 bp, Glycine max
  Clone ID: PAT_MRT3847_124192C.1
gtctcgctccgagactttggaggcaaccatttttgtcttgcttctgcttctggtggacactgagatgatggggccaacaatggaggcagatgcaagaacttgtgagtatcagagacaccgtttcaaggggccatgtttgagtgacaccaactgtggttttttttgtcagaacgaacaggccactggaggacactgtcttggcttccgccgcagaagcagatgcacaaaacat

SEQ ID NO: 26792 - DNA, 253 bp, Glycine max
  Clone ID: PAT_MRT3847_124193C.1
atattaacctccttttatagaaaacaaatatcggcccataggggttaagaaccaagagggggactttttactactcattgctagaaattcaacataaaaaccaaacgaatccctatgcctaaatcttagctttccgttcattacaacatattaattgaacaattttgcacaaaacatcaatgaaatatatcctccaaaaaacttccttatgaggatattttttttgtacgaatgaatgcctaccaagcaacaa

SEQ ID NO: 26793 - DNA, 1141 bp, Glycine max
  Clone ID: PAT_MRT3847_124194C.1
attcggctcgagctcccggattaaacatccttgcagcatggtctccagcctcagctggaatgaagttcaatattatatcaggaacttctatgtcttgtcctcacataactggaattgcaaccttggtcaaagctgtgcatccttcatggtctccgtctgctatcaaatctgccatcatgacaactgcaacaattttggataagcaccaccaacccattagagcggatcctgatagaagacgggctaatgcttttgattatggatcggggtttgtgaaccctgcaagagttcttgatcctggtctcatctatgattcacatccagaagattttgttgcattcttatgttcacttggttatgaccagaggtcactccaccttgtcacaggagacaacagcacatgtgatagggcattcaaaacaccatctgacctcaactatccatctattgcagtgccaaatcttgaagacaacttttcagtaactcgagttgtgactaatgtcggaaaagcaagaagtatatataaagctgtagtggtgtctcctgctggagttaatgttactgttgtgccaaatcggttagttttcacaagaataggagagaagatcaagttcactgtgaatttcaaagttgttgctccctcaaaggattatgcatttgggttcttgtcatggaagaatggaagaacacaggtcacgagtcctttagtgatcaaggttgcaccagcaagtcatgggttggtgagatagcaatgcttgtaattatgtatatagcttaggagatgtgagatccctgtagtcactaagactagaacaaccctgtcttagttcaaatccgaatgcacatcaacttccaaacttacgttttagttatatgcttgagacacccggggatatcaaacacagaattgaataaatgatatcttgatgccctgaacaggctgaacgcattcatagattcattatcactatttgtcagttatcacttatcattacagaattttcttatgtaggttagtcagcacttgccatgcataagtttagtgttgtctttttccacagaaataggatgttaagaaagtatggtcatcgtgttaatattttacttctttacaaaaagaaatgcaagtgaaccatttaat

SEQ ID NO: 26794 - DNA, 668 bp, Glycine max
  Clone ID: PAT_MRT3847_124195C.1
gataatatagacggaaataagttatttttcaaaattgttattgatcgtaaggtagatttatcctcaacaaatatcagattattttcttcctataacagcaatccagcatgtaaactgatacacaacgtagtatagaccagtgggaggataaaaaagaaggctgtgaagtagcatgtcaagtttgcaagaaatctcagatttggatgcgcgtttttgttaaagaaatgaagaaacagaaagacagcaagacaatccacgtgcaagggaagcataaaaccttagcagtggagtgagagaaaaagaaagagcttacccactctcattctcactccttttattaccatttccaagccaagacgctatcatatcaattcctcttccctaaaccaacagatctatcacgcaatgccatgcttctaatttaattattaattctttccaacatgaaattgtctagttattctatccaatttgtgcttcttataaacgcagagagctagagaagatggacattaacccccggcgccaccactattaccaacgcttcctcacatgatttcaatgttttacgccgctcaggcacggctatctttttttttcgtctcctttcgtttaaactccttctacccacgaagccaagtattctactgagaaccccaccagctttt

SEQ ID NO: 26795 - DNA, 414 bp, Glycine max
  Clone ID: PAT_MRT3847_124196C.1
tttcgtcattttttttattttttttttttttttttttctttcccaggacaaaaggggggggcgggaaattcaatttaaggggtctcttcaacctaaaattattaaggaagaccgtcccttataaaaaatatagtgagaacaactaaaacttcccatcttttatttgcacctaaaacattgagaaagctaaaaatgctccaccctagttccataaaaacttctatcacttggattacatcaacaacctttacgaacagaaatatttacttgccaagagtgcttttgctccacatcaaaactggaaaaaaattcccctttgaatagtatcctccattgcatttccaagaggagcactcttaaaaaacttgtcagaccaatggactctcttgacattctttcgcttttggacaagca

SEQ ID NO: 26796 - DNA, 172 bp, Glycine max
  Clone ID: PAT_MRT3847_124197C.1
gaatcaggagaagttaatgaagatggccggttcggctggaactggaggaaagggtactgagagaagaaagaagaaggctggccacaagacaacgaccgcagatgacgaaaggctatatagcaccctggagagaataggggtgaatgccattcctgctattgaagaggtcaat

SEQ ID NO: 26797 - DNA, 288 bp, Glycine max
  Clone ID: PAT_MRT3847_124198C.1
gcttccgctgagtgtcgcaatcaaacatggaatgtttggaataaagggcttgactgtgtgatttaattccaagattttgagactgtctatctgagggagtacaaatatctgcaactgatgcagaaactgctggatgcaacaagtactctatttacttaagctatctctagtagacaatcacagagactcttgattagggagacggttatgggaaagcccaactggagggtgcttaaacgtgttttgcagcatacaactgtggctgcaactgtctatcaagctacacct

SEQ ID NO: 26798 - DNA, 308 bp, Glycine max
  Clone ID: PAT_MRT3847_124199C.1
accagggaacctacccttttttaattcaacctggattaaaggtttcttccgattcattatgccttcccattcttttcttttaaatgggcccactttccactgacttaaaattaaaaaaccttggaaagaacctccacttccaattttttgggctttcaacaaccaccccaacttccgatttttggaagaaaaaacctccattaaggccttggaaattttggtcctcaacctgaaaaaagacctttggtgggcttcttccaattttcctaataagaattaccattacctcttggttggacaaacctgga

SEQ ID NO: 26799 - DNA, 304 bp, Glycine max
  Clone ID: PAT_MRT3847_12419C.1
ctatatgacgacagtttgttccattaccatcttaactatgccgggcacagcactactgttgaagaagacactaccttccttattatgataagccacctctcacagaacacaacaccgtgtcatccaaaagctcttcttgcgcctccctacacacaagccttatgcaacaggctccctctctaccatgagatcggactcctagaatggttgacctggcttaaggatactatcccgagtcagggttcgataatgcatctgccattgccggctgatattacaaccatatttaactcatggtccacta

SEQ ID NO: 26800 - DNA, 1588 bp, Glycine max
  Clone ID: PAT_MRT3847_1241C.1
ccacccgtccgctctctctcactcaatggcttggcactcgttcctcttattagcgacggccattctcgccgttgtgtgctccgccgtgagcggttgctcgccatcggatagggcggcgctgctggccttccggaaggcgctgagcgagccctaccttggcctcttcaactcgtggacgggctccaactgctgcctcgactggtacggcatcagctgcgacgccaccaccggccgcgtcaccgacatcaacctccgcggggagtccgaagaccccatcttcgagaaagccggtcgctccggctacatgaccggaaaactctcagaggcgatctgcggcatcgacaccctcaccaccctcgtcgtcgctgattggaaagacattgccggggagatccccacctgcgtcaccgcgcttccctccctccgcatcctcgacctcatagggaacaagctctccggcgagatcccggccgacgtggggaaactctcacgtctaaccgtcctgaacctggccgacaacgccctaagcggcaaaattccagcgtccatcacccagctgggctcactcaaacacctggacctcagcaataatcagctctgcggcgagattccggaagacttcgggaatctgggcatgctgagccgcatgttgctgagccggaaccagctaaccggtaaaataccagtttctgtctccaagatttaccggcttgcggacttagacttatccgcaaaccggttatccggttctgtcccgttcgaactcgggacaatgccggttctatccacactgaatttggatagtaactctttagagggcttaattccttcgagtttgttgagtaatgggggtatgggcattttgaaccttagtcgaaacgggtttgaaggctccatacccgatgtgttcgggtcacactcgtatttcatggctttggatttgtctttcaataatttaaagggtcgggtaccctcttcgttggcttcggctaagtttatcgggcatttggatcttagccataaccatttgtgtggatccattcctctcggagcacccttcgatcacctcgaagcgtcgtcgtttactagcaatgattgcttgtgtgggaaccccttgaagacttgctagttatagtgggtgacccgggatccgaatacgtacccggatagatacccgatttgtttacaaggtgtggtgtaataattttattttattttgttgttaagtggtgtaagtgtaatataacgttttagtgagaaagttgaaagagagaaaggaaaagaagtgagggcataggcatctgcgtgcacgtgcacgacaagacaagggtttcaaggaaggaattcatgtttgtgtgggaggtcaagcttatttgaaaattattcctgtgctgcatgtgagcttccttgttttactagtataatgtaaaagaagatatatggataatgatttcattactgttcttcctttactaattttaagggttttattttttattttttgtgaatgttaagggtttgatttatatatatagtcacatgcaaaagttacatggtccccttatttagattattcaaaaaaaaaaaa

SEQ ID NO: 26801 - DNA, 340 bp, Glycine max
  Clone ID: PAT_MRT3847_124200C.1
gcggcaagcttgatagaccgggatcacaggacgccgccccttagaaacggacacaaaatggccaatatgactagctgtgaagagtctactcaatttcttcctacttattatggtacgattgctggagggaaagccaatcactctctgagctggacagagactacgagaatcattctctgtggcactgttaaaatatttgctggacactggactcaccgatataggacttggtgtcaaaggaaaactacttgtgaaaatgattcagggagagtggaaagtgcaagcccaagctggtgaaagctcagattagtactaccactctcctatatgggataggaat

SEQ ID NO: 26802 - DNA, 711 bp, Glycine max
  Clone ID: PAT_MRT3847_124201C.1
gtttggttcttgtagaaacagtgctggttcaaattcaaacaatcttggtggatacacacactagtttctcctccctcagaatgagtttagactcgtctcgctctggtaattctaaacgaagtttctctaattctatatcctccaacgattacattaagaagaagaaaaagaagaagacaacccccaaccagaaaaccctaggcgctgcttggggctcaaagtctaattcccgaaaacccgccttctccgattttgccagttatatgacagagaagaatcggaaattacacaaccagtttgaagctcaggcttccacctcatctttgactttaagtgcctctctattcagtggagtttcaatttttgtcgatggtttcacgattccttccaaccaggaactgcggagctacatgctaaagtatggcggaagatttgagaattatttctctagacatcgtgtaacacatatcatctgcagtaatctgcctgatagtaaagttaagaacctcagagccttcagtgcagggttgccagtggtgaaacccacttggattttagattctgttgctgctaatagactcttgagctgggtgccttatcaacttgaccagcttgctaataaccaaccaaaactgtcagccttcttcacattgaaaagtagtaaaatgtcagaggatgcttatacaaatgacctttgtcaagtagtatcag

SEQ ID NO: 26803 - DNA, 128 bp, Glycine max
  unsure (1)..(128): unsure at all n locations
  Clone ID: PAT_MRT3847_124202C.1
cttaanattngtagttcgaactanactagacataggtngtnggcnatagtagctttggagcacacctcttcgacagtcagcnggtaatatgtgcattgcnnacnatgaanctncnggcancaanttca

SEQ ID NO: 26804 - DNA, 362 bp, Glycine max
  Clone ID: PAT_MRT3847_124203C.1
ggagaaaaaaaaaacaataattgggctcctgttttggaattggaaaattttaaattttaatggggctgcctcctgctaaaaaggccatcttttgataaaaacttttcccacacaatacccaattttttaaggcctttttataaagagctttttaccaacccccggggtttttttttttccctagatttatataggggaaaaaaaaaagaccccgacctttaaaatccccgggttacttggggggcaataatattttaagtttcctactggcccctaagctgggcccatgcaatcgggggcgggatatgtttatatggatggtttgggcttcctcaccctgggttccccttgtttatttgggg

SEQ ID NO: 26805 - DNA, 1068 bp, Glycine max
  Clone ID: PAT_MRT3847_124204C.1
cgcgaacgaaaattctggagtgccaatgagaagaggaatagaaacttgggcaacaggaaaaagattcgtcaacttgagaatattagaagatcgaaagagagagagagaaaaagttatagagagaaggttcaatggtgttgtgggagataacgctcggaactgcgtatttcttgggtctgaagcgaacttacaggctcgctctcaggattcaacgcaggatcgtaagccctaagtaccctaagctcctccaatttcttcacagacggacccgtgctgtgtttgatgtagctatcagagtgcatcgtaacattcaagttagggacatagaagtgggacggaattttgggaactttatattgcgatggctggatcgaatgaagccatcggctcagattcgcggtcccccaccttctaatggtattacatcaagagaaagtgttggaaaacgtttatcagcaggtagaagttccaatcagaagggttctggaacgtcaaggagggactctgataggcatttgtttacctcatcaaggataatgcattttcctacagtagcgaggatgatgcgaccgccgaatcctgctgggattaccatccatggcaggcacttcagtacctctacgcctcaaactgttggatcaatttacagggtaaattggtcagagggtgttattaggaaggatattatgcagtggttgaggcataactaatcctctctctgctggcagatgttggaaattgatggtgatagagtaagcaaatctgtcgtatctgtttttgtctctttggattttgtatagttcgtcaagcttccttttggataaccagcggttatgcaattgctttcagtcttggtttaaagaactagttgttaatatcaaggataatctttctgttgaatgaataatgacagtagagtttttgcattgctctattttatagttctcagcaagtttggtttatgcaacttgcagcttgattttttccatacttccactggattgaccataccatgtttattcatacatgtatgccataatatgttctaattatatacgatattgtgat

SEQ ID NO: 26806 - DNA, 180 bp, Glycine max
  Clone ID: PAT_MRT3847_124205C.1
acgatgatactaatggctccctcttccacctgcattacttgccttttacttaccaccctgttgggtgcttttcaaagtaggggaagatactgcccaatcttaatccatgaaatccatacatactaacccactgacaaagaaacacatcttactaacatagacataccattaatgaacata

SEQ ID NO: 26807 - DNA, 273 bp, Glycine max
  unsure (1)..(273): unsure at all n locations
  Clone ID: PAT_MRT3847_124206C.1
taacaaccccgggggccagccaccgagngcggggcaaccaacggaaaataacggcagagacacgacacgncgnnctcaccagaaggagaacccacgcaaacgcaggcgacgaatgcggagaaaccacagcgaccagccatacaatccgcgcgaactgagcaacaaagcacaccaacacagaaccgagcccaccagaatcacacaccagaagcagcatcacagcacagaacaaatgaagacgcttccggccaaaaagacaaagatggaccgaag

SEQ ID NO: 26808 - DNA, 645 bp, Glycine max
  Clone ID: PAT_MRT3847_124207C.1
gattactaattgtgtattgaaagcggtaagaggttccacgacaccaaataaaccagttctgagatttccccaagataaatttaacagctccagcttcttcagtgtttatcaaaatacaaaagaaaaaagtggaggtcgtctttcgatggcaaatcggacccttgcaggctgagggaggaagctacttcacacatggagatgggggtgctccaggatgtgggtctgtaatggaccgaccctcccaccttgcacgcactcctgctggtgagacccaggcctcctgccagcgcgtccaagtgggcccaagagtaggctgggtatgcaggctgccattgggccttgcacacaccaagtacaagccaggccctgcaccccacaatggctcccagcctaccctaggtaaccgtgtgagcacaagtacaagcacaatgctatggaatgcaggtgacccaaagacaggcgagtcacgggggctctactgtgaccatgcagcggatggtggtttgttcatcaccttctctcctgttcccacagcgaaacaggtgatctgataactagcattcaggccattaactgcaaaacctacactaggcatagtctccgttctgtgtgttcaagtgttcttgtcctgtattttaactattt

SEQ ID NO: 26809 - DNA, 165 bp, Glycine max
  Clone ID: PAT_MRT3847_124208C.1
cactcttatccttttgcaggagcttcaaagttaaagtgcgccttggggttgtttgggtagctggaatctccattacgtggatgaatcttctctgtgggggcacggaacagcaaaacaactaggaggaatatttggcaatgagttaattttattcatgtatacatt

SEQ ID NO: 26810 - DNA, 379 bp, Glycine max
  Clone ID: PAT_MRT3847_124209C.1
ccattcaaataaaatttcaatttactatgcaatacatgaatatttgtttcaaataataataataatatcgtggagggagggttttctttccctttaaatctttaaacccttttaaaactagggggaaaaaaatccctgatcccagggtatcatttttaagcctcaagcaggcggggcagcacccccagctagagtcaatgttgaaacccgagggaagcttgggttacaacctttaatacagggggggtattggttcccttcccatccttgggttccccattgctaaggctctgattctgccaaaaaacccttcatccctaccattaatatgacccccgtcaacatggttagaacttctggggaccagctaaaataaaat

SEQ ID NO: 26811 - DNA, 286 bp, Glycine max
  Clone ID: PAT_MRT3847_12420C.1
gagggttacacgccgtcgtcgctgtttttgtgtgtcgcttcttcgtaggtgcagcttcaatggtgaaaggacccccaaggaaacctgtccaaactttacttaaggggtccattccttgattccaaaaggtccaagtcaaaccagtttccaaatccatccctgatccaaattgagggtgtgattgccaaaaaaaaagtaccttgtgttgctgccaaaaaattggcctatatctacaaggctaaggtgaaaaaaattggaagccattaccgttgcttttggggcaagg

SEQ ID NO: 26812 - DNA, 344 bp, Glycine max
  Clone ID: PAT_MRT3847_124210C.1
gcggttttacgcgcgcgcacatatggacaagaggatgcgcaccgcactcgggaaagggcagaagatcgatcttattactagagtctaccgttgagcacgtggactttactgggccttgccacagtgaggggcggaaaaggatatgaaataactgagttgtaacgccactaatgctatgctgaggcgacttcatgagaactgtaagagggataaatatcaggtggaagagggtcccctatgcattggggaactagtatgtgctattctatacacttcaataaagggcgttactagtgagcagtgcgtgtgtttcatgtacctaagcggatacaccacctctattc

SEQ ID NO: 26813 - DNA, 910 bp, Glycine max
  Clone ID: PAT_MRT3847_124211C.1
ccggaatacccttctcgcctgagtttccctaaattcctttgttcagagacaaagaacaacaacaacaactgtaaccatgcttgtctaccaagatcttcttacaggtgacgagcttctctctgactcattcccgtacaaggaaactgagaatggaatgctgtgggaagtggaaggaaagtgggttgttcaaggagcagtcaatgtagatattggtgctaacccttctgcagaaggtggggatgaggacgagggagttgatgatcaagctgtcaaagtagttgatattgttgacacttttaggcttcaggaacaaccaccctttgataagaaacaatttattacttatatgaagagatatattaagttgctgacggccaaattagagggtgagcagcaagagttgttcaagaagcacatcgagggagcaactaagtccctcctatcaaagctcaaagacctccaattttttgtgggggagagtatgcacgatgatggaagccttgtctttgcttactacaaggaaggtgctactgatccaacttttatctactttgcctatggattgaaggaaatcaagtgctgagcacatgcaatgcatgccccttagttatcttttatctgagttgaaaaattgtctttaattttagttcttgtgttttgggttttggttatgttattaggactttaggaggttgtttcaagagtttaatttgtatgcgtttttatgttggttggggtgagaggaacatgttatcgtataatagtaatttaaaagagtatcatgtgttttagttatggctctgtgttctatctgccaatataattatgctctgggtgatgttcaaatcattaagatattttctcattgtccattccccgacataaagaaaaaaaaaaaaaataaagagag

SEQ ID NO: 26814 - DNA, 320 bp, Glycine max
  Clone ID: PAT_MRT3847_124212C.1
ctacgaccaaaactacttgggcatcacacccataatggccgcacagaatacaaatggtggcagacacggcaacaactatgagaccgaagacagctccatggccgatgactagaacgtcgaaatgcactcgaacacccgctctttctattatatgggacaccggcactgaatgaaggtggggcaactgtaaaggctgatacaactcctgtatggcgaccgcgaccagcaaagttgaccggttataactgagggatgaccggcctgacaacataacgaagatggtggaactggtgtcttcgcattccaagaatgagcaggag

SEQ ID NO: 26815 - DNA, 273 bp, Glycine max
  Clone ID: PAT_MRT3847_124213C.1
tctggatatggttgagaaactcccacagcagggtgtgtatttgttcaaaggtagttacaggattgttctgaactccttgacccaaaaatgtgagttgaaaagggcaaaggaattgttggggctaatgctaaggagggggtttcagccccactatgctacctcaaatgaattgttggtttgtctttgtaaggcagggatggttgatgatgctgctgtggcactgtttgacttggtggagatggggttccagccaggacttgagacttgggaagt

SEQ ID NO: 26816 - DNA, 231 bp, Glycine max
  Clone ID: PAT_MRT3847_124214C.1
gctctgtatttttattgttttttgttttttttgttttgggtgttaaataattgtttgggggtttttattatcttttaatattaaagggggggtacacgaatattggatcaaagtcaaacaagaccgccgccgagaggggttcaaggagtggtgaccacgaggataagcagcattcggggaatgatgagggcgacggtgaaggcaaaggggacgctaaataatggggggggg

SEQ ID NO: 26817 - DNA, 379 bp, Glycine max
  Clone ID: PAT_MRT3847_124215C.1
acggctgcgagaagacgacagaagggtttctattagaatcaccaaattcttttgatgaactaaaccaccctcaaagaaaccattttttcttgacactcaacaattatttgatcaattattcatgactaagattaaacatgatccttttaaaactacatcaggctcatatgagaattatgaacaatttgaagcttaagatgagagtctagatcaatctgaattagaaaactctagtgtattctgaatcagaaatttcaaatcctagttcaagatccgaacaaaatcattttgaggtaaatgaagagataactgggtatgaatatagttaacatgcctaatgaaggaaaatcttctagatctaaaggttactatgatagcg

SEQ ID NO: 26818 - DNA, 407 bp, Glycine max
  Clone ID: PAT_MRT3847_124216C.1
ctgctgtgttcactcccactctcaaccttgccatttcatccagcacatactgttgtagaagaagaacatcatctaccacaagaagagttgttacagtgagagctagctccacagagaaggatgaatccaaggacaaagatgcttcagcattcaacccttttgggtttgtcactgacaacccttctagccgaaatgccattcaactgcctgaaaaccctgctgaggatggcaacgttggccaaatgctatatggtcagcaaatggcagaagaggaacaattgtcttccttcatggggccccaacgcaatcttttagctaccgagttgttatgtctcagttgtcggatgccgggttccactgctttgcaccagactggataggatttggtttcagtgacaaaccacaac

SEQ ID NO: 26819 - DNA, 583 bp, Glycine max
  Clone ID: PAT_MRT3847_124217C.1
aaaaaaaaaaaattttaaaaatttaaaaaaaaaaaaaaaaaaaaaaaaaaaaaaaaaaaaaaaaaaaaaaaaaaaaaaaaaaaaaaaaaaaaaatattaaaaaaatgggagaaaatttattattatttagtgttttgctacattgtggttcgactggttcataattttttaatgtggtaacttaaataaacttttgttgtctcccattttattagcctttaaagttgataaaacttttgttgtttctggagttaaaacggatttaggcttaaatctcattttttcttattaaaattttattcataaataaatggtagaatggttcgcctttttaaaattttgcaataaattttattgggaatttggtacttacccttttaattgacctttaaactgggagggtgggtagtgcccgcccattttgatttttaaatttgttagtccccaagtccccagtctttcccttttttgcttttattttttggaatggttttagggtttttaccttaaagcttttataatcgggggaatccattaaaggtttccattgtatgatttttagaggtacttggcccctcaaaaa

SEQ ID NO: 26820 - DNA, 456 bp, Glycine max
  Clone ID: PAT_MRT3847_124218C.1
ggaacgggacctttggctttattaacttcgacaagaagatcatttgattacgtcccattaacggttatccgaagaactcttggctttaaacgatacactcttaactccgtactaggaccgccccttgcacaccacttgctaaggaactttggcatccattcgcagaaaactcggggtctctttaaaacttgttcttgctaacccataatacaaccctattggactgtgttcaagcttcccattcaaatccgccgcgataatgaccgggcataatctccccttcaacaacatccttgcttgatcctttgggccagggattcaccatggccatcctggtatctaatccctttctatggtggaggactctatctgacggggtgtgacccttcccttgatgcaacccacccatgtgcctgccggaatagaaagattcttggactcctccctcatgggagc

SEQ ID NO: 26821 - DNA, 1611 bp, Glycine max
  Clone ID: PAT_MRT3847_124219C.1
ccctgaaccgttgaagctcttcttttgccttgcaacaatttcaagtaacctctgccactgatcacaaacccagtaatggttttttctgctgtgttcactcccactctcaaccttgccatttcatccagcacatactgttgtagaagaagaacatcatctaccacaagaagagttgttacagtgagagctagctccacagagaaggatgaatccaaggacaaagatgcttcagcattcaacccttttgggtttgtcactgacaacccttctagccgaaatgccattcaactgcctgaaaaccctgctgaggatggcaacgttggccaaatgctatataggatagaagacaagggcaaggaatatgggtcatatgttaaatctggcaagttaagatggtttgtgagagaaactgggtcagcaaatggcagaagaggaacaattgtcttccttcatggggccccagcgcaatcttttagctaccgagttgttatgatctcagttgacggatgccgggttccactgctttgcaccagactggataggatttggtttcagtgacaaaccacaaccaggatatggttttaattacacagaaaaggagttccatgatgcattggataagctgcttgaggtgctgggggtcaaatctccttttttcctagttgttcagggatttcttgtaggctcatatggactaacttgggccctgaagaactcaagcaagatatcaaagctggctatactaaacagtccactaacagattcatctcccattcctggactttttcagaagctaagaattcctctatatggtgaatttacaagccagaatgctattattgctgagcggtttattgaaggaggtagcccttacgttctgaaaaatgaaaaggctgacgtgtaccggctaccttatttggcaagcagtggacctggatttgctctacttgaagctgcaagaaaagctaacttcaaaggtactttcagtgaaatatcagcaggatttacaactgagagatgggataaaccaatactacttgcttggggattatcagacaagtacttgccccagtctgtggcagagcagtttcagaaaggaaatccagcacaaatccagcttaaattgatagaaggagctggtcatatgccacaagaggactggcctgagaaagttgttgatgctttcagaatgttcttctgatttcaacaactaattgaccctgcaggcatccaagtgctttatttcattggaagggcattcttgagtttttccttaattaaattgtaaatttagtatgccttaatttttcttttcttttaatgatggtcaacaaataaaattatagctttcttgaaatgaatttgtcctccctttcctaatacttgaaattaagttgtcctccatttccaaatggaaaattaaataagccgttagagaactttagtagaaataaccactaatgttgtcttttattcctttaaaaaaataaaaaaaaatgtagagacaaacacaaggttttgaaaaaaaaaaaaaaagggcgcgcgccgagttctgatgcgcgtggagccggggaaaaattcggggctgtatacgcacgaactactttgcat

SEQ ID NO: 26822 - DNA, 102 bp, Glycine max
  Clone ID: PAT_MRT3847_12421C.1
agtccaggcgtcagtaaggaagcaaagggaacacacacagagacacctcaagacctgctgcgccactctctaagttgaaacatcgcacatcatctggaatca

SEQ ID NO: 26823 - DNA, 331 bp, Glycine max
  Clone ID: PAT_MRT3847_124220C.1
cccctcaccttaaaaattttggttaaagggctgttcaattttttctttatttaaaaaccgtttccctggcttttttataagacaaactccttaaaaaattaagctccgggtatttacagaaaaaaaaaagacatttgccccttttggccattatgattaaattttttttttattaaaggggggggcccttctttgaggtggcatgggcccaaaaaaatggtccacctttatgaatgggagcctttattgggcgtgcgtcggaaattatttataaatacggccctcttgaagctctgcaagagaaggttattctcccaactgggagcaaaac

SEQ ID NO: 26824 - DNA, 854 bp, Glycine max
  unsure (1)..(854): unsure at all n locations
  Clone ID: PAT_MRT3847_124221C.1
nnnnnnnnnnnnnnnnnnnnnnnnnnnnnnnnnnnnnnnnnnnnnnnnnnnnnnnnnnnnnnnnnnnnnnnnnnnnnnnntcaacttacggcctcctctcacaatgttcccccccaggacaacctcttcgcagtttccgaaaaaaagtgctaggatgctgatagtgccagtgatgatgagagtgatgcccaaagaagatgatgatgaagaaccccatcctaagaataagaaggcagatctaggaaagaagagacccaatgaatctgcatcaaaaactccagtttcctccaagaaagctaagaatgccactcctgaaaagactgatggtaagaaaggtggacatacagcaactcctcaccctgcgaagaaaggtggaaagactcccagcagtgaagccaaagccaagactcccaacaatgaagccaagactcccatgtctggtggactctcttgcaaaagctgcagcaagtctttcaactctgaaagtggtctgcaacaacataacaaggcaaagcatggtggtcagtgatatttttgcagttggttaaccaggtctttcatgtattatttttggcttatgtaatagagtgagtatcctaaggacgttaggcatctgtccttgtttttggcctagtaaaccgtggtggtgtcaaggtgaatgcatgtttcggaagttttgtttgatattttattgggaacttcaattattatctaagattattgcggttagatcttttgctgcttatctttgtttatattaaatttatgctggtgaggatatatgggttctataaaggtgccttcccttctcgagcttggtaaagaaaaacattggcttgccctacattgagtat

SEQ ID NO: 26825 - DNA, 1340 bp, Glycine max
  Clone ID: PAT_MRT3847_124222C.1
tacggctgcgagaagacgacagaagggggacccaaaatacaaaccttcatttttctcattcacggctataaataatctcaaaaacccttccaaaccctcacttcgccttccgcttccggcgccatatcgcgtatctttctctgttctattcctacgatggagttttggggtgccgaggttaaggttggtgagtctgttaaggtagatccagccgaattcgaggcatgcatacacctttctcaggctgctcttggtgaggcaaagaaagacaaatcaaatgaaccagttgttctctacttgaaagttggtcaacagaaatttgtcttgggaaccctttccagggagaaaattcctcaaatacctctggaattggttttggaaaaggagtttgagctttcccacaactcaaagaatgccagtgttcatttctgtggatacaaggcattttatgatgctggcgatgatagcgaggaggatgaatttactgatagcgaagaggatgttccattgcttaaagcagagaatggaaaacctgaaacaaaagctgaagagttgaaggtacctgaatctaaaaaagctgttgccaaggctagtgcatcagcaaaacaagtcaagattgttgaaccgaaaaaagataatgaggaggactctgatgatgattctgatgaagtgatgattttggatcttctgatgaagagatggaggatgctgatagtgacagtgatgatgagagtgatgataaagaagatgatgatgaagaaacccatcctaagaataagaaggcagatctaggaaagaagagacccaatgaatctgcatcaaaaactccagtttcctccaagaaagccaaaaatgctactcctgaaaagactgatggtaagaaaggtggacatacagcaactcctcaccctgcaaagaaaggcggaaagactcccaacagcgaagccaaagccaagactcccaacagtgaagccaaagccaagactcctaagtctggtggactctcttgcaaaacctgcagcaagtctttcaccaatgaaagtggtctgcaacaacataacaaggcaaagcatggtggtcagtgatatttttgctgttggttatgactcattcatgtattatttttggcttatgtaatagagtgagtttcctaaggacgttaggcatctgtccttgtttttcggcccagtaaaccgtggtattgtggtagtgttgaaggtgaatgcatgtttgataagtttttgtttgaaattttaatgggaacttcaattattgtctataattattgcgtttagatttgctgctaaaaaaaaaaaccataaaaactaactctataaggg

SEQ ID NO: 26826 - DNA, 1458 bp, Glycine max
  Clone ID: PAT_MRT3847_124223C.1
tattaatttcttataaagatgcgagaagacgacagaagggggacccaaaatacaaaccttcatttttctcattcacggctataaataatctcaaaaacccttccaaaccctcacttcgccttccgcttccggcgccatatcgcgtatctttctctgttctattcctacgatggagttttggggtgccgaggttaaggttggtgagtctgttaaggtagatccagccgaattcgaggcatgcatacacctttctcaggctgctcttggtgaggcaaagaaagacaaatcaaatgaaccagttgttctctacttgaaagttggtcaacagaaatttgtcttgggaaccctttccagggagaaaattcctcaaatacctctggaattggttttggaaaaggagtttgagctttcccacaactcaaagaatgccagtgttcatttctgtggatacaaggcattttatgatgctggcgatgaatatccttgtcaattacttattgttgttaaaactaatattttaatgtcccatgtttatttggagctatatacaaatgaattattgcaaactgaaatctgttagattactagcttaatatttgtcattgctttttttttcatttttttcccttgacttctgttgtgtttctgctggcactagcgaggaggatgaatttactgatagcgaagaagatgttccattgcttaaagcagagaatggaaaacctgaaacaaaagctgaagagttgaaggtacctgaatctaaaaagctgttgccaaggctagtgcatcagcaaaacaagtcaagattgttgaaccgaaaaaaagataacgaagaggactctgatgatgattctgatgatgatgattttggatcttctgatgaaaagatggaggatgctgatagtgacagtgatgatgagagtggtgatgaagatgatgatgaagagacccctcccaagaaggtggatctgggaaagaagagacccaatgagtctgcatcaaaaactccagtttcttccaagaaagccaaaaatgctactcctgaaaagactgatggtaagaaaggtggacatacagcaactcctcaccctgcaaagaaaggcggaaagactcccaacagcgaagccaaagccaagactcccaacagtgaagccaaagccaagactcctaagtctggtggactctcttgcaaaacctgcagcaagtctttcaccaatgaaagtggtctgcaacaacataacaaggcaaagcatggtggtcagtgatatttttgctgttggttatgactcattcatgtattatttttggcttatgtaatagagtgagtttcctaaggacgttaggcatctgtccttgtttttcggcccagtaaaccgtggtattgtggtagtgttgaaggtgaatgcatgtttgataagtttttgtttgaaattttaatgggaacttcaattattgtct

SEQ ID NO: 26827 - DNA, 1655 bp, Glycine max
  Clone ID: PAT_MRT3847_124224C.1
cccacgcgtccgcccacgcgtccgcaactactttgtcttctgcttgtcatttggtgcccttattgcagtcacatttgtggtgtgggttgaagacaacaaagggtgggaatggggctttggaatctctactataaccatatttgtatctatcccagtgttcttggcaggctcaactacttataggagcaagatcccttctagaagtccacttacaaccattttgaaggtactagttgctgcttcacttaacagctgcttcaacagtagaaattctagcagtgcagtggtgaacatgacttcaagcccttccaatctaaactcaggcagaaaacaagtagggaaagaagcttccaatattgcaaacaaggaaccagaagccccaataacaaacacactcaaattcctcaataaagcagttgagaacaaccctatctattcatcaataaaatgcacagtggagcaagtagaagatgtgaagatagtgctgaaagtgctccccatattcgcatgcaccatcatgctgaactgtttactggtccagctcctttgtttctcagtcgagcaagtggtcactagggacaccaaacttggtaccctaaaggtgccaccagcctctttgccaatcttcccagtgctcttcatcatggtcctggcaccaatctacgaccacatcatcaccccatttgcaagaagagttaccaagacagaaatgagaatcacacacctccaaaggattggaattggactagtcctctctgtagtagcgatggcagtggcggcggttgttgaagtgaaaagaaaacgtgtggcaataatggcaacacactcaaatagccttctagatgatgcaaccaagccactccccatcacattcttttggattgcttttcagtacttgttccttggttctgctgatcttttcaccctagcggggttattggagtttttcttcacagaagcaccttctagcatgaggtctttggccacatcactctcttgggcctctttggctgtagggtattaccttagttcagcaattgtgtcaattgtaaatagtgtcactggcaacacctcacatagaccatggctctctgggacaaaccttaaccactaccacctagagaggttttactggctcatgtgtgtgctgagtgcgttgaatttcttgcattacttgttttgggctatcagatacaagtatagagggacaggaactacaaacaactgaaaatgaagaaaaattaccaaaagggaagttttcaaaatggtatatagataaggccttatgtttaattacaaaggccattaatcaaaatatatattttcgagccataatattatgcttcggtggttgtaaactttgtattcttgccctagctagctagcatacaacggagtggatcagcgcgccatttattcctagcaattgaaatataatagagctaagaagagagaatcttttttttagaaaagaaagaaaaagagtcatgatcagaaaaatgaagaggctccctcgcgtgtgtaatgatcaaatgcgctttcattaaaagtaggtttaggtgagagcaaattattttcccatgcagatgcccttaagctccccttgcttacttatttagtgggataataaatggttttgctcaaaattgccgtgg

SEQ ID NO: 26828 - DNA, 343 bp, Glycine max
  unsure (1)..(343): unsure at all n locations
  Clone ID: PAT_MRT3847_124225C.1
gggggggnaaaaaaaccgggaccttcaggaaggatagttatgttgagtacatattagcatcaagagcggaacattggcggtgaggacaacagacaatatcactggcaagtagtcttatgtcaagtaacgggtaacaattacagatattgatctagatgtacacctgtcagaattctggaaatcacaatggttgtttttcataaatgatacagctatgagggggagcgactgaagattttttttcatgtgacatgggaaaaaatagacgtatagaaataccaaattcattgagatattcctgaacaaatgatacttcgcgaatcactatagactcataaaattc

SEQ ID NO: 26829 - DNA, 475 bp, Glycine max
  Clone ID: PAT_MRT3847_124226C.1
aaaccggacacttgggacaacgggggggtcgaccgaaaaaatgaggaccgctaccggaaggccaacaatgtttacaaagggggggcaaagaaaagcgcggcccaaccatggaaaaagatactaaccggggaaaaaccgagatccgaaaaaaaaaccaaacaacttaatgaccgaaaccaaaaataccaaaggccggggagcctaaggagggaaggaaccaacatgaattgcgggagcccgtaccggcacgctaacaaggggaaaaaactgtgaggccagctgaaaaaaggaaaagaccaacccccgggaagaggctgttaaaaaatggccccccagggcgattcttcataacataagggcggcgggcaaaaggtgataacccttgaccgcctggccaaaaaagaaacccaaaaagagggccacgctgttacggcccagttggcaaaaagcaaacctgatgggccaaaacggagaa

SEQ ID NO: 26830 - DNA, 554 bp, Glycine max
  Clone ID: PAT_MRT3847_124227C.1
cccacgcgtccgtacggctgcgagaagacgacagaagggaggaaaaagggttgagtagtagtgttgaggacaaggtgagttgtgttggggacaaggtggttgttgtggaaaaagtgagtagtgttgaggataaacaagtggtttcgaaaacgattgagcaagggaaaagggtggtggaacctgtggaggaagaaaaaactgtcacaatcactaggagtgtgaagttggtgtttggtgaggatataaggtgggcagagttacccgtgaattgtagtgtgaagctggtgagggatatagctagggatcggtatccaggtttgaagggtgctcttgtcaagtataaggataaagagggtgatttggttacaatcactgctactgatgaactgcggctagctgaaaaatctgctcctgagaaggcatcgtttaggcttcatattaccgaggtcagtccagatcaagaaccttcttatgatggaaatggaacaaccaatggggatgaagtgcgaaggggcgatggaaaaccgagtgatggtgctgagaatggagatatg

SEQ ID NO: 26831 - DNA, 1075 bp, Glycine max
  Clone ID: PAT_MRT3847_124228C.1
tcgacccacgcgtccgcagaagaactccgacgctaacaaaatccgttttcgccgccgtaaccgcttctaggacctctcgctctcgctcccattccgcgcgacgactcttccccgccatccctcgcgcttcggagaattccctttctcggtctcagattatcgaccccaccaatgtcgcctccgccaagttcctctctcgctctttcactcgcaccttccacgccactaatccctccctccgctccgccgcaagctctcaggtggcgcagacggacttcacagatatggcatgggaggggattgttggtgctgttgatgcggcgcgagttagtaaacaacaaattgtggagtctgagcacttaatgaaagctcttttggagcaaaaggatggcttggctagaaggatatttaccaaggcaggattggacaacacgtccgttctacaggctactgaagattttatagctaagcaacctaaggttacgggtgacactagtggtcctgtagtgggctcgcattttagctccctcttggacaattctcgaaagtacaagaaagaaatgggggatgagtatgtgtctgtggaacaccttttgctagcatttcattctgataagagatttggacaacagttgtttaagaatcttcagcttagtgagaaagctttgaaggatgctgtacaagctgttcggggaagtcaaagagtgaccgatcaaaatccagaggggaaatatgaagcattggacaagtatggaaatgatctgactgaacttgctaggcgtggcaagcttgatcccgtcataggtcgagatgatgaaattcggcgctgtatccagatattatcaaggagaacaaaaaacaatcctgttattattggtgaacctggtgtggggaaaactgcaattgctgaaggattagctcaacgtatagtgcgtggtgatgttccagagccattgatgaatcgaaagtatcgtggagattttgaagaaaggttgaaagctgtcctgaaggaagttacagcatcaaatgggcaaataattttgtttattgatgaaattcataccgttgtaggtgc

SEQ ID NO: 26832 - DNA, 178 bp, Glycine max
  Clone ID: PAT_MRT3847_124229C.1
gaatagtgttttgaaattgacctgggtaaccaaactgtgtttataggagtataagtgcagcacgtaacacaatgcctaaggacaaagcggaaatgggggcgcttccactatactcgccagggacagagaacgctctcgcaactaatgtttatgtcttacggaataaattgaatgatga

SEQ ID NO: 26833 - DNA, 1707 bp, Glycine max
  Clone ID: PAT_MRT3847_12422C.1
attcggctcgagctcgagccggaaagatttcttcattcaaggatcaagaaactgtttaaacagaatattcaagtttctatgacaaattagaaacaatttgtgtacaaaaatgttaatttgtacatgtggctggggtttgctggtgggcacggcacacagaacacacaagtcttcctcgccgccaatttcttctcctgtcatctaagatctctccgcacaaacacttcgaacgacaccgttttaggcttcgtcggattccgatcttccttttttcttcctcaagtcatggccacactcaagagcgtctgcttcagaggatccacctttcccgtttgcccctccaatttcacgaacactagaaacaccaggagctcatgttggaggcctacacaagcagctgtgaagtccaatttccatctcccaatgcgcagttttgagttaaaaaataggacttctccagaggacataaaggctctgagattgataactgccattaaaactccatacctacctgatggtcgttttgatcttgaagcatatgatgacttggtgaatatgcagattggacaaggggctgaaggtgttattgttggtgggacaactggtgaaggccaattaatgagctgggaagagcacataatgcttattgctcatacagtcaactgttttggtgggaaaattaaggttattggaaatactggaagcaactccaccagggaagcaattcatgccactgagcagggttttgctgttggaatgcatgctgcccttcacataaacccttactatggcaaaacctccttggatggtatggttgctcactttcaaagtgtgctttccatgggacccacaataatctacaatgtgcctgcacggaccggtcaagacattcctccgcatgtaattcaaaccttagctgaaagtgttaacctggctggtgtcaaggagtgtgtgggaaatgaccgaatcaaacagtatacagatgatggaattgttgtgtggagtgggaatgatgatcaatgtcatgatgctagatggggttatggggctaccggagtggtatctgttgcgagcaacctggttcccggtttaatgcgagaactcatgtttggcggtgtaaaccctactctaaattctaaactcttgcctctgattgactggcttttccacatgccaaaccccattggtttgaacactgctcttgctcaacttggggtcatcagacccgtttttaggctaccttttgtacctctccctgtggacaaaaggatagagtttgccaatttggtgaaggaaattggtcgagagcattttgttggaaataaagttgttgaggttcttgatgatgatgactttttcttggttagtcgttattaagctacattgtaagatcgttgtatcctttctaggggtttgccaaatttaaaatccagatgagagtctattgtagtgaactagttaatgatcatctagtttctttttactggctactttgtagttgcaaactggttcaaatttattctgaattttaagtgctctgcatattgtattttttcttttggtactatgatattggtggggagtatcaatcaattttatcaatgattaattttcactaaagaaaaaaaaaaaaaaaaaaaaaaaaaaaaaaaaaaaaaaaaaaaaaaaaaaaaaaaaaaaaaaaaaaaaaaaaaaaaaaaaaaaaaa

SEQ ID NO: 26834 - DNA, 2265 bp, Glycine max
  Clone ID: PAT_MRT3847_124230C.1
gaccgcctaccttaaaaataatgataaaaaaaatcgtaaataaagttcatacatcattactcaggcaatccattctatattccgagggactgcgaccaaattgtctcaactattatcatcaactgaattcaaaaatttgggggccaattcccgtgttgaacttactactccactatcttaattctaacttctgcaaggagtaaactgaggcattatcccaactagtccccacgtaaaaaagaaatacaaaatggattcaaaaacccaacaaggtctgaaataatattaccgtttatgttacataagagaacttgaaataaaaaaaaaaaaaaaattgggcaccatgctaccagacatgatataaaatcatcaaaacttaggccgctaaggaaccgagatccagaactatatacatgagcacgagtacttgtgtaaattgacttggagtgatccgaaagaccatccctgctcacatattaaacctcggcaagagctctcttcgagcttccactgctgttctattgatagccccattgactgcaagcacctttggatcaattccatgaccattttgaggacagttatagctgaagtgtccatgtccataacagagtaagcacttagcaaaccttcctccccctgcttgagacacatcgcattttccaagggaatgtccaatttccccacaaaagaagcaaacttcctcatccatggaaagacatttcagccgctggcattgttggaatctatgaccaggctgtcggcatgcccggcatctcaaggaactttcaccatgatgtttaaagggggatttagtcactctgagagtgtcagtaatctgaaccagggttttaccagctggctcaacattgcatctgcccatagaattttcagttgtggatccttcagttttttgaactggggtttctgcaattcgatcagcattgtgtttctcagattctaacccttcattttttgcactgttccttttcttcttcctctttttcttggtcatcggttcagggtctactggggttgctgggtctactggaggagtttggcttgctggaattgttgggtctattgagggttctgctataggatgtatagatctttgaactggggttccaggtggcttgtcatcatgttcatcaggttctgctcctttgcttataagggcacttctctttctcattttcttcctcatcttctgaccttgatctattgggggagctgggactgggattgttgggtctattgaggttgttactgtaggatatgcaaatttttgaactagggtttcaggtggcttgacaccgtgttcattggtttctgtcccttcaattatgatcacaatcctctttttcttcttcctctttttcttggtcatctgctgaccttggtctattggggtttctgtgtcaacagggggagatgggcccactgggtcgattgagggtgcatctgtatggtatatagatttctgaacaggggcctcaggcggagcagcttcaggcagcttgtagtgttcattgagttctgccgcttcactttcaagcttactcttccttttcttctttttctttgacatctcctgttcagggcctgttgagattgcaaggcaagggtccattggaattgctgggtctattggggatgcttctataaggcatgtagatgtctgaattgagatttctggcagctctgtagaagttgtcttcttcctttgcttcttctttatcttcttcatcgtcagttctaggtctattggggttgctggatccaccaggattgtttggtccatcaaggatgctggttgtaggcttattggggttgcttggtcttgttggacctggtctggggcctggttgagggttatgtccatatgcaatgggctcccttggttctccacctcttctgagcatattattattggttctttttctctcttgcttttttggtttcttcttctctgatcaattggagttgctggatcacccggaggctctgcacatggcgcagagcaaggttgaggttgagggggttgagcacgtgcatcagggttttggacaggttctacctcttttttcttttctgagtttgttggagctggcaggtctattggggatgctaatttaggtttagaacatgcctgatcctcaaccttagcttcagttggttctgcccttttgttcacttgtgaattattagggattgctatgtcagatgggagtgccaatttaggtttagggcacactgcagagt

SEQ ID NO: 26835 - DNA, 473 bp, Glycine max
  Clone ID: PAT_MRT3847_124231C.1
cccacgcgtccgccacattgaacttttgatccaatcctgtgaaatcactgctgatgcatattattcatttacctaccagggagaaccccactgtgtataacattattgggttaacaacgtccggacatgattctgaaacccatctcaaccttgacaatgaccactatcttgattatgcaatgcacaccgaaaccataattactaatctcaaatggtcaataacactcactatcgtattccatacagccactatctagacccagcacatacttctaccaaatactaaacccgtgagaaaggcctctatgcttgcctgtaagattcacacagccgacacctaccactgacaagattaagagtgcttgattgattcatctatattatacctccctgaccccactactgtggttataatggggggaggtgacggtccttctgctggagccactcttaagcacaggtcaatgcaccga

SEQ ID NO: 26836 - DNA, 185 bp, Glycine max
  Clone ID: PAT_MRT3847_124232C.1
gttccctgcgtcctgacgcaatcccgcttaagagtcgatctccgtcctcgtcgcagctcctacatagcactatttccattgcatctgtgtatgcacctctagcgatacatagacacatcgtagatgcacgcatagcaggataagataggaaccagctagcacattgcacatgtaatccggaatat

SEQ ID NO: 26837 - DNA, 635 bp, Glycine max
  Clone ID: PAT_MRT3847_124233C.1
ccgggaagacactcgccggaagccaaggtgcctaggccaacagccaaggcaacccttgccgatggccaaggtacaatgtctagagagggatgtttagaaaaggagacacataggaaaaaaggaaaaaagtgtgtgataatgaaagtcagaaaataggaataatattgtattgttgcaaccttcacagttcctttcttctgaatcgtcttttacttctcagcagcttcggctagggttcagaaacgaaaaagggttcggtgttctgttcgcgatgagagccaagtggaagaagaagcgtatgaggaggttgaagaggaagcgccgaaagatgagacagagatccaagtagtgcgttaaacctagtttgtttctgttgcttttacaattgcttatgttgtcgaatgggacacccagttgttagtggcactggtttctcctttttgatgtttgatacattttgttggattcaagtagtttatgttcgtcttatgttattagctcaaaacaatgttgttactgcttttgctaatcaacatgatctcctatttgcatctctgaaaaaaaaaaaaaaaaaaaaaaaaaaaaaaaaaaaaaaaaaaaaaaaaaaaaaaaaaaaaaaaaaaaaaaaaggggcg

SEQ ID NO: 26838 - DNA, 264 bp, Glycine max
  Clone ID: PAT_MRT3847_124234C.1
gggcaaaaaaaaagtacatttttttggctttcatgtttttaggggttaccaaatcgccccaagggcaatgaaatgggttcaagtaaaaactttttttgtccagggaataaagaagttgccttttcttatgggtgactaaccccccactcataagattttttcttaagcctgaaattagaacaaagggttttttaaaacccctccttttttagaatataaaagaaggggggggcctgccctttttttacttgggggaaaattttg

SEQ ID NO: 26839 - DNA, 307 bp, Glycine max
  Clone ID: PAT_MRT3847_124235C.1
ttccaaccccacattgtacctacctcagcaatgtcacctccaccattttccccccctctctctatttcccttctctttgtcttcctgttagcaccattactcttagctcaatctccaccttcaccgtctccttcttcttcttcttcgtcttctgtagcctgcacttgtacactatagccatcaactctgccgttccattctctcagtcattcgttcatcaccttcagacccttatggctatggcaggttctccatatctcaaagcctcagtcaggcacgagtgttaaccaaagtctttgaggacttt

SEQ ID NO: 26840 - DNA, 528 bp, Glycine max
  Clone ID: PAT_MRT3847_124236C.1
tttacccttctacatgtgtgtacgtcctccttcttggggggggggggggggggggggggggggggggggggggggggggggggggggggggggggggggggggggggggtggggggggggaattttaaaaaaaaccccggtaagggattttttgaaaccaaacccttggttcccaaagatacctgggctaggcagaatccaaagcccccccgcatttaaggttatttttggcgcttaaaaaaaaactttgggggatccccccaaaaagggtttttttttgggggggggggtgcttaaaagtttcaaatggaaaatgggctgtggcccttccctaaaaaaaaaccccccttggaattttctggccctggtaaaatgccccccccctgagtgaaaatggtttacagttgcaaaagcctaattaacccaaaaacggttttcgccgaaaagctttttggaaccttatgttaaccccagtaaaacccttggaaccccaggtcagggcggtttggtttaattgaaaccccctta

SEQ ID NO: 26841 - DNA, 363 bp, Glycine max
  Clone ID: PAT_MRT3847_124237C.1
ttaaaaaggcataaaataaaatttactcatgtatattcgtacaatcactgctagcctttaaaataataagacaaaaccaaaacttagaggatcaactcaataaattgaagcacgtttctacctaccactgtactatgtgtatgcttcctacttataatatacatcaacaaatacattaacaaacaaggtgaacaggtagcatgttttagacaagagaaataattaaaaacaaaaaggacctcagtaaaataattttatcccggaatatatatgtatactaatttacaatagcaattcaaacacagggcttgacagggaatttatcattttggccccctcaatgctccttttgaagccccctgc

SEQ ID NO: 26842 - DNA, 544 bp, Glycine max
  Clone ID: PAT_MRT3847_124238C.1
caaagagcccgacaagtcagttattgacaccaacgttgagaagctgaagaaggtgctttatgtgtacgaggccaagctgagcagcaccaagtaccttgccggggacttttatagccttgctgatctcagcaatgtctttgaaactcactaccttatgcagaccccttgtgcttcaacggtcaatgagcgtccccatgtaaaggcttggtgggaaaatatcttttctaggcctgctttcactaaggttgtgggaggaatgacttttggtcagaatcaggaagaatgactagtattttgtgaggttcaattgctacggaatttgttgcagtgtctagtccaccaccaactgtaatctagtgatgggtgttcttgaaaacttgtttcatttcatataactagaattaattaggaaaacgaatcagttttcaagttcctacttcatcttataatttgagcatatgttgtagtgttttgagaaaattttttaaaaccccccttcatctagtgttttaaattataagattctaatttttaatttttcccc

SEQ ID NO: 26843 - DNA, 599 bp, Glycine max
  Clone ID: PAT_MRT3847_124239C.1
aaaaaggatcttggagaagattgtgcagccgaacagaaaggattggagcaccaggctagatgatgctctttgggcgcataggactgcctacaaagaacccataggaatgtcgccttatcgggttgtctttggcaaggcatgccatcttcctatagagatagagcacaggtcctactgggctgtaaagacctacaacttctttattgatcaggctggagaggaaaggaagtagtaactaagtgagctagatgagatccgtttaaaagcctatgagaattccaaattctacaaggagaagaccaagaagttccatgacagtttgatagctaagaaggactttgtggttggacaaaaagttttattatagaaattttatcaaggcacgcatctgatgagttctaccttgggcagatagatggtggtgactactggacttctgatgccgggccattagaggcctttaagatgtttggaaagaatcttgaagagattgaaaagaagcttatagagaagaacaatgatgagacattgagaaaccgctatgggccggctaaaatgccttacactttgctctatccttctagtgaggagggattgac

SEQ ID NO: 26844 - DNA, 269 bp, Glycine max
  Clone ID: PAT_MRT3847_12423C.1
ttggtttcttttttgctcactctgggcaggaagaacagaataagctgctgtttctccagatgacgataagaaggacggaacggaagatgatgatcattaatatgaagggactcttgaagatgactttctcacaactttgtattacggaatgcctacatcttttggaatgggacttgcaatgcataggctagggatgcttttcacaaattctcccagaattctagtagttattggcttcgcagtactcatgggccagcaataatgattgg

SEQ ID NO: 26845 - DNA, 1302 bp, Glycine max
  Clone ID: PAT_MRT3847_124240C.1
gaaaattcgaccacctctctctctctctctctctctctgacagggatcgcgacgagcggcgccaccgtcactgatcgaagagaaacttcgacatcggaacctgccgcagccacctccaccaccaccgcgcacttcaactctctttcagcaaaaaaaattgtcactcaaatggatttggagacggaaaacagattagctgctatgcttatgagggaagcagcagaattacggcggcagtctgaaagggaaggagttctggcttatcttcgcaagcctaatatacggacccgaccaaattcacgtttcctcactgcaactgttcgtggagtacaacaagcaaatcgagctgtggaagtgaatgagatgtggcgattgaggcaaaaagagctcgagctggataaacgtgttaaagaaaaatccttgggtaaaagcagtagagatagaagccatggggatgataactcatcaagaggcacaggaagacatgctagtattgataatagcacttcaagctcctctgcttcatgttcaggtaaaagagaatatgagctggagaaatgggttaaagacacatcaaaagataaaagcagtagtgaaagaagccatagggatggaaactcatcaagaagcgcaggaagacatgctgtagtggataaaagcactattgcctatacttcaagctcaagtgaaagagcccatgagcatggtctggaaggtttaaaggatgacgagcttgaggagtttctacactcaaggaccaaacgaggcagaggtgctgttggtccaaggatggatgagactggaccttaccttcctcattcagacagggagcctaatactagtcccgatgttagggaacgtcgtgttatttatggtccagagaagcctctgtcattgaggccatatgaatcttctgatgaggaggagcttcatgaacaaaggcggaaaaagagtaaaaagtctcattctaagaactcagacaaggagcgttctaagaagcacaggtccaaagataaatctaagcataagaaaaagaaaagggaggagaaacgaagtaaacatcatcactgaggctcttctgtaacttgatattctcacatgaaggttataactagcggatacagggaattcggatgcagctcgtgtgtattttgtacagataattttctgtaaaatcaaatgcaaatccaaccagtttggccatttgatgcaaaagtaattattaatttcaattgacttgtgttaagggagaatatttaagctagttatttgcccacttaaaattttttactcaggcaaggc

SEQ ID NO: 26846 - DNA, 1217 bp, Glycine max
  Clone ID: PAT_MRT3847_124241C.1
cggacgcgtgggctctctctctctctcatcgtgaacgtgaagacagggatcgcgacgagcggcaccaccgtcagtgatcgaagagaaacttcaacaaaggaacctgccgctgccacctccaacgtgcaattcaaccctcttgcagccacaaattgccactcaaatggatttggagacagaaaacagattagctgccatgctcatgagggaagcagcagaattacggcggcagtctgaaagggaaggagttctagcttatctaaggaagcctaatatacatacccggccaaattcacgttttcttactgcaactgtacgtggagtgcaacaagcaaatcgagctgtggaagtgaatgagatgtggcgattacggcaaaaagaactggagctggataaatgggttaaagaaaaatcaatagatagaagccatagggatgataagtcatctagaggcacaggaagacatgctgatattgataatagcactaggacctcctctgcttcatgttcaagtaaaagagaatatgagctggagagatgggttaaagacacatcaaaagataacagcagtagtgaaagaagccataaccatggaaactcatcaagaagcccaggaagacatgctgtagtggataaaagcactattgcctatacttcaagctcaagtgaaagagcccatgagcatggtctggaaggtttaaaggatgacgagcttgaggagtttctacactcaaggaccaaacgaggcagaggtgctgttggtccaaggatggatgagactggaccttaccttcctcattcagacagggagcctaatactagtcccgatgttagggaacgtcgtgttatttacggtccagagaagctgctgtcgttgagaccatataaatcttctgatgaggatgagcttcatgaacaaaggcggaaaaagagtaaaaagtctcattctaagaactcagacaaggagcgttcaaagaagcacaggtccaaagataaatctaagcataagaaaaagaaaagggaggagaaaagaagtaaacgtcatcactgagtttcttctgtaacttgatattctcaggtgaagggtataactagcggatacaggcaattgggatgaaactcgtgtttgtactgtgtaacatcaaatgcaacaccaaccaggttggccatctgatgcaaaagtaattattaatttcaattgacttgtgttaaggaag

SEQ ID NO: 26847 - DNA, 228 bp, Glycine max
  Clone ID: PAT_MRT3847_124242C.1
ttttggaccaaatccaaacaaaatggttttcaacattcatatacaccacagaggggtgggacccctttttttgagacacaaacgaacgttcctactatttaaataaccaagctctggaccaaaacacaacacacacacctccataggcgagaggtgcacacatcatttatttaattttcccatataaaccacatcacaacaacacactaatgctccctctaatatcag

SEQ ID NO: 26848 - DNA, 377 bp, Glycine max
  Clone ID: PAT_MRT3847_124243C.1
cttatcttttttttttctttttatttcattttttatgactctggtattattaacgatatatcagggcatattacgttcacacgtacgttactaaaatttaagtacaacatcggacattccttataattcattgacacggcccttttgaacgctcgaagttccccaatagcttccgtatgaggtatcagcgggtacaaacacttgatgttagaatctaagacggagagagtagtaaactccatgcatgatttccatgaacttcaacaactggatgcaattctcgctctcgtccccgttcattcgagtgaaaacctccaagtacatctgtcttcaaagcttatccacttgttgaaaaaccctaacgcatggcccacaat

SEQ ID NO: 26849 - DNA, 249 bp, Glycine max
  Clone ID: PAT_MRT3847_124244C.1
acccacaactctaatgatagattgggttatcaggtgcggcccgccaaagaacaagaagtgtttggtttctatttcacagtacattacaaagaaattcttgtagctggtcaacctgaattattgaggaagcgacctgtatatacaaacgtattctttaggggtaacaggactaataaaaagtgtaccagtgggggctaaaacattgcttaacgcataaaaaaaggtccaaatttgttttgtcgccaaaaa

SEQ ID NO: 26850 - DNA, 208 bp, Glycine max
  Clone ID: PAT_MRT3847_124245C.1
caccctatgtttggatgtctagaaagaaaagaggcccgagcaaaagaaacttgctttaaaactttgtggttggttgaacagaacgtataaaggtaaaaatatcttaaaaacaaaattttcgatgttttatcttcatttcatatttcaaaattttttctctctcctattttttccacttatccaaatttaagttaaattgaaacctgat

SEQ ID NO: 26851 - DNA, 2901 bp, Glycine max
  Clone ID: PAT_MRT3847_124246C.1
tcaaattccttcgcaaatgtcatgtgccatgactcttagttcggcttctgcactactcctagctaccatggactgcttcttgctcctccaagttaccagattctcccacacaaaggtgcaataaccagtagttgatttcctgtcaaaagcacaacctttgtcgcttctcacgcttagcgcgtccacatccactaagcgcccagtcactaactctagctcagcgagacatgcttgttcaatgcccttgtctgagtttttcttgaagtagagacctttgcctagggtacctttaaggtattgtaggattctcctcatagctttctcatgaacatctgtgggatttgacatatggcgacttgccatacttactgcaaaaccaatgtccggcctggttttatcagatggaggactatcatcttcaaagttgttctgattggttggttctataggggtgttggcttccttgcacccaagcatccctatttcttggagtagatctagggtgtacttcctttgagacatatagatcccatgctcaaattctctagccagaaaactcttcaagggattgatttggttatggtcgtctcccgtgattacaatgtcatcaacatagacgataaatagtgttaccttcccttccaatgagtgtttaacaaacattgtgtgatctgactgacattgggtgaacccctctttcttgacagctcgggtcagcctctcaaaccaagctcttagagattgcttaagaccatacaatgacttccggagtttgcataccttatttgaggtgttggctgcttcacaacctggaggaatctgtatgtccacttcctcttccaactcgccatttaggaagacatttttgatatccagtgagttgagtttggctactggtgcaaaggtttcttcatagtccaccccatatgattgggtgaatccttttgccactaacttggctttgtaccggtttatactactatcaacattgtacttgatagtaaaaatccacttgcatccaactagtctttttcctttaggtagagtagtgatctcccaggtgttattctttgccaatgcttgaaactcttcattcactgttgtagtccatttaggatgttggaaagcttcctgaatgtttcttgggacatgagtgctatcaagcaatgctacaaaagccttgtatcccgccttctggtttctcctttttctaacgtaaaccctccagttttgatcttgactccttggttgagcttcttctggtttcgcagaagcaatttctgttagtactgctgatatagtttcttcaatctctggttctgcaggagcagtttctgtagtctccaaaggtgcagccatctcatccttttctaagttacggtgtgggtctaggttgcgaacaaaatatgaacaaccaaacactttcaagggaattgaggtgaggcttttgttggttgggtaggtggtctgaaggactgtgtgaggggtgttgaaattaaggacactagaaggcactctgtttatgagataggttgcggacaatacaacttctccccaaaattgttttggtacatttgtggccaacatcagtgatctcgtcacttccagtaggtgtctatttttcctctccgccactccattctgttgtggagtgtctacacatgaactctgatgcacaattccatttttcttaatgttggtctggaattgtgtttgcaccattgtatgaaaaatctctaatatttgtcctacttctgacttttcctgaagaagatagagcccatcacattcttcagcactgccaatcgtctttcccgacctcaaaatctgaaaaacacacacattatgggaaaatttagtgacacagttcaaatcatttatcaatttgctgatgaacagcaagttgcagtcaagtttgggtacataaagtacaaaatttaaagtgatatgttctaaaatcacaactgaacctttaccaacaacttttgagagtgtatcgtctgctatccgaactgtagagtgttcatgacatggagaatagttgtcaaaaacagttatgtctccagtcatgtgatctgaagctctagagtctataatccaggatcttctttttcctttggaggtgtttaaagtatgtgaaaaattacctttctgagctacttttgttgtactagtaggtttccttgtgctcaacaaggtttgttggagaagtttctgcagggattctatttgttccctgctaaagggacttggatcagaacttacctctccttcttgagaagtgttataagttgtgttgcctctagtttccttattccggaatgactttgcatctagtggtttaccatggatgtcccagcaggtttccttggtgtggcctagtttcctgcaatgatcacaccaggggcggttcttcttctgtggtggacgggtctgattccctcctgatgccaatgctgagttttcaatgtatggggctagcgtaatgttccctagcataaattttcttctactctcttctcttcttacttctgagaatacttcccgtaattttggatctggtttggttccaagtactcttccacgtacttcatcaaggtccatgaagttctccccaatttcatttgtcatggtattgagaagccacgacatcaccaaactgttttctagttgccatttttgaaggttggaatccctcttttctggttgtttggggtcacccgagatataccttccctttccttttccttggaggaagatgcggattgacctctcccattggatgaatttttgcccattcagtttgtggcatgtgatagggagagcaatcccttcaggtgagctggttagcaacatgtcagtctcccctttggttgcgttttctgttttctccctttccat

SEQ ID NO: 26852 - DNA, 262 bp, Glycine max
  unsure (1)..(262): unsure at all n locations
  Clone ID: PAT_MRT3847_124247C.1
gcgtcaatttaagacacatattatctattctacgcaaaatgtcaccatatttgctcgtgacagactatacagagtttttttttgttggcacgtcttatgatgccaatgttanttnccgtgggggagtctgtattgggtgaaaggcatatttagagaatgtgtgattctactgtgcactctgtaaaggacgagtggagttatatgatatcttacacacctgcatgatataggttttgccttcttatggatatgccgttttaat

SEQ ID NO: 26853 - DNA, 532 bp, Glycine max
  Clone ID: PAT_MRT3847_124248C.1
cccctaccgtagcctggattccttaaaacgggcggctttttttttttttttttttttttttttttggggagggaattaaaggccccctccacctaaaaggtgaggtttttttttttccttaccggaataatttaggggacatttttaacttaaatatagttaacaaaactaaatttttaacttttggggtaacttttccggtcttggaaacataattcaataattaatttaaggcctttttaattcaattcctcttctaattatataaaaaataggtaaaatttttcaaacctaaaattggatcttttaagattaaaaaccaccttacctaaggttttttctcaactaaggaattaaacccctggacatatataattagtattttttacattatcaaccaattaaaaattattttacaagatgtttattatgaaaatcaccaccttattatatatataatattggggtaataaatccaaataaataaggccttatgggaaaccctcttttaaatcctacaaaaataatcttt

SEQ ID NO: 26854 - DNA, 1728 bp, Glycine max
  Clone ID: PAT_MRT3847_124249C.1
atggtacactctcaaaagtttttggtaaaggttcagttgtgatttcagaagatattactctagatttagtactttatgtacccaaacttgactgcaacttgctgtccatcagcaaattgacaaacaatttgaactgtgtcattaaattttcccctaatgtgtgtgttttttcagattttagggtcggggaagatgattggcagtgctaaagaatgtgaagggctctatctcctttaggttaaagattctaataagaaacacaaagctaattcatgtgtagtgatcccttcaaaaagcgaagagtcggtaatattgtggcactatagattaggccacccaaattttatgtatttgaaaaaaaatgttcccatcattattcaataaaagactaagaaattctcattgtgaaacttattaattatccaagcatactaggagcacttaccccttacaaccttacaaaccttcccaaccattgtcggtaatccatagtgatgtatcgggaccatcaagagccagcaatatgaccagctctagatggtttgtgatgttcattgatgaccacataagagtcacatgggtgtttcttatgaaggaaaagtcagaagtaggatgaatatttgaaatttttcatacaatggtgcaaacacaattccagaccaacattaaggtgctgagaaaaaataatggtcgtccttcagaccacctacccaaccagcaaaatccttacctcaattcccttggaagtgtttggctgttcagcttttgttcacaacctagacccacaccatagtaaacttgatcccaagtccatcaaaagcatattcctaagatactcacctcaccaaaaggggtataagtgctactcttcaaaaaaatctatcatacaatggatgtgacatttttcgagcatcaaccttactatcccaaagttggcattcagggggagaagatgccagtttttgactgacattacaaaattccaacttttagaatcagaaaaggatgagatggatgcacctttggagactgcaaaattgaaaattgaagaaactgtatcagcaattccaatagaaactgcttctacggaaccagaagaagctcaaccaaggagtcaagtccaaaactagagggtttacattagaaaaaggagaaaccagaaggcggtagagccaatcgcagttccaatgcagagccatgaatctgatcaggctcctaaaaatgaaattcccacaggtaactctgttcccatctctgaatccattcatactaatacaagtaacttggatatgcctatttccttgagaaaaggggtgataacctgcactcaacaccccattgaaaaatatatgtcctatggaaaattatcacaaggatacaaggcttttgtagcattgcttgatagcactcacgtcccaagaaacattcaggaagctttccaacatcctaaatggactgcattagtgaatgaagagcttcaagtattgggcaagaataacacctaggagatcactactctacctaaaggaaagagaccagttggatgcaagtgggattttactatcaagtacaatgctgatggtagtataaaatcggtgcaagccaggttaatggcaaaggattaacccatcatatggggtggactttgaataaccctttgaccagtagctaaactcaactcaggggaaggtattttggcctttggaagcaaaccctaaatgggccttt

SEQ ID NO: 26855 - DNA, 317 bp, Glycine max
  Clone ID: PAT_MRT3847_12424C.1
ggcacagcttagcagagagtgcttgaacctttactatatatatgagagtgcatattatgcttgtcgcttcaattttgattgcgtatgaatgcgatggctaaaactaccaaaaattgcctatggacatgcattctgtgttcggcggtccctacacccttgccgtttcatgttccaattgcaagcttggctctgtaccacacaacgcagccagaatgcctcactgttggatatattcgcatagaagacagtagcgaactggtcttacgtgaccaatatatatacgagtcgatcaccgcctaactacactactgtttata

SEQ ID NO: 26856 - DNA, 831 bp, Glycine max
  Clone ID: PAT_MRT3847_124250C.1
cttgcatgcctgcaggatcagtttctgtagtctccaaggtgcagccatctcatccttttctaagtctaaaagttggaattctgtcatgtcagtcaaaactggcatcttctccccttgaatgccaactttgggatagtaaggccgatgctcgaaaaatgtcacatccattgtatgatagaattttctggttgtgggagagtagcacttttaccccttttggtgaggtgagtatcctaggaatatgcttttgatggagttgggatcaagtttactacggtgtgggtctaggttgcgaacaaaatatgaacaaccaaacactttcaagggaattgaggtgaggcttttgttggttgggtaggtggtctgaaggactgtgtgaggggtgttgaaattaaggacactagaaggcactctgtttatgagataggttgcggacaatacaacttctccccaaaattgttttggtacatttgtggccaacatcagtgatctcgtcacttccagtaggtgtctatttttcctctccgccactccattctgttgtggagtgtctacacatgaactctgatgcacaattccatttttctgtaggtagaaattcagcatggaattatagtattcacgaccattatctattctcaataccttaatgttggtctggaattgtgtttgcaccattgtatgaaaaatctctaatatttgtcctacttctgacttttccttcataagaaacacccatgtgactcttgtgtggtcatcaatgaacgtcaaaaaccatctagagccgataatattgctggctcttgatggtcccatacatcactatgaatt

SEQ ID NO: 26857 - DNA, 723 bp, Glycine max
  Clone ID: PAT_MRT3847_124251C.1
gtagatcgcaaagagcaacagatttttctagatttggcatgtttctttcttagaacgcatacaacggtaaatgtgagcaatctaaaatctttactgaaaggcaatgaaagccaggaaacagtgacttttaggttaggaaggttgaaagacaaagctcttataacttattccgacgataatgttatagctatgcgggactgtctacaaggcatggctgtggcgtctgttcggcgacaggcttgtggtgcccctcggggcccctgccggttgtgggtcccctatcacctctgggaggcagtcatcaatgtctcgagtactaaggccattagaagcatattgattcacttgccaacattcatgaagcaagagttagaccctcacatatttggaaagatgaacagactacaatttctggaaatttctgggaaatgtgaaaaagatatctttgatgaacataatattcttgcaaaatggcttcaattttcggcaaatgaactcagatttctttgttggtatcgttaccctctaaaatccttgccagaggatttttctgctgaaaaacttgttatattgaaattgccaaagggcgaaataaaatacctttggcatggagtgaagaatctgatgaatttaaaagaacttcacctcactgactccaagatgttagaggagctgccagatttatcgaatagcccaaatcttgaagaactggttctccagggg

SEQ ID NO: 26858 - DNA, 2397 bp, Glycine max
  Clone ID: PAT_MRT3847_124252C.1
ggctcgagcttagaagcaaatgctggcatggtatcgcagattcgtgtggcaagaccacctgctgaaggacggggaaggaatcaattgcttccacgttattggcctaggattactgatcaagagttgcaacaaatatcaggagattcaaattctacaatcgtgccactctttgaaaagatgcttagtgcaagtgatgctggtcgaattggtcgcttggttttaccaaaagcatgtgctgaagcatatttccctccaatctctcaaccagagggccttcctttacgaatccaagatgtgaaaggaaaagaatggatgtttcaatttagattttggccaaataataacagcaggatgtatgttttagaaggtgtaaccccctgcattcagtctatgcaattgcaagctggagatactgtaacatttagccgtatggaccctgaggggaaacttataatggggtttagaaaggcaacaaattctactgcagtacagttacaaaagggatgttcagaaacccacctaaatgcgctgtctaaaaaatggaactcagctggtggtgacatgagttggcataacattgacatgcctgaaagcagaaaaagagatgagttgccgttgccacctgtgatggttcctgagaagaaaagaactcggaatattgggtcaaaaagtaagaggttgcttattgatagccaggatgcactggagctgaaacttacttgggaagaggctcaagatttgctccgtccacctcctactgttaagccaagcgcttgaataacagagcagcaaacaaattcagattaaaatgtgcaggcacagtctaccaaatgatagttaggtgtagcacaatgaagattgcgaaaccactacggttattcatgcgcaggaaaccagacatgaagagaacagcgggcaagataacgagccaaaacaattaactcatgaatgcttgccagttgcattttcttttttccttcttttgttgcactcaaaaatcattttccaagggaccttgataaacttctgaggctgaaaaaggaattcaagtatgaaagtctgtcagctaggcagagactggccctggaacatgaatcttcaggactggatgctttggcaaatgcagcaatactgggagatgatgcaagtgactctggcagaacaccagttgttaccaccacaaaacatcctcggcatagacctgggtgctcttgcattgtctgtatccagccaccaagtgggaagggcaaacacaaacctacatgcacctgcaatgtgtgcatgacagttaaacgtcggtttaaaaccctgatgatgcgaaagaagaagcggcaatccgaacgtgaagcagagattgctcagagaaatcagttatcatggcggacgaaagatgaatcagaagtagatagcacctctcgccatttaactccagttgacggtttggagaatgaagtaagggtgcaaaatgaattagattcaaggagtccagacgatgcggtggctgaagctgccaagggacaattagacttgaattgtcaacctgatcgagaagatgtgcaagctgggccgaacagcttgagcatgacgagtcttcttgaagaagcaaatctcccgctggaaacctacctaaagcgaaatggccttagtagcttgatatcagagcagcaaacaaattcagcttcaaatgtgcaagcacagacaaccaatgatagtgaggtgaaacacaatgaggattgcggaaccgcttcggttattcatgagcaggaaagcagtcctgaagagaacagtgggcaagataaagagcaaaacaattaactcatgaaatcttgccagttatattataatttttttttccttttttttttaactcaaaaatcattttacaagaatccttgcataaattataaaattataggaggttcatttgtatgtctatatttttttttcttgttattgttgtctgtgtcttatggttgtgaaatttccccccaaaactcaataacctatatacgccaaagcgtgtgttttagggttgtaaactagtgagaggcaaggagttgaaggaaagcacaccacctggtttttttttctttggtgtgtgtgtgtggtgagtctgaataagcattgtttttcttcttttttgttatatggagaaagggagatttcacctaatttcgtttcttagtgcgtgtgtttagtttgaaaagccattatttggcttgcctttttaataggaaaatgctcttttgcatgaaaaacatttcactgatgttgtacagaactaatgtgactggttgatgtatgtaatagttatgtgatttcttcaaccgttgaggctgcgggcgcagggtgcggcagcgagctagtcagcccgtcgacccgggaaacatatgtcat

SEQ ID NO: 26859 - DNA, 1474 bp, Glycine max
  Clone ID: PAT_MRT3847_124253C.1
ccagcgtccggctggagatactgtaacatttagccgtatggaccctgaggggaaacttataatggggtttagaaaggcaacaaattctactgcagtacaggaaacactaccatctaatatgcccaatggttctcattcaagtgaaacttcctattctggtgtttatgagaatctacctatattaagtggttactctggccttcttcagtcacaaaagggatgttcagaaacccacctaaatgcgctgtctaagaaatggaactcagctggtggtgacatgaattggcatagcattgacatgcctgaaagcagaaaaagagatgggttgccattgccacctgtgatggttcccgagaagaaaagaactcggaatattgggtcaaaaagtaagaggttgcttatcgatagccaggatgcgctggaggtgaaacttacttgggaagaggcgtcaagatttgctccgtcctcctccaactgttaagccaagcattgtcatgattgaggatcatgtatttgaagaatatgaagaacctcctgtctttggaaagaggagccgattcggctcgagtgcgatgggatctcagggtaaatgagcagtggatgcagtgtgatagttgctcaaaatggcggaagttgcctgttgatgcacttattcccccaaagtggacatgtgtggagaatttatgggatcagagcaggtgttcatgtgctgctcccaatgaattgaacccaagggaactggataatcttctgaggcgctggagacctaccagcaaaatggccttactagcttgataacagagcagcaaacaaattcagcttcaaatgtgcaggcacagacaaccaatgatagtgaggtgaaacacaatgaggattgcggaaccgctacggttattcatgcgcaggaaagcagccctgaagagaacagtgggcaagataaagagcaaaacaattaactcatgaaatcttgccagttacattttcttttttcctttttttttttactccgaaatcattttacaagaatccttgcttaagttataaaattataagaggttcatttgtatgtgtatatatattttctgttgttgtctgtgtcttgtggttgtgaaatttccccccaaaactcaataacatatatacgccaaagcttgtgttttagggttgtaaactagtgaggcaaggagttgaaggaaagcaccaccttgctgtgttataatacatctggttttgtttctctggtaagtgtggtgagtctgaataagcattgtttgtcttgtttgttatatggagaaagggagagtacacctaatttcgtttcttagtttgaaaagccattatttggctttgccgttttaataggaaaatgctcttttgcatgaaaagcatttcactgatgttgtacggaattaatgtgactggttgatgtatgtaatagttgtgtgatttcttgaaagctactttttattactaa

SEQ ID NO: 26860 - DNA, 301 bp, Glycine max
  Clone ID: PAT_MRT3847_124254C.1
ctcatgtctgctctcatacgtccgtgtcattccaatggatactgcgatctacatcaagacggaccgccaagtggcgctcttcagagcgctccacgggcatctgcaccgagctgctaaactcgccttgctacgtcgtaacctaaaatgccgcgttacttactatcacagcagcagcaactgctgccgcatgccgagctctttcggctgcgagccgacgccgatctggcttggatccttccgcggactgctaccgctaacgccgcgctgcataatgagcttcgaggcatacttagctacatct

SEQ ID NO: 26861 - DNA, 129 bp, Glycine max
  Clone ID: PAT_MRT3847_124255C.1
gtgatgctgatccatgtggtctccagctccctctgcactcgtcaccgcttggactcttacatcatgtagcatgatgatcaatcagtgatccgttaagcctttgagttgatagtggagttgcgcatttct

SEQ ID NO: 26862 - DNA, 265 bp, Glycine max
  Clone ID: PAT_MRT3847_124256C.1
acgcgtgcgaacacctccgagagtgtcaactgaaggggaactacaacgctcgctaggtagtttcatctgggtaacgcttatgtctcgcacagaacaagtcaccattacaggatcaggactccgactgactacaattactacattggctatcattactgtgaacgctaccgcgctaatatactggtttactaatgcactcatctgggtaccgcactgactcaacttgctagacaggcctcttaaggcacatggtatcctaggaaat

SEQ ID NO: 26863 - DNA, 350 bp, Glycine max
  Clone ID: PAT_MRT3847_124257C.1
cagagatctgccgacaatgaagtttgtggcgaagaatgcatggatcagtggggcgtgtggacaggctaggagcactagagatgggaagctgcccgggacccatagagacacccgttctatggctatctactgcgaaagggctacctcacttgatcttccctgacctacggactaggatccgttccccagattgccatatacttcaaatttctccactccactttgtggaaggacgcgcttgaagcactatatcaaaagtaggagggctgcaccaaaagctcggcctgaaccaatctggaacggcggctgcagccagggatttcattcaatgcctgcctgaggctaaggga

SEQ ID NO: 26864 - DNA, 633 bp, Glycine max
  Clone ID: PAT_MRT3847_124258C.1
gggcaacagcgcaataccaaactaaccatgaaaatcagtctccctttttatcatacttggtcgagaatctcagccctctgcacctaaatgaaatgatcgcaaaacagactgacaggttatcattgatcatgagaacttgaataaactattacacataaatccatcaaaactattcccacgacaaaaatgcctaaaaccaaaggggcttgtatccccctagagaagggtcagaccaccacccccacgcatgggtccctccaaaagacacttgacattcacctgaaaattttctaagaaaagacgctgcgattgtaagcattgtttctataaagataagatcttccttggccgcaatgtgattacctatagggatattcctgaccgacgccctatactgaatctacagccacttcaccctggtgctttgcgaggcatctttccctcctctcttaccattcctgcatgacaagcccttccccgataatttgaggacctgcatgttctgccgggttcttgcgtgcctcaagggcagcatcagcatctgccaactgtcggaccagttttctcaaagccggacaggggcgctctgcatctataaaaacaactcccaaaatctggtccactgctacttgg

SEQ ID NO: 26865 - DNA, 1720 bp, Glycine max
  Clone ID: PAT_MRT3847_124259C.1
tttttgagataataaaaacaattgaattttataaagataacaagtcctcaaaagtagagaaaaacataaagaacagatattttacatttaaccaaagaacttaaaagcttagcagaaaaaccttaaagtgttaccacactatgcgggaagcatcatacacataatcctaagatcagttactagctcaatgaacagaattctcatcagtgtcaattctagtgccattggtcgtaggtggcacaagaccacccactaacctgtatgaggaaggagaaggaggaacttttggagaaaggttaagcatttccaaggcctgtagtctaagctctacagggtagtcagcaacacacccaattctaggtcctgccccagttgaccatctatgtgaaagttgatgtcccaattggtaggattttgtggccttcttggaattgattctttgcaatattgctttcttgggcacatcagctcttggactctgaagaccaccagagagagtccttttgtaacttccaacagatccaagttgaggctcttccgtatttgaggatgtcgtgttgtcagcttcctcagaaactccaagctcaggtatattaccattgctagaatcttcaggtgctgtggctatttcactaagcttcccgtcctcgtaaatatcggtatcatcttttggattgcgtatctcaacttcatcaatgtcgacaccattttccttgagatatgatatgaaggagttgagcgcgtcattcgttggccggtagtgtccactatatgcagagatggacttaagaatgccatgctcagcctccagccttccagcagccacggtagctccaccagccaaaaaagatgaatgatggaataatcccttctttttcttgccagcataaagtttcttagaggtgctcataacaaatatccacttggcatccttagaatcttctcttgtgtgaagaaaatctccagattgcttgtggataatattcccctcacagacaatgtattcatagtgctctctctcttgaggtcctagatactttatgcattgctttcggagcttcgatctggggcattgttcaagatcaatattttttccatttcccaaatccaaccaataaaaaaacggctgcccagaatccgttttacaccattctttgtagtagtattgcaagttatgcccatagcgatgtctgggatcaatagcttctatccaatgctggaaagccaatttttgtgctttggcgtccaaggacaaaccctttcccaccttggcagcgttcaatttaacccgactccagcgtgacgcagcagtttccggcaaattaaagaacgagatggtgctgtggtttagtcttacatagtctatggcttgccaccatagctcctcggcgacaacggcggagtcggccaacctgcggcgggtacggtaactccggtagaccttttgcagcttgagggcggcggtggcatggccgagagaaggttggttgacggcattattgggagggaagtaggtgtcggtggtggattgggagagaaggtggattaattcaaaggtgggggagagggagtgagtttcaacttccatggaagagactagtgacaaaaacaaatcactggtaggtgtgatttatatcttgatcacagtagttcgctaattcatactgcattctatatttggccaggtgtttacgtcttcgtgtcgtgtccggtgtcggtg

SEQ ID NO: 26866 - DNA, 272 bp, Glycine max
  Clone ID: PAT_MRT3847_12425C.1
gcacgagacacaattatacttatcatcacattaattagttcttacatcttcacaaattgtggtcgtcaaattagtccttaagagatgcaaaatgtcattgcctttgtccttgaacgattttatcatcagattacttcgttataggtttaatttgtcactaaacttgctcttcgattttattatggagtaaataatttatgcaatatagtatactgtaatttaatcacaaaccaccatgtatgataactttattgatttttacaataactact

SEQ ID NO: 26867 - DNA, 313 bp, Glycine max
  unsure (1)..(313): unsure at all n locations
  Clone ID: PAT_MRT3847_124260C.1
gattaaatgcttctcatttcagaaaggtgtttcgttgttcttgtgggaagttggaaacatcggttgggtatgactatgttgaggtccatgtatggggggactccttcatgttgcatcaaatacgcaaaatggttgggactgctgtggctgtaaagcgcaacttaatcccaagagatgccattttgttgtcactctccaagttttcgcggattgtcttcccccttgcccccccagaagttctgattttgaggggaaatgctttcaaaatgagagcaagtgctggaaactntacgcggcaagaaatggtgtctat

SEQ ID NO: 26868 - DNA, 499 bp, Glycine max
  Clone ID: PAT_MRT3847_124261C.1
cactctcacctgtcactacacctcaaaaagtactctcacttgtagaagacagggtgaatcatcttgagactcacccaaacgccaacaactgaatgggaatgagatcaatgagagataccgaggaagccctgatgatcttatattgaatcataaaactggcaaatccctaggcgacataatcccctgcagcgacgaatagtactctgaatgtgtgcaaaagagtggacggataacaactggaatttgagtgttgatccgaaacaagtcaaagaagaatggagatatgaatgaggcaatctacagcttatactttgatgactatggtaacatttgagcgcacggtacatacctgacctatgaagacacttatctagatgtgactgggggatctggcatcaatgaagaggatgatgatataatcgagctggatgctagtgagatcccctttaaactactctacacatcttatcttaacggccacggagacttgcctcaagag

SEQ ID NO: 26869 - DNA, 284 bp, Glycine max
  Clone ID: PAT_MRT3847_124262C.1
acaaaccaagccagtgcatcttacagtttatgttctatatgagtgaaaatgggagtgatgtcacgtttgtcatttacaattacaaaaccatctatatgcccgttgaacagagactgttcaaacagctgtaattctttgaattaacaaattacaaggggatcacatgtatctgttattctgtcgttggcagcagtagatccaaatctctaatcaaatgcatagggatcctctgcatatggattaagagacccttctgaaaacacatcaccaatgtttaaaggatg

SEQ ID NO: 26870 - DNA, 238 bp, Glycine max
  Clone ID: PAT_MRT3847_124263C.1
gcatgcgatattgcgcggaatgtactatttagcacatccttcagacattacttcaaagagtgtaataacgggccgaattctgctggaccaagacagagaccgattcaaaaaaaatgctcaacagtcaatagcatgttacctagtatctgcaggcctcaatatggggtacttttaaacgatggctactccctattcctctgaagagataccctctattgtgctaacccgttggtgccct

SEQ ID NO: 26871 - DNA, 307 bp, Glycine max
  Clone ID: PAT_MRT3847_124264C.1
ggcactaccagtggataacaagaatatccagacgagattccagaagatcagtcgcatccctcatcggcatggaggaacactggcagcctcgacaggattactccctgcaatcaggttctgtcttctatcaatgcaccagatctcactactctgcatgattatgggagcagtggttgtcttggatcctttatgcaatccgccacataattgctactgcagatgttccgccaaaacgatttatgaatcaaagtgtggcagcagacaatcctatcacatcacacgatttctggatcaccagcacgcatga

SEQ ID NO: 26872 - DNA, 684 bp, Glycine max
  unsure (1)..(684): unsure at all n locations
  Clone ID: PAT_MRT3847_124265C.1
nacaagttgtagatattgtaatttcagaattccaagttgcattttaatttgtgttggtgtgcagttttagcttcccttttcaaattccaatccattattttgcacctttccccgccatccatttgatttcgtcggagagcttgcgatggaaccttccacttcttcctacaagggaccataatggtggtttactcaaaataatggattccgaacatgtactaattctgctagagagtagagaaaccttagaaagagtcaaagtttgcttatggcttacattcattgtcaaatgtgatttggaggtggcggtgtatgaaggtgtgattagggaaaagccaactagcaaagaagaagctcgacaattcttgaaagattattctggaaagcttgctgcaactgtgggatctgtactagttactaacctcaaaacaggactgagaaaaggagatttggatcgtgtagacgttgggacaaccgacagtatgatgggactccccaaagctctgactgaaaaactgttgaaggaggccctgtaggactcctaagtgttaagtaatgcttaatctgtgaatcagaatcttaaccttttctctcaacaattttctaaacacagtgcttgtctttttgtcataagttattgggtattctgattcaagttaatcaattgggccatattttattagt

SEQ ID NO: 26873 - DNA, 207 bp, Glycine max
  Clone ID: PAT_MRT3847_124266C.1
ttcggtgtcgatatcaagtgtctcgacatccatggcttgtgctgttgcgttatatgcgctgcggtcggtgctgcgatattggtcgttggcgacaaaaccacctacaccgagacgcgcatagacctctttgatgtttgctaattggcggtgctgtattacacgcgcagtgacgggtgctggcttagtttgggggccaaggatggggtg

SEQ ID NO: 26874 - DNA, 237 bp, Glycine max
  unsure (1)..(237): unsure at all n locations
  Clone ID: PAT_MRT3847_124267C.1
tttgcttcagattctggtatgtttttcacaatgagactaattgtgtntgccctaaattcttgaaatgaaatgagtaatctctgnacatnttccccctctcanaattatgtttcctccaacttnggtttggccaattttnaagtattatgtttgnttgcntgattagnctaagtnnaattgngattgattganggggcacaaaatggaatgngaatggttgtaattttnaaanttaat

SEQ ID NO: 26875 - DNA, 656 bp, Glycine max
  unsure (1)..(656): unsure at all n locations
  Clone ID: PAT_MRT3847_124268C.1
ccacgcgtccggtgatgttgatggaaatggagatgaatgtcgcttatgtggcatggatgggaccttgctttgttgtgatggttgtcctgctgtttatcattcaaggtgtattggtgtgatgaagatgcatataccagaaggggcatggtattgtccagagtgcaaaataaatttgattgggcctacaattgcacgggggacatcacttaaaggggctgaagtatttggaaaagatttgtatgggcaagttttcatgggtacttgtgaccacttactggtactcaatgtcaaaagtgatgacttttgtcttaaatactacaatcagaatgatattcctagagttctccaagtcctttatgcatccgaacaacatagacctgtatacaatggtatttgcatggcaatgttagaatattggaatatttcagaaaacttcttacccctctgtgtcagtaaacttcctcctatgattgaagaagaacataaagctgttagttcggtgaaggcagactacagtttaacgtttgggaatgggatttgtagngataatttggtgccatctcttgatgcttcattggttacaactcgaaatcctgctcctggaagcagtggcaatgcaagaactactgtgaatcttgaacttcacgagggaaact

SEQ ID NO: 26876 - DNA, 1615 bp, Glycine max
  Clone ID: PAT_MRT3847_124269C.1
taaaactactgcctgcaaggatgctgaaactaagaagtatgtttcagaattgaatgctgaggaggatgatgttgatggcaatggagatgaatgtcgcttgtgtggcatggatgggaccttgctttgttgtgatggttgtcctgctgtttatcattcaaggtgtattggtgtgatgaagatgcatataccagaaggggcatggtattgtccggagtgcaaaatagatatgattgggcctactattgcacggggaacatcacttaaaggggctgaagtattcggaaaggatttgtatgggcaagttttcatgagtacttgcaaccacttactggtgtatgtttaacttcttttgtgtttcttccactccttcatttgttatgctggatgattctggctcaatgtcaacagtgatggcttttgtcttaaatactacaatcagaatgacatacctagagttctccaagtcctttatgcatctgagcaacatagacctatatacaatggtatttgcatggcgatgttagaatattggaatatttcagaaaagttcttacccatttgtgtcagtagactaactcctatggtcgaagaagagcataaagctgttagttcggtgaaggaagaatacagtttaatgtttgggaatgggatttgtggtgataatttggtgccatctcttgatgcttcattggttacaactcgaagtcctgctcctggaagcagtggcaatgcaagaactactgtgaatctgaagcttaatgaggaaactgcaatggattcgactgtttcaactgttaaccatcatcactctgacccaaagtgccaaaattctgttaataggtcagctgcagtaagccctgtcaagtgctccttggtaagcagacaatttaataattatgggcacgcaaatgacgtagggttgcctatgaatttgtctttgcaaactaaaggcgaccaatctggttttggaaagtgcaaaggcagtttaactaatgattttgtgtacatgggttgctcctataaaccacagtcatatattaattactatatgcatggtgatgttgctgcgtctgctgctgctaacctggccgttctttcttcagaggattctagatcagaaggtcatgtgtctggcaacttggggaaagcaacatctggaaacacttatttgctagcaaaagcattctcccaaacagcttcacgcttcttttggccaagttctgaaaagaagcttgtggaggttccaagagagaggtgtggctggtgcatttcttgcaaagcctctgtttcaagcaagaaaggatgcatgttaaatcatgctgctataagtgccaccaaaagtgcaatgaaaatcctttctggtcttgctcctgtaaggagtggagaaggaatcatccctagcattgcaacatatgttatgtatatggaggaaagtttacgtggcttaatagttggaccctttctgagtgaatgttatagaaagcattggcgtaaacaagttgaacgagccaaatcatttagtgatataaagccccttttactcaaagtgagtgattgttattttgaatcaaggagatttattaatttttaatgtctggactattgcttgcatttg

SEQ ID NO: 26877 - DNA, 363 bp, Glycine max
  Clone ID: PAT_MRT3847_12426C.1
gagttgttccattaggcactgtgcatggagacttcaagccttacttcagtggaaccatatcaaaaagacccctaactcatcttttcatctcgcttgccgatggatttgtcaggcccattgcggcttgcccatattccaagttggcaccttgtgataggttccacagaaacgatgaggagctgattcttgactagcggattgctacggtagcctccgtacgcttgtccgcacacattattgctgaggctgatatctacatgttagatccatgggactatccagctaacgccacctatgtggagcaagaatggtatttgctcagtcctagagacggaaagcacccaaatggtgcagggccataca

SEQ ID NO: 26878 - DNA, 271 bp, Glycine max
  Clone ID: PAT_MRT3847_124270C.1
cttggtggtaggaaggggagggacgagtttgttgggttggagaggaaccgtcgtgcgaggtattcctcgccgaacagcattgataacaatggtttattgaggctctatttgggcagccggagaaacgggtctggcaaaggaaggtcgaaccaggcacattctattgccagaagcgtacttcgattgtattaaaaaaaattggaggtgttctttggtctgatgatttagttagttaacttacatttggtgcatttgtttgtgtaaaaccaca

SEQ ID NO: 26879 - DNA, 335 bp, Glycine max
  Clone ID: PAT_MRT3847_124271C.1
aaaatagacgatgttaatgaacatgtttaaaaattaatggcagatgtagcttttacaacatcaagactcaagtttgccaataacataacattttggtatactatgtcacatcacccaggtgagtatgtgctaagatgcgcaacctatacaaaaaccccgatttggagttgaaattgctcgggaagacctcacaccattcaactcttgaaagaatttcattcatgaacgctcatgaagaaaatgatgggggcgctctatcaaagctttcttcagctgatgataccacggttgaccaataacatgctctgggtgagaacggatcgagctcgagccgc

SEQ ID NO: 26880 - DNA, 299 bp, Glycine max
  Clone ID: PAT_MRT3847_124272C.1
tttggggttccttttatttttaaacaaaacccttataaagggcccggattaggtcccctttatggaccagtggtttaaaagaggatgctttggaggtggtcttaaagggttcacacaacgtgggaatcgccatggcgacaccacatggtttagttgcgccaaacataaaaaatgttcagtctttttccataagggagataaccaaagatctggcggggatacaacattgggttagagataacaagttaacttgtgaggaaatatatggtggcactatcactttgagcaacatgggagca

SEQ ID NO: 26881 - DNA, 455 bp, Glycine max
  Clone ID: PAT_MRT3847_124273C.1
gtggatatgaaagagtgataacaaggaagcgtaggagaaacaaggggaagtcagaattggcatttggtaccaaaatttttctgataaccgatccccgagtatgatagctggtaaagcagtaaatagcgccaactaaatttacaatattgaacagaaagtgtcttcacataatctttggatgcacattaaagatccttacatagttcaaattacaaatcagtgaaataagttatagtgtgattgagatcccaaccctaatattaaccttctagggcaaacaaagtgctctaaagcctacatcttaaaaataatgggaaacagcatttaaaacaagttatcatcatgcattgcagtatagtgaagttcaagcacagatattgagtcttcggccgcgtgggcaggatatttgtaatatgacattttatgtcaaaacattggtatcaatgcaattaaaa

SEQ ID NO: 26882 - DNA, 1011 bp, Glycine max
  Clone ID: PAT_MRT3847_124274C.1
aaacggctgcgagaagacgacagaagggggggacaataataacacacaaaatcaattccacacctacatatccaccacaccatggccaccaccaccatgttctcatcaccatcagccattttatcctcaaccactacaaccaccacaccaaaaccatcatcttcagcaccaccctccccatcatgcaaacctcttctacccttcaaacaacccttaacaaccttaactgccgccgccgccatcgccaccattttaaccaccgcaccagcaccctccttagcacaagagtctccctaccaagtctactacggcaccgccgccagcgccgcaaactacggcgggtatggtggcaactccagcaagaaggactctgctgagtatgtctacgacgtgcctgctggctggaaggaacggttggtgtctaaagtcgagaagggtaccaatggaacagacagtgagttctacaacccaaagaagaaggcagagaaagagtacctcacttttctcgcaggatttcgccaacttgcaccaaaggatgtgattttgaacaacttggcactatctgatgtggacctgcaggacctgattgctaatgctgacagcgtgacctctgatgaggtgaaggatgataaggggcagctgtactatgtgtatgagattgatggagttggtactcatagcttgatctcagttacttgtgctaagaacaagctctatgcacattttgtcaatgcccccactcctgagtggaatagagataaggacatgttgaggcatgttcatgagtcttttaagactgtggggtctttttagttggcttctggtgttttatattttgtagaggtaatggttgattatctattatgaggatgaggatggtttcttttgttatattttaaatttttactacttgtctgcttgatttaagttttggtatagttggcttcaatttggaacaaacaggtttctgatgtggtttaaatagagtgtagctgttgcagcttgcatacc

SEQ ID NO: 26883 - DNA, 598 bp, Glycine max
  Clone ID: PAT_MRT3847_124275C.1
gggtttcgccacttgcgccaaaggatgtgattttgaacaacttggcactgtctgatgtggacctgcaggacctgattggcaatgctgacagtgtgacctctgaggaggtgaaggatgataaggggcagctgtactatgtgtatgagattgatggtgttggcactcatagcttgatctcagtgacttgtgctaagaacaagctctatgcacattttgtaaatgctcctactcctgagtggaacagagataaggacgtgttgaggcatgttcatgagtcttttaagactgtggggtctttttagttggcttgtggtgttttgtattttgtagaggtaatggatgattatctattatgaggatgaggatggttttcttttgatgataaattttaagtttttcctacttgtctgcttgattcaatttttggcatagttagcttcaatttggaactgttttaaatagagtgtagctgttgcaaggtgtaagtctaggttgtttgtggttgaacttgcgagtgttcttgtagttgtttgtagcttgaaaaactgaaggatgttgttggactttttcatgtaaaattcaaaatttagggattttc

SEQ ID NO: 26884 - DNA, 426 bp, Glycine max
  Clone ID: PAT_MRT3847_124276C.1
gttgaatggaaatctggggtctatgtttcagtgcctacaaaaactaattaggtggaaactcccagggaatggtaactggatctaccttgggacaaaattcctagtggcttgactacaactgaggagagattggttggctcagaacatgagggatatgagccttttcttggaggaatttaaaaatatgccactactatgacgcccctagatgaagaaattctttctaagggtgcacaagacatggatgaggaatggattgattgtgatgatgaggaggattcctttgaggaagatactgtaagagcaggacttaatggtgcagagggtttggactatctggaacgaaacactgttgccacatgtgagggagtggctcatgtgctaacacgcaaaaatggagaaaaacgtatcaagagatttgtttct

SEQ ID NO: 26885 - DNA, 285 bp, Glycine max
  unsure (1)..(285): unsure at all n locations
  Clone ID: PAT_MRT3847_124277C.1
ggggntaaaaagtcctnnnnggacgatagattctcgatcatactggcgtacgcacgcttccaatatctcgtaatgcttgctaaggcgcatgtatctatgtcgagttttgatttggtacaaacgaacaggcattggctcgttggctcgctgaaatcatagatagatcattaacaacttttgtcatgtttgtggaaacaagtgaaaatggtgcactagaaagaataggttgggaaaagctcactgccgatgcacaaaaaagcacaaattggggaatatagattttgt

SEQ ID NO: 26886 - DNA, 529 bp, Glycine max
  Clone ID: PAT_MRT3847_124278C.1
caaaccttcgtcctttcttctcattagtactctgattattgacagaacaaaactcgttatcagtactcaggttatttgaagaacaaaacttgtcatcagtttcactttgccatgaggtccgtttgcactgatttggcaactcagtcttgtatgcttctctcctttgtaccttagtcaagtgagtcttacctccaacaataggaaaatctataaattcagaaggattattggatttatttaagcacttgttattttcatttcaatcctctacaaatctccacataggggaatctttggtcctattttttctttcaaacaccgtgggggttgcatcacttgtattaccctaatgggccacaaaggcgaattggctattcttatcgtgggctatatcttctgactgaggttgaagggaagagctcgaagcctttgacactataaggcggctatgatcacatttgaggaaaaccatgaggcttgtgaaattgatggggatgcgcctgggggacattaccacttcctcggggtt

SEQ ID NO: 26887 - DNA, 1259 bp, Glycine max
  Clone ID: PAT_MRT3847_124279C.1
aacctatctacgcattttacctggaactcattatatgaatgcttcacttccctatgtatatgtgcttctttcttatgatttttgtaaactatggtattcccttcctccttatacggcaactttcaaggacattttgtgacttcaaagtccgtgttgcagattacatacgttatcgtaaaatcacttcaaatatgaacgatcggtttccagatgcaacccctgaagagcttaatgcaagtgatgcaacctgcattatttgtcgtgaagagatgacgacagccaagaaacttatatgtggacatctttttcatgttcattgtctccgatcatggctggagcggcagcacacttgccccacctgcagagccttggttgtaccacctgaaaatgggacaactgcggctgcagggcagcaaggatcacagtcagatgtccatcaacggggaacaactgggacaggcagtggaagcacagctcctggactgatttgatgacatcaagctagctgctgctgctgtatattcctgtatgctctcctcgctacactcttcatcccccagttcaaatatatatggctgaatcttctgataaggaccgtaatggagagcaaacttccagtgaagaagcacaaaggcagtttcttatcgctggtagaccaccaaatctatcctttcctccaatgcaaaacttccattttctaccttcccaagcacatgcatcccctgtgaattatggagaggggtttgaaaatgatccaaatatcccaaactctcagcttgaagcttatagaaaacttcttcaatgccagattcagaacctacagattctgcaaaatcagctcgagatgctgcagaggataaaggctgatagaagtgtagatgagggcacgccatcatcagatagcagaggcaagagtgtcatttcctcatcatctggatctggtcatggttatcgtgaggatattcgagatggaaaagcataaagtctgctgtttctggtttatgccaggagcagactgcctaatgtagatataggaagaggaaaatacagaaatcacagcattgctctaatgtgacatctgttattcgtgatactaatcttgtaaatgcatagtgccccttaaaaatgatttattttggcttccttttttttgtttccatgtggattgtacgcatatattagcttttataaaagttaccttttgatcagaaacagaaatcacagcattgctctaatgtgacatctgttattcgtgatgg

SEQ ID NO: 26888 - DNA, 427 bp, Glycine max
  Clone ID: PAT_MRT3847_12427C.1
aattcggctcgagctcgagccgaatcggctcgagggcggtcaagacgaagcgggcgagaggatgccctcggagcgtgcgcagacgacggcgttctggctgcacaatgcgctgcttgccatgttgacgtacgtgaccatcttctggaacgtgtggctctcgcctacgcacggccactgttcgtcgcttcaggctctcaccagcgcttccgagctgccgaacgccgaggcggtggtgctgctgatgggcatgtcagctgcgggtggcgcgccttctgcgcccgtgtcgcggtggggagcgtggttcgacttttggttctatccggtgcagaactcgatggtgctgtctggcttcccgccgctgggctggatctcgttctgcgtgctgggcatgctctatgcgcgcatcatgctgcaccgacgatggaca

SEQ ID NO: 26889 - DNA, 260 bp, Glycine max
  Clone ID: PAT_MRT3847_124280C.1
tttacattcactaactcgcctgctaatgcttcacgctctctttcattccgatcataaatgcagcacttaaacaaatcactggacttatatactcaatcactcacactagcattaaccatttacccattttatttaatacttacattatctttctacactcactacttttttatcactttcattaaataatttaattactacccttactcaatttaaaacaattattattttataaactctcatttctttctatttcctaa

SEQ ID NO: 26890 - DNA, 419 bp, Glycine max
  Clone ID: PAT_MRT3847_124281C.1
ttcatgcgtccgcccacgcgtccgcccacgcgtccggttggcttgacatcaagttacactccaactccattgttggaatctggtttgcaaaaagacagagggttaattgtggagtattttggaaggatgtcttacgttgctcataacgttaatcagccccaagagaaagatttgttggagggaaatttttcctttgatattaaatctcgctctagattggaaaaagtttcctctacaaaagcacaatttgttagtggaaagacctttaattatgacatattttgtgctggttcacattcttcataagatttttccgaaaaggaagatcaagaaaaaacccataatgattgttgcctgattgagacatagaattgatcctcaatacaattgagggttaagctcaaaatggaaacaaattt

SEQ ID NO: 26891 - DNA, 473 bp, Glycine max
  Clone ID: PAT_MRT3847_124282C.1
cccacgcgtccggtgctgatccctctagatcccttaatatcaaattccctaattctcaaaatctcatgtcatcttctcctctttcaaatgttgaaccaaattctgttactaatgaacactctaacactgtttctgacttaaacagatatccaagtgaactgtccagtacctcttcttctcagtctcacactgtcagttctccttcttataatcatgttcttcccccacaaaatgtccatcctatgcaaaccagattcaagtttggaattcatcaatctaggttgcatccttcactgtttatggcacattgtgaacctaagacagttaaacaggctcttgctgacccttaatggtttgctgctatgaatcaagagtatgaggctcttcttaacaataaaacatgggatcttgttcctcttcccaaagacaaacaagttgtgggttgtaagtaggtcttcagaattaaggagaat

SEQ ID NO: 26892 - DNA, 361 bp, Glycine max
  Clone ID: PAT_MRT3847_124283C.1
aaaacacgtagttgagaactaagtagaatgaaatggcttcctcaatgatctgggaccgggctgttaccaccgtgaaccgtgccggtgccggcatggttgctccattcaccggtctcaaatccatggctggctttcccacgaggaagaccaacaatgacattacctacattgctagcaacggtggaagagtacaatgcatgcatgtgtggccaccaattggcaagagaaagtcgagactcttttctacttggcaaaaccttgttaatcccaatttgccaaaggaggtcgattccttttaaggaaaggatggattccttgcttggaattcgaattggaacacggttttctttaccgggggccc

SEQ ID NO: 26893 - DNA, 390 bp, Glycine max
  Clone ID: PAT_MRT3847_124284C.1
cgccggaccgacccattcgtgcgttcacacccgagaatagtgagagggggagaagggggtttcaaactgcggatcgtgaatagcaagccttgacgtcggcaaccagtgtcgaacagggttacaacaagctagtagctgaactaaggataagcgggcctacgatgggtggcgttgcttgtcccaaggatgagaaactttctggtcgcaagactcaaggcagacctaagacgcggctgatgactatacctagtgaggagattaattttggggttcgtccgaagatcttacacatggtgtggacaggttggaacaacagggaccagcttgattggcaagtacgaattaacccatactccatggaagggactggattgggcaatagatgactga

SEQ ID NO: 26894 - DNA, 258 bp, Glycine max
  Clone ID: PAT_MRT3847_124285C.1
aaatgaactcaattttatttaatgctgaacaccataagtgcttataataagcgcccttaaacaagactaccagaaactacggagaagtgtaaacttcaccgtatctctaccaggaagcagcctatgctgtcacagttgttttggctgcactggaaagatcggacctgcgattagccacgatctcactccgaggagctctctgctccttgaatctggaacctaggagggtgagatactatgctgctactgttttgcctt

SEQ ID NO: 26895 - DNA, 408 bp, Glycine max
  Clone ID: PAT_MRT3847_124286C.1
gtggtcatgatgtggctcttggtttgtttcatgagttagttgattctttatgcaagattcttcctggtggtggagcctcgatctcacgtatggcaacaaacatattaattgactccgcatacacgatcccatgttacataatcacatcaacaaagggtgttgagggtagtgcaagagctgtgttactatcatcttgctacaaaactttcaatttcagacacctatatatgtatctttgttgtcttttaccttagaggcacattttgaaggttaattagaagatattgtctgcaaccctaacgaaacccacgtaattctgatccctcgctcagacccgatcggactcatctaattacacttgtatgcatatgtagataaaattgacgagggttgatataagtagttaat

SEQ ID NO: 26896 - DNA, 602 bp, Glycine max
  unsure (1)..(602): unsure at all n locations
  Clone ID: PAT_MRT3847_124287C.1
ggctcgaggctctggcattcttcattgattctttccttcatcattcctcttttttctttttatttttctttcataatttgctttgggacctcaaggacttacgcacaaacttattatcttttgccagttgaccaagccacttgaggatagctntgcatacttttggtgtttgaagagctcttccatctgccaaaatgaagggacgtgtaagatggaatgaagataatattggagaaattgaagcaaacaagcccatgaggcaaaaaatcactgaacctaagactccatatcatcctatgcttgatgatgacagttctccatcccccgtgctaggagattttgacggatataatggtgataaaaatctctcaccaaatgctgaacaaactggttataataatggggcatattgtagcagaaaaggaactagacaatctgacggctggacatcatctgaggatgaggcagaagatnactgagaggatgatgaagatagaagttgagtttcagagagcacagaaaggcccactattatgaattccgcatagtcaaagagcttgcacaaagggcttctctgaggatggagtgatgaggatatcatg

SEQ ID NO: 26897 - DNA, 509 bp, Glycine max
  unsure (1)..(509): unsure at all n locations
  Clone ID: PAT_MRT3847_124288C.1
ggaacatcatagccctcttaaataagttttacagagtatcatctggagtttatttataatgagctcaaatcagttctgtactgaacatcatacccccgctaactgattctgttgaatttcttaaattgtttgaaatcttttaataatatttttcgatggtgatgttatgcatgttgggtggtgtcttttaatatcctgtccggtaattggtactgttattaaactggtaattattaagtgacattttggttttatgtgtttttcctgcatggttgatgatggatgtgaaaaatccctttttttgcacccgattttttttctttttgttgatcatatcaagagctgatttttgtacgtgttgtgttatgaattttctgtatcatttaatgacaagcctttgttttttacttttcgttgactcctgaaaatccatattctgcactgaaacattagngtaacatgttatgcatttcccaatattgcacaagcaaacatgcgtagtgaatgat

SEQ ID NO: 26898 - DNA, 104 bp, Glycine max
  Clone ID: PAT_MRT3847_124289C.1
ataccccttgttaacattacccgtggcatctatgggcatgcctcctcaaggtttcattgttgctcctgagggagaagtaatacagaattcaaacccatgcgcac

SEQ ID NO: 26899 - DNA, 194 bp, Glycine max
  Clone ID: PAT_MRT3847_12428C.1
attataaaacgcgtacttattattggaggttaggacacacttaaatggaagaatgggacgtacttcaagagtgaaattattgaatcatttgcatatgctcgcgttgtaggaatatctaaactcgcaagccagttccaaacttccagcgggaggaaagaggatagacgtggaaaccctactggaatcaaatctgt

SEQ ID NO: 26900 - DNA, 399 bp, Glycine max
  unsure (1)..(399): unsure at all n locations
  Clone ID: PAT_MRT3847_124290C.1
ccagcgtccgcggacgcgtgggcggacgcgtggggtaatttacagtgtcacaaaatatatgggattctttttaaaaattcataaaatagataatctgtngactcgaaaaaaaaaaaaaaaaaaaaaaaaaaaaaaaaaaaaaaaaaaaaaaaaaaaaaaaaaaaaaaaaaaaaaaaaaaaaaaaaaaaaaaaaaaaaaaaagggggcgggccggcttaaaagaaaccaaacttacaattccattgcatgcaacgtcaaattttttttatggggccacctaaaacaattccattggccaaaattttaaaatttcaaaactggaaaacccctggcgttaccgaatttatggcttttgaggaaattccccctttccccatttggttaaaaaccaaaaaggcc

SEQ ID NO: 26901 - DNA, 231 bp, Glycine max
  Clone ID: PAT_MRT3847_124291C.1
cacgagttctacattcgccttggtgactcatcgcaacattggcaccttcatgggccaaccggttgctagaatgatttcctacgcagctgtcacggcactgacgatggcgacttctgcagacagatccctcagcagccaccgactgcggctttctcttccaaacgctagcacgatcaagccttcctcgcagtccatcaaatctctaccatgctctgcgacagcgccgttttg

SEQ ID NO: 26902 - DNA, 421 bp, Glycine max
  unsure (1)..(421): unsure at all n locations
  Clone ID: PAT_MRT3847_124292C.1
gcacgagtccctacctcctatatttacatcaatttctcaataaatagtgttttttagggaagaaaatataagtttaaccgttgaattgggaagtgctggtccaaagttaaagtgtgtttggatttcagctcaaaatatagaatttgattaaacttatctttgtaaattttagttcagttaaaagtaggtctaggattatttgatttatatgnttaaaattaagcttcttacattcaacacagagaagtgagagaagaattcgaataactttgaaataaatctaatttaaatgaaagtcacgctcaattcaaatgaaaaatcaatttgccaaataagtaggtattatttgagacacatgtgacttactaataaataaaagataactcatgagaatagtgattataaaaaaaataatacttat

SEQ ID NO: 26903 - DNA, 245 bp, Glycine max
  Clone ID: PAT_MRT3847_124293C.1
acgcgttcgcgcgacactagctttgtgctctcgttactcacgaagggcgtcaacgatgtcaacgctgtccatgagcaacgccacatgcgtcaacccagtgttccaacacaagtagcgctcttgaacaatctattcatgacctggagatcaacctactaaagggcctcatagcctcacggcgatgcacttaactttaagagcggacagctgtcgcaggaacattccatacaactctaggtacctgc

SEQ ID NO: 26904 - DNA, 808 bp, Glycine max
  unsure (1)..(808): unsure at all n locations
  Clone ID: PAT_MRT3847_124294C.1
ggctgaagaaatcatgccatttatttactgaaaaggaaattaacttgaaattgagtatatttatatagcaacagtatgcttgcagttaaagacattgttctcgaggaaagactaattgagtgatcacaatcacaccgatttattttatatgttgcattcatacataaaattcattgaaatagaaattaaatttcacatctaacgacttgatgtgtacaatcaaaccaaacacatgcagacaaacacatgcagacaagtttgaggaatttggagaccttaaccacacaagactcggcatcgatactctcccagggcccatatcggaaagatgtttcgatacgatgagtagttaagggtacagttcctcataaatactcctgtgatttcctgttgggggaaatctccatcttccatttgtgaattgattagtaactttattccacggtgtatgggtgtcggatctatctcagcctgtcctgcatcaataagggacaacaaagcccatgaagtctgaactaagtttgcacggttgccttctaagtttgtataaaccttgttttggctcgacaagtaactctctccccatccaccatttggaagctgctttgataacaaaaatttacaagctttgcgtagggaaggactattatggtagttctttccacaggctgttagtcccactacagcaaaccaggtaccataggtatagcaaataccccaacaaccgtaccaagagccatcaggatttttgtgtgttttcaatgtaatggattgcattggaaatacagngatctatttcctttcttct

SEQ ID NO: 26905 - DNA, 300 bp, Glycine max
  unsure (1)..(300): unsure at all n locations
  Clone ID: PAT_MRT3847_124295C.1
cgcangcacgcgtacgtaagctcggaattcggctcgagnnnnnacncccattancannaacnctggtgnnnnggnncantnatcggaannggnatagttannctaccaaatcnattccagncccgggannngtanacacctanntggaagtnngtgtancanatnttaagaagagngcanntggaggaagtgccctgtcactggcaagaggatccnagggattccacacttgagacctgctgaatactagaggtctagnnngcctcggaaccgcagancgtaaaccgngctacggnggtg

SEQ ID NO: 26906 - DNA, 445 bp, Glycine max
  unsure (1)..(445): unsure at all n locations
  Clone ID: PAT_MRT3847_124296C.1
gtcacttgctgggaaaatcaccactggaatgggggttcatgcattcgctgcaaagcggttcancttttttggagcacagcttcattttgttcttaacctnnctggttgagtccatggaaccaagctgcctcaaggcgaagactggcctgccaccgagacagtcaaacactggncttcttccatagatggnaaggcttccncatgtctggcgggtctcgaatccatcgctgaacggcccagaccgatcccttcaagctctgcgggggcgaccttggtctccgtgtgcgaaatcaagtngacctttcccgcccttggtcgggctcaaggcggggcttctcttcaatggccgggtgccgttgaaaggcttgctgggggggtcgatccctccattggcttcctcggatccctgcacaacggcgctcggggtgtcgctgttcgtcttctc

SEQ ID NO: 26907 - DNA, 371 bp, Glycine max
  unsure (1)..(371): unsure at all n locations
  Clone ID: PAT_MRT3847_124297C.1
agnaagcaaggaggctcgaggcacgtacagatccaaaggtataaactctttctttgacaactccgcctaccattaggaggttttcatgacacgcctctaagaaaatcttgacacttgaggcataatatccgatcaacaccctattcacaccatcaaatgttaaaacgtgggagaatgaactaactaaaatccacctatcatccaaggactatctacatgggttaagcaaaaccgatcattgtaagactcttacagtgctcctgcgattgtgaccggctctacaaattattgttggatcgaataacgaacattgatgccagtcaaacccaaaggctttatactaacgactcatggatgcttgaaatggtcaa

SEQ ID NO: 26908 - DNA, 183 bp, Glycine max
  Clone ID: PAT_MRT3847_124298C.1
cgggcctactagtgagctacactacccgctatttaattcctgacctgtacctacacgcgtacgaactttccctagggggcgtcgcattaaagctcgtcggaatcatcactataaagacttcctgtgagataatgcaatgccgtgacaattccactcaacatacgagtcgcaaacataaatggt

SEQ ID NO: 26909 - DNA, 161 bp, Glycine max
  Clone ID: PAT_MRT3847_124299C.1
cttgaaattactctaggccttgctgatatttcagaggatgattatcctgtcaataaggataatcatcctcttgaaattactctaggccttgctgatatttcagaggatgattatccttattgacagaataatttcaagaagtacaagttatttttttattt

SEQ ID NO: 26910 - DNA, 173 bp, Glycine max
  Clone ID: PAT_MRT3847_12429C.1
atttacgagattttttcgatgtctgtcctcaaggactctactccattatgtgcaatgcggtattaacgatcgggcttttgaatggcatggtttctgacgcatgtaatcatggcaatctcacgaacttatcacgttccctatacagaaccaaaaaaaaagggcggacgtagact

SEQ ID NO: 26911 - DNA, 435 bp, Glycine max
  Clone ID: PAT_MRT3847_1242C.1
gttagttgtttaatgaacgcaattcggtcccgttggttgacgagaatggcagaagacatggggaaaagcaacctcgaatcctcttctgcttcaacaacttcccgaggcttctggccttctgtcttacgttggatcccctcttccaccgatcacatcatcaatgctgaaaaacgccttctctctcttgtcaagactccgtatgctcaagaacagtaaggatgattctcctacgctggtgatggttcatggatatgcagcatcgcagggtttcttctttcgcaattttgatgcccttgcctcccgtttcagagtgattgctattgatcaacttggttggggtggatctagcaggcctgactttacatgcagaagcactgaagaaactgaggcatggttcattgattcttttgaggaatggagaaaggccaaaaacct

SEQ ID NO: 26912 - DNA, 400 bp, Glycine max
  Clone ID: PAT_MRT3847_124300C.1
ggcatagtggaaaaagaagaagttgctatataaggtggttaaagatctaatgttgggtgatgaagggaaagggattcaccaaagaattggaaagcttaaggatgctgctgctgatgctttgaaagaacatgggtcctctacaagagcactttcccaatttggcactgaattggagaactgaatttcaagatggccattcaagtaaattgattggttttcttaaatataagtagaataaaaagctaggaagcatcatcaaaagaaaaatattggttgaacttgctaagggtaatattttagttatgcacgaataagttggatgaataaaaatacagtatgatggtagaaagaattttaaaagttaactatcaatacacctattgatattcttgctaaaagc

SEQ ID NO: 26913 - DNA, 328 bp, Glycine max
  unsure (1)..(328): unsure at all n locations
  Clone ID: PAT_MRT3847_124301C.1
aacgggacagcgcagggggaggaancgagaggccagccgccggagaagaaccgggcgaaccgccagaaaaagagggacnccagcacgagccatgttccgttcggagatttttcctcgtttcttgttcattaacgagacaaccttcgtttgtttggttgatctggattggtatcgaatcgtgcgatacgttttctgtttcgtacgattctatctaccatgctggagatccttattgcatatcgaaagtttgttttcttaaaggaattcttttttttcttctactttgagtngcatttgcattttttgggttttggttttttttgagttt

SEQ ID NO: 26914 - DNA, 249 bp, Glycine max
  Clone ID: PAT_MRT3847_124302C.1
gttcacctgcagtaaacatgatacgaaatgataatgttgagttaacaccgggacattacgtgtgcgacggaagacccaaacgtgacacatgggtctatcctggttttgctaccgctccttcgccaaattaaacccctatatggatttcctttctgcattggaatatgttatcctttttccattaacatatctgtagaactaaaagtgggagtacctatattggactaaatgttcacttcaatgaaaggg

SEQ ID NO: 26915 - DNA, 1339 bp, Glycine max
  Clone ID: PAT_MRT3847_124303C.1
cagccatattattatgtgctttttgcatcttcctttccaatctccaaagcacaagagggagcaaacaggtcaactgcaacaccttgcgttgcggcaatatagatattcagttccctttcggtttgagaggatccaaccaagatcgtggctgcaggtattacccagttcaaagcttccaactttcgtgcctccacggaggaacacaaaccattctcaccctcccaggcttcggtaacttaaccgtcaaaagcatcgattacgaatcccaaagcatccgagtcaacgacccagatgggtgtctcccgaaacggttcttacaaaagtggagcctttcggtttcggattcaccttttgttttaaaccccatgatttatggaacaattccctttaacctcactttcctgcgatgcccctccaacgtgacggactcgtctcaataccccttggtgccaatttcgtgcctgagcaacaacagcaactactcggtcatagcttcgtggtcgcaacctattatgtcgtcaccctcgttgtctcaacagtgccaggtcatgtctcgggctcttgcccggctccccctgttggacatgcccatgtggcccttctggcccgatctcaacactgatcttgatttggtttggaccgaacccgattgtaggaactgtgcactcagtggccaagtttgtgggttctccaaggagaaaactaaaacccctcaagttcggtgtttcgctagggactccaccaaaggtctttcaagaagtgccaaatatgggttagcaataggagtgggaatacctggactcttgtgtctaatcgggatttcttgctgtatctgcggcaagctaacaaatcgtcgacgtagcgcggatcttccggtgacaatttccctagaacccgtccctttcgtaatgggactggacggtgccacaattgacaagtatcccaaaactcttattggggagagtgggcgcttactgaagcccaatgacaacacctgcgcaatttgcctctctgaatatcaacccaaagagaccttgaggagcattcccgaatgtaaccattattttcacgcagattgcatagatgagtggctcagattgaatgccacgtgtcccttgtgcaggaattcgcctgaggcatcttccactgcttcttttttttccttgtctcccacttcttcatcgtcctctcggtctccacagtaaataccctttttatatatatatacttgatgtagttgtagatcgagagtgctggtggtttctgtgttacacttacactgttataacctctcttcttttttctctccaaagattaataataaggatcatcttatttc

SEQ ID NO: 26916 - DNA, 363 bp, Glycine max
  Clone ID: PAT_MRT3847_124304C.1
gtttgacacccagtcttactatatttttttatacgtgatgagagatcgactatctgatcccatgtataatttgtgttgtacattcatcggtgctttgtttggattttattgacgttgatttgtttcctgtttgccacggtttttctttgttttttgttttaatttgaacatgggatttgatggcaactttttgacacccagtcttacttgctccattgctgcactctggtgaaaattaattgtctcatcctttaattaatatgcattgattggcttgcctagtaatttcttattattctgaataaatttccccttaatttttttatttgtatattatgaaatgcgattgcaaagagatatgat

SEQ ID NO: 26917 - DNA, 259 bp, Glycine max
  Clone ID: PAT_MRT3847_124305C.1
ttgatctcccctttatcctgttttttggttcccaacaagacaaagtcttcttcagcatctttgtggtgaaaaacaactcaaaggggattcaatttcagattccagttctgattcctgtgatcagtgccttacacaggtttaggtttggctttggcatcttacaagggacataaggccaaccatagtcttgatggttggttatggattgggatgtgaaagagtatgcttgggatacacgtcggttggaactggctaatgg

SEQ ID NO: 26918 - DNA, 477 bp, Glycine max
  Clone ID: PAT_MRT3847_124306C.1
tccagccaacacccatctctggtcttcggggttgtttgagcatgtcaagcatattagtctgaaaaacatgatcaacagcttcaacactaacaccagtaccactctgcggcatggcgaagacatcaaccacacgaacggtgtactcgtccacgaattctccaagcatcaaacccatcacttccatgggaaccccagcccttccgtgcttcagcatcttgaggagagcgagtgaggagatgtagacctgctcggaggaatcgagagttggggaatctgggggagggtgccctagagctccacctgcacctgcgaacattcgctgaagcctctccatcgcaaatctcacttcggattttgggatttggactgaactgaattggtttcactgagaatttgaagttgaagcggaacgctgaaacccaccaacaacaaaaccagaaaatcccggacgcgtgggcggacgcgtgggcgcacgac

SEQ ID NO: 26919 - DNA, 1907 bp, Glycine max
  Clone ID: PAT_MRT3847_124307C.1
ggctcgagaagagcacaacagaacagatggagcacacaattccgtttcattcttttcgtgaaacaaaagaaaaccgaaattaggtctgcgacgtcgtatttaaccgtctccgggagccataagcgaagaacgtttcttcctcttcccagttccctgcaacattaacaagagcacaacagaacagagggagcacacaatctttcttcatccctctcgtgcaacagaagaaaacaagacatcagaatggggagtaagatttttcttgttcctttgttggtgggtttcctttccgcttcaggttcagcttcaacttcaaattctcagtgaaaccaattcagctgagtccaaatcccaaatccgaatcaaaatccgaagtgagatttgcgatggagaggcttcagcgaatgtttgcaggtgcaggtggagcgctagggcaccctcccccagattccccaactctcgattcctccgagcaggtctacatctcctcactcgctctcctcaagatgcttaagcacggaagggctggggttcccatggaagtgatgggtttgatgcttggagaattcgtggacgagtacaccgttcgtgtggttgatgtcttcgcaatgccgcagagtggcactggtgttagtgttgaagctgttgatcatgtttttcagactaatatgcttgacatgctcaaacaaactggaagaccagaaatggttgttggttggtaccattcccatcctggatttggctgttggctctctggtgttgacatcaatacacagcagagttttgaggctttgaatcagcgtgcagtggctgtggttgtagatccaatacaaagtgttaaaggcaaagtggtgattgatgcttttcgattgatcaatccacagacaatgatgcttggtcaagaaccaaggcagacaacatccaatctgggacatctgaataaaccatccattcaagcattgatccatgggttgaaccggcattactattccatagccattaattacaggaagaatgaacttgaggagaagatgttgcttaatcttcacaagaagaaatggactgatggtttgacacttcggcattttgatacacattccaaaactaatgaacagactgtacaggaaatgctgaacttagcctgtcaaatataacaaggctgttcaagaggaagatgagctgcctccagagaaagcttgcaatagcaaatgtgggaagacaagatgcaaagaaacatctcgaagagcatatctcaaatttgatgtcttccaacatcgttcaaactctcggaatgatgcttgatactgttgtcttctagagtcattattttggaccttctggtttctgtagctgtgctaaggagacaatttgagttattacaatcactgtttccttattcttctcaaactatatttgaagacactagacatatattatttggacgggctgaaaaggtcaagaaagtaaatctcagcacatagtttgtgtggtgtctccctcagtattactggatatcttttaatgttatttctggattttctcttctagaaactgaaaagagaaaaggaaagaagagtgaagctatgagaagggtgtagctagtagtggagtgagcagatttattagcatcgtccaatgtattattccttactatagtcagcaacatttcattaatactcttgacatgtttgttaacagaagttgttttatcatgagtttttgcattttgtgtgttcttacgaatgcaggagcgaagttacatgttagaggatgagaatcatattttaattttaatctctctaaatgtaatggagatcttcgtgatcgtgcgctagttttattccgcattaggattttacatataaacaaagtgttgattcagttgtaagtggaatcgcggagcccct

SEQ ID NO: 26920 - DNA, 614 bp, Glycine max
  Clone ID: PAT_MRT3847_124308C.1
catcaccaccttgtgtcgccccatcaatgtgaattatatgatcgccatggccacttcaacttgccactcaagataactccttcaatgagtagccttgaggcacttctctccaagctcccctcagtggtgccaccaacaacaacacaacaacaaccactcttgccatctaattcccagcaacaacaacgaaggccattggagttcatcatgggaatgcagaaagtggcaaaggaagagttggaacaagaagaggtgtacaggccagaacttgacataggtgagagtagcagctccttgccaggaggagggtaccaccaacaccaacatcaacatcacttccatcaagatcagaataataatgtaactaggagtggagccaacaatggattttgaaatttctgtaccattaattaattagtactcctttctaaaaaaaacagatgatgatgataatggggaagaatcagaggcaatgttaatgaaatttagacctaattattaagtcctaacattgtagtgagttgttgttagcttcatcagtattattatgataataataataatagtaataaactaataataataactactgtgttttgagcttctttttttct

SEQ ID NO: 26921 - DNA, 564 bp, Glycine max
  Clone ID: PAT_MRT3847_124309C.1
acaaattcagtaactataactttacttattttcagagaccaatttaactgatcctctaacagtttcagggataatacttcacatgcagttttaattgctccgtgtttctacttacaactgaatcaacactttgtttatatgtaaaatcctaatgcgggaataaaactagcgcacgatcacgaagatctccattacatttagagagattaaaattaaaatatgattctcatcctctaacatgtaacttcgctcctgcattcgtaagaacacacaaaatgcaaaaactcatgataaaacaacttctgttaacaaacatgtcaagagtattaatgaaatgttgctgactatagtaaggaataatacattggacgatgctaactctagaaaacaaccgtgtcaagcatcattcccaaagtctgaacaatgtttgatgacatcaaattggaaacatgctcttcaaggtgcttcttagcatcttgcctccccacattagcaattgcaagtttttctggcggcagctcatcttcctcctgcactgccttgttgtacttggctgctaaactt

SEQ ID NO: 26922 - DNA, 502 bp, Glycine max
  Clone ID: PAT_MRT3847_12430C.1
ggagggaaaccaaaaaggggtaaaaagggttatctttatttaaaataaacatttacattattcccccaaaccaaatttaacttgcggggtagccagaccatacctgaccaaaaaatttttaacaaggcatttatcttttttaaactaaataggcgcctttttcatttaaatgggaaaacaacaccgcttcaaaagttcgcaaaaattctcatttaaaaatattttcaggggtgactttttttcttccaagctggggcaacatattttactaatatataggtaccaacatgcgaagtgctacaagaaagttgctttatttacataaccatgccgtgttacttgaacatgggtttcactaaactttggataaatgaacgcatacaaattaaacaaaagggtttggcgtattttctctggaagttgacagctccaaaacccccaaaaatagctgggttttaagttgtttgttcctgggtgtgaaaagaccatccatttgtgtttt

SEQ ID NO: 26923 - DNA, 4417 bp, Glycine max
  Clone ID: PAT_MRT3847_124310C.1
aaaaatttgtatgtatataaaaaaataaacacggagacattttttatatgatgaataatttatttgagcggaagcatcagccacaagcaaactaattaagcaacacacacttcaatttatcagcatggcctccgttcagtgccacaaaacctgcaaagtgagctgccaacaggaaaaccagcacgcctcgtttgggcagaaagtttctgacttgttcaaagggcatcaacataatgaccacagctccaattatgccacccaaaccaaagtgctttcccagtcagggtcagggttaggccccttcaccaccaaaactcaaacacaatgcggttgcccccaaacacatctcagtaccactcatggctccaacacaaaaggccatggccatggccaagggagaattaagagggagcacaagagagggatgctgcagaacatcaaggatcgcttatcaggtgacaccagcagcgacagcgagagcgcataaagatagctaggtaagagggcgtccgggaagagaaagagatcatagaagagatatagtttaattttgctttgctttaatttgtgaggatttgatttgatggaagaacatctcactccattggctgttacccatctccttcaacacactctcagaagtttgtgcagccatgaaaattctcaatgggtctatgcagtcttctggaggatcttgcctagaaactaccctccacccaagtgggaaggacaaggggcttatgatagatcaagaggaaacagaaggaattggatattggtgtgggaagatggtttctgcaattttgctgcctcagcagctcctgaaattaactcaggtgattgttctaccccacctgcttatgggaactgtgaatttcagccctaccaagggcttcaaccggagctcttcttcaagatgtcacatgagatctataactatggagaagggttgatagaaaagtggctgcagtcacgtctcaattcggctcgagaacaacaacaactagttttaaaaaccccgtttttttgtttctctcacttaacttaaaaaacactcactactacttacgcacgcccttactttctctctctaaaacccttctcgttttctctctctaattgcagatcaggccgcaccaaccgttgcggttgtggattcggttggggttcggagtcgccatggcttcggcttcgtcttcgtcctccaagctatgcttcaattctgactgcaaagaattgaagtccgaaagacctaagaaagggtggagactccgcagcggagaactagcagagctttgtgatcgatgcggctctgcttttgaagaaggaaggttctgtgagatttttcactcaaatgcttctggttggaggagttgtgagacttgtctaaagcggattcattgtgggtgtattgtttcaagtcatgcttttatgttgttggatcctggaggaattgaatgttatgcatgtgcccgcaaaagtattattttgccatctaacctgccatggccacagtccttttcccttcaaaatcgtttatctgatcgacttagagacctatctgccaaaggttggagtcagctagctggatcaggtcctgtaccatggaagcaagcacccagtctgttcaattctgcttcttcatctgacctgatcccagaagtgccttctttagttgagttatccaatagctttgacaaaatgtattgcaatgaaaggcttacctgcctcagccttggaaaagaaaaatgaggacttgtctggaatacacaattattttggaacgtctatcttggttggcgtgagatgatgttttttaatggaatgaagaatgaggagaaaaaaaggtgaaattcaaatatgttccggcagcataagtctgtgtcatagtggtttttgaagcaaaactatgaaatggagcggaactctttagtacgttaatgcaagaaattgtcaacttggggtaactggaagtcatccacaacaaactccaccacctccaggaaagcaatttaatggcactaagaatttaattaagcaacacacacttcaatttatcagcatggcctccgttcagtgccacaaaacctgcaaagtgagctgccaacaggaaaaccagcacgcctcgtttgggcagaaagtttctgacttgttcaaagggcatcaacataatgaccaaagctccaattataccacccaaaccaaagtgctttccccgtcagggtgacagaaaggctcctacatcaccaaaactcaaacacaatacgattgcccccaaacacatctcagtaccactcatgtctccaacccaaaaggccatggccatggccacgggagaaccaagagggagcacaagagagggatgccgcagaacatcaaggatcccttatcaggcgacaccagcagagacagcggcgacagcgagagcgacaacgaaacttgccacaagaggaaggactgaaattgagctttgtgctaataataataattggagttcgagatcagaattcgcaactcagtctcagagaaccagataaatatatgtgtgtgtgtgtgtgtgtgggatgaaaattaaggtctaatgattaaaatatgacaattaataataaagagagagagagatctaaattagcatatgtgtgtaagagagaccaatatatatatgtgtgtgtgtgtgtgtggggagattgttgctatccaaatttataaaaaaaaaccctaaaaaattatagcagagaagatgctaagtaaaagtccttactaaataaaaaacaatgtaatttggttatggtgcaagtcttagtattgagacatacaaaaaacaaatgcatctactatggtataaacccgagcttcccattatatgtgtgggtgaaaagatccagtgggctcaatgtgaagattgtttcaagtggcgcaaattgccagcaagtgcgcttcttccatcaaaatggacgtgttctgataattcatgggatccagaaagattttcttgttcagctgcgcaagagctgacagcagagcaacttgagaatttgctacctccttgtaattcagctgttcccaagaaaatgaaggccaccaaacaggatcccgataatgctgaagctttggagggacttgacacccttgcaaatctagctatcctgggagagggtgaggcactcccagcatccgcccaggccacaactaagcatccacgccatagacctggctgctcttgcattgtttgcattcagcctcccagtggaaagggccccaagcataagcagacatgcacatgtaatgtatgcttaacagtgaagcgacgattccgtacccttatgttacggcgtgagaagaaacaatcagaaaaagaagcagagacaactcgtaaaaagcaacagcaacaacatcctctaccattaccttcatctgaaattttgcttgatgaagattccttgccctgtagtaacacaggtgatagtagcccaaaccagaacaaagagggtaatgatggttctgatgatgatcctagccgaataaaatcatctgcttcgccgttcaaaggcaaaattgacctcaatatccaaccagagcgagaagaagaattatcacctggttcggattctggcggcatgatgaagttgctccatgatgctactgagcgatatctcaaacagcagactgtgaactctggtactggagattcatcaggcagtcagtcacagctggtaggagatgcaatgagggaagataaacttagcaatggtgttgcccatggcagtagtagtcataatactgataaggaacatgcccaatctttgcctatgaatgtgtgaaaatcatattggcgctagccataattgatacgttcttgcaaagctatattgaagtggggaaagattttgctgtacattttatccacttcggcttcttgctttttcttgtttgtacataaagaggagtaggaaaaaatggtgagaaaccaatatattccggtaatataagtgggcatcatagtggtttgtgtaggaaaactatgaaatgcagctgaatgggtagtaggttgaagctgtttagtttctttgagagctcaccgtgccacctgatttcaacaacgttgaaaatgtaactatgcctaatttgttctcccaatttattcttagcctgtaagatgtttatactttctagtaactgctagttctgttcgctgtttctctttattggaaatttggaggcacactttcacccgttttcagcaagcaacctatgctgtatacaatcaatgatggcagagaaatattggctgttttaaggggggaagtgcactcgtccattgttattgcactcggtacaaatctacccgtgtaattatttatagcctctgttaaaatcgtagttgccgtcatcttacatgaccctttttggattgaat

SEQ ID NO: 26924 - DNA, 274 bp, Glycine max
  unsure (1)..(274): unsure at all n locations
  Clone ID: PAT_MRT3847_124311C.1
ccttctnttncccctttgcctctgccccgcnctgggtcgtcttnncgcggcncgnaccnncgtcggcttggcgctcgcncccnttccgggcttctctccncctccacntgcctctccgnnncnccggcccnnctgctgtntccttcccgttcactcctgtggnntttgccttctgctctccnccagcttaccagtgctcntggctgtccngctntccctggtcccggtctgccgtggttggtgggtcctggggtgggtcnccgttcgcggttcg

SEQ ID NO: 26925 - DNA, 1837 bp, Glycine max
  Clone ID: PAT_MRT3847_124312C.1
ggctcgagcaaactccacctccaggaaagcaatttaatggcactatgcatttagcacctgattcatcaggtgaggctcaggttcgcaatgggcggcctcgagcagatgcccgaggaagaaatcagttattgccacggtactggccaaggtgtacagatctggagctacagcaaatttctattgattcaaattctgtaattactcccttgtttcagaaaaccttgagtgctagtgatgctgggcgaattgggcgtttagtgctacccaagaagtgtgctgagacctacttcccaccaatttctcagcctgaaggattgccacttaaaatccttgatgcaaaacgtaatcgattcgggtggggggtgcaagggaagagatcatataattgctttgcttatttgcgaggatttgatggaagaacatctcactccattggctgttacccatctccttcaacacactctcagaagtttgtgcatccatgaaaattctcaatgggtctacgcagtcttctggaggatcttgcctagaaactaccctccacccaagtgggaaggacaaggggcttatgatagatcaagaggaaacagaaggaattggatattggtgtgggaagatggtttctgcaattttgctgcatcagcagcacctgaagttaactctggtgattgttctaccccacctgtttatgggaactgtgaatttcagccctaccaagggctgcaaccggagctcttcttcaagatgtcacatgagatctataactatggagaagggttgataggaaaagtggctgcagatcacagccacaagtggataaacaaagagcctaatgatcaagaaatcaacttcttgtcagcatggcacaattcagcagattcgcaccctaggacttgggaagcccagttcctgtctggtataaagaccatagctcttattgctgtaatgttgttcaattagagctgttcacaaggttattgagcctgacatgtggttcttttgagaaaaatttcagctacattgagagcatccctggtgtgctgttgccacacccttcatcttcagcatacccttataaaatagaaggaggagggtatggagcaccagaacaatggcattatcaaggcggcaacaaccatcaccaccttgcatcaccccaacaaactgaactatatgatcaccatggccacttcaacttgccactcaagataactccttcaatgagtagccttgaggcacttctctccaagctcccctcagtggtgccaccaacaacaacacaacaacaaccactcttgccatctaattcccagcaacaacaacgaaggccattggagttcatcatgggaatgcagaaagtggcaaaggaagagttggaacaagaagaggtgtacaggccaatatatatatgtgtgtgtgtgtgtgtgtggggtgattgttgctgtccagtttttaaaaaaaaaaccctaaaaaattatagcagagaagatgctaagtaaaagtacttactaaataaaaatcaatgtactttggttatggtgcaagtctgaggattgagacatacaaaaaacaaatgcatctactatgatataaactcgagctaatatgaacttgacataggtgagagtagcagctccttgccaggaggagggtacccccaacaccaacatcaacatcacttccatcaagatcagaataataatgtaactaggagtggagccaccaatggattttgaaatttctgtaccattaattaattagtactcctttttaaaaaaaacagatgatgatgataatggggaagaatcagaggcaatgttaatgaaatttagccctc

SEQ ID NO: 26926 - DNA, 448 bp, Glycine max
  Clone ID: PAT_MRT3847_124313C.1
ctgtcgtcctttttttttttttttttttttttttttttttttttttttttttttttttgtttttttttttttttttttttttttttcccccccaaccttttttttaaaggcccccccacccccggaattggttgcggatttagacccttttttgggggtcctaaaacatggaaaaaaagaacccgggggaaaatcgggtcccccttgggtaaaacacgttttgaaatgaccccccgccccaaaatagtcctttaaaaaatttacggcaaaaaaaccccgggaaatggggttttgagggaaaaaaggcccccccccattttgggggggcccataagagggggggtgccaaaaaaggccctagaaaaggcttttacccccccccaaggggaaaagaaaatggccgccccccccgggggggggaacaaaatacttgccttggggccaaaaa

SEQ ID NO: 26927 - DNA, 784 bp, Glycine max
  Clone ID: PAT_MRT3847_124314C.1
cccacgcgtccgtacggctgcgagaagacgacagaaggggacgatccagatagcaaccagcaacaaacaacccctatagatcgtcttcgtcttggtgggttggaaaaaggcaagacaaagaggatggagaaggtgagagagatgctgagactaacgcagcaagaatcggtcgctatgtcacgactcaactctgttccttccctcagagccggcgataactcctccttctacgaacacttcatcctctctggcatccgagttgaccgagtccaacccggtctcgtctcctgcactttcaaagtcccctcgcgcctcgctgacaggagtgggaagttggcgagtggagcaattgcgaatctggtggacgaggttggaggtgctgtcatccatgaagagggtctccccatgaatgtttccgttgacatgtctatttcttttctctcatctgtgagagttggcgatgaactagaaattacttctaggttgttaggaaggaaaggaggttattctgggactattgttcttcttaaaaacaaagcaactggagaattgatagcggaaggtcgtcattcactatttggtagacataacagcaaaatgtaattcgatatggtagataagatgtgtatgaaatatatatgtaaataaatgaaggtttttttgggaaactgacttgggtatgtgtcattactcgttaattagatgaagttctaattgagagcataatttgaagcatgtgcaaaaaaatcctgcttggtttattcagtttgtgtgaccattattc

SEQ ID NO: 26928 - DNA, 153 bp, Glycine max
  Clone ID: PAT_MRT3847_124315C.1
tttattgcacgaagggaaacaagggcggcctaacaaggaagcaggaactgaggtgcaaacgataaggacgagctagctgagaaagacgacgccagagcacaggcgcgaaacagaacaacaaccggcgaggggggccgcaagaccccgcgggga

SEQ ID NO: 26929 - DNA, 369 bp, Glycine max
  Clone ID: PAT_MRT3847_124316C.1
gtgttttttttttttattttttttttttttttttttttttttttgttttttttttttataaaaaaaaacattggggttgtaaaccccaaaattttttttttattcccttcttttggaaaaaatagggggggtcaaaacaaaaaaaaggtttttaaagggggggtgaaattaggggggaacttaaaaagagttatacctttgtaaaagggttgggttaaaggggcacaaaagtggctactaaatggggacaaactttgagggccctaccgggtattgttttaaaataacactggtggggggggtaaaaaccaaatgctttccctggggaaaaaaaaaaccctgggggcttttcggttttcggttttctaa

SEQ ID NO: 26930 - DNA, 198 bp, Glycine max
  Clone ID: PAT_MRT3847_124317C.1
tgtataatcatcaccactttatctatacataagacctgcctctaataacctggtacccaacggcctgactcttcaattctttttaagccaaatttttaattcctaaactggtgtttaaaaccgtataaaaaaaaatctaaaagacccttacgcatatatacaaaacaaaagataactgcatctgcatgggaagtgtat

SEQ ID NO: 26931 - DNA, 499 bp, Glycine max
  Clone ID: PAT_MRT3847_124318C.1
ctttcctcgcgaccgcccacgcaaccgctcctccgtagagtaaatgtacaggctctttcctcatagcacccggaaaatcggctgatgacaccattaattttgaggcatttccccacaagctggtgcagtcaggagagattcaggaaaaagttgtatcgaaatttacacaagaggaattactcacagcctggtcaactcaggagcgtcctgcaacaactctgctggctgatgggcgcccatagaagtatgctatggtgcatgatagtacagtgtctacaataccaggtgattgtgccattggcgttaagttggcaaccataaacaacatgagtgcatatgggctcaatcctggtattccaggttccacggctgttgggcaccatacctcagtccatttgacagcaaactgtctcggaatcaaatggcaacagggagaacaccatttgaatccagaccctagcaagcagagctatttgacaattttctattgaccttctcc

SEQ ID NO: 26932 - DNA, 346 bp, Glycine max
  unsure (1)..(346): unsure at all n locations
  Clone ID: PAT_MRT3847_124319C.1
tttctttttctctttttttttttttttttttttttttttttggttttttttnnnnnctggtggttttttttttttgcttttttcttcaaaaaaacacgcgtgcgtgctacttttcacttttggggggaactcttaaaaaacttcgggcctcgcccccgagaacggccccccaggggtgtttctatcacgcccccccaaaacattttgctttttacccccggcataaaaccggcaacccgggtaaatccccccctgggcacgggcaggggccccccccattctttacccaagtggtacttaggaaacctttttgagcaaacgatattcacagtgcccccctcggggc

SEQ ID NO: 26933 - DNA, 457 bp, Glycine max
  Clone ID: PAT_MRT3847_12431C.1
acggctgcgagaagacgacagaaggggaactgttgaatcgtcttgattaccattttgtagcatgttctgtacaactagaatgtgtttgattataagacattattatttattttatctgctgcaagtatctaattaagcaatagtatcattacagtggatgtggaatttgcaggtatataaactgctaattagtcaagttaacttgtctcaaatatcttaaagtgctaatttccttgtgtctgtcctttttatagtttgactattattagtttgttgaattggagaaattgatacaagggcaccaaatttggtgattacagtatttgtttgatgtgttggcatttttaattttttttaaaaaaaacattctaaaacgattctgactgaaaaccgacttagaaacatcacattctatgatggttttcaaataaaatcatcttagaatggcatatttcta

SEQ ID NO: 26934 - DNA, 405 bp, Glycine max
  Clone ID: PAT_MRT3847_124320C.1
gcatcgggttttagtttttttttttgtttctgctgcgcggaaagactctctttcaatttttagaagataaaaaaatgtgggggaaaattttacccaccaggcgagggggtgatcaaccgcggatcccaaaaagaaaacggcgcgctggggatccacatttacaaaaaataaggggtttccccttatttggaaaacacctgaacaaattttctggggcaaaggggaaaacccccgaaatgattacaaagaaccaaggtggggtttccttatgcccgaaccccaaaaggggccacagaaaccatgtgggaaaacacagcaccccacttgcccgaaaaaaacaccagttagaaaatatcagaaccacccggccttatttcttatacaccgcaaacccccccaaggggg

SEQ ID NO: 26935 - DNA, 254 bp, Glycine max
  Clone ID: PAT_MRT3847_124321C.1
tcccacgctttctcccactcttccacatagtctttaccttaataagacattttcacgtcaagcagatcgtttaaaaaatatctaggcacgcgctcatcttcaaaagttacaaatttaaatgaactgcttatatatcttattactactatagccattcaacttgttctttcaagaccttttacccctcacaaggtttacaaccaatgttagcagcaccacctaaaggtttattccaaatactactattttttcta

SEQ ID NO: 26936 - DNA, 431 bp, Glycine max
  Clone ID: PAT_MRT3847_124322C.1
atttcttctatgaagagaattgctctgttttacatgccaacttgagattacttgcaacatcgattatcatacatccatgctatctcttggacgtgcaaacaagctcatcgctcttatgtcaccgaagaccgtgatagcgagagctcgtgcaggtagctgcagtgttgttattgcccgaagtatagagatcgctgttgctaacaacgcatgtaaggtgcgttctctgcaagtcgaatgcctcatgggctgactcgctgccctccaaggcgttacgacaaggtccctcttgatgacagctaatacaactgccacttccgcatggatgttatggtcgtcaccgctaacaatgatacggagatctaccggctcgtatctgactgtgaccgacatatgacattgaaccatgctccgccgcgctctcctccgatctt

SEQ ID NO: 26937 - DNA, 472 bp, Glycine max
  Clone ID: PAT_MRT3847_124323C.1
ggggaaaaaaaagcacaggggggaaaaaaacaaacacccccccctgagggaaaaacttgggtggggttaaaggggacccacccctgggttttttgtacgaagggggaatgagaacccccgccggggggggccacgccggaatttcagaccgggaccaggggggcgccgcgtgattcctaaatggggggctgacaaaaggggggcaaactatgggaaagaggccgatgccgggggaaaaggggttcccgctaaaattatccccaaaggacaagggcgggagcataaaagggaagcccggggggggcctaagggggggaaaagcccaaaatggtggggaacgcgccagggaccgttttcagaggggaaaacggagggggccgggcgatataaaaaatcgcccaggccgcggggagagggagaaaccttttggggccaccaggggggtttttgttttaacccggggaaggggaaa

SEQ ID NO: 26938 - DNA, 237 bp, Glycine max
  Clone ID: PAT_MRT3847_124324C.1
cgagatatcaacagcttccttagttcaatatggggaagcccttcttcactctctctcttacttccctttgcttgctactcttgtcgaatgcatgctttgctattacctaccagcaagttcaacgagtgccaactcatcaacctcaatgcgtcggaacccgatcaccgcgtcgagtccgaaggtggtcttattggtacatggaactctcagcacgctgagctgcaatgcgcctgtgtc

SEQ ID NO: 26939 - DNA, 339 bp, Glycine max
  Clone ID: PAT_MRT3847_124325C.1
tccagggccgactcacgcctgcgtgcagatgacagcagacgtcagaatgccacctttaaatatcagcattcccaactaagggacgcgtccaatctcaacatggatgccttatttcacaacatacaccaccactaacatgattaatatgatggcattgatgaaccaactaatgtgacggttactaacaacttcaccaccagaactctgccggtaacaaacactatagatctgtagcacataccacatctgacatctggtgcaatagcgactaagtaccaaggaaaatgccttgcatacaattttgcaacccaaataacaaataaaacctgccttgctact

SEQ ID NO: 26940 - DNA, 851 bp, Glycine max
  Clone ID: PAT_MRT3847_124326C.1
ggggctccacgatgctaatggagaccagccatgcaaggaacaggaggaaccatagcagaaccatagcaggaggagccgttgcaaggaggagctcgacgatgctgttggagaccagccgctgcagaaccagcaggttacagaagaacctaagcgaatgcggcgatttttcaagccgacacgggagtttaatgccccctgaatccacatccataattttgaaagaaataatgacggctctcacacaaccaaatattggcctacttgggctgtatggatcgagtaatgcgaacacggaaaacgcagtggagaaagtcaccaggagagttgagagggacgggctgtttaatgtggttgtgaagacatgcgtgatgaaaaagccagatttgaaaagaattcaaggagaacttgggaacgcattgggtctacaactccatcagaaaactctagtggaaagagctacccgtttgtgtgagaggattaagatggaggacaacatccttatcatccttcatgatcttcaagctcaaatcaacttggccaagattggaataccctttgggaatgaccacaagggttgtaaaatcttgttagtagctaagaataaagaggtgttgtcccacaaaatgaaaacccaaatagaatttgctgtggacgaggagccgtcaagttctggtctaacgaggagccatcaagttcaaactcgtggagtaattgtatggatcaaaaggtggtggtgtcctgtccagtgaactaaaaactagaataatattttctgcagacgccactaacgagattgtggagtttatattttaagttaaaacttgtggaataattttgtggattttatttag

SEQ ID NO: 26941 - DNA, 285 bp, Glycine max
  Clone ID: PAT_MRT3847_124327C.1
attcaaggtagggctaggaattgagcatcctcaagaactaataaacaacatacagtgacaagctgaaacaataaccttgtcctaaatctggagctgaagttcctttgaactttctagttttcctttctggcactaaataccagagagccttctttatggaatccgaaacctctaaatttaaatgatcttcacgttgcagaattgaccgtcagagaaaaccttgccttctcagcatgagtccatggagttggagctcgttatgacttgctagcggaattgccaaaa

SEQ ID NO: 26942 - DNA, 522 bp, Glycine max
  Clone ID: PAT_MRT3847_124328C.1
gttccaaggaaggtttcccgtcatcactgtatgacgtcctcctatctttgggggggggggggggggggggggggggggggggggggggggggagggaaattaaaaagacacaaggaccggtgaggtggcccaaggagatagataaacgttagggataatccctaagcgtgcaaaaaaggaggcaccctaaagcaatgctagagaggtgaagataagctataacaaggttagaccagggtgatccaaatttttgcgaggggggaaaataaattgcctgagaggccaaagacaagcccagaatcggtgaacggtaagaaggggagaccatatccttaaagtagtggacccccgcgaaaggcgcccaaggccaggccccaaggccaaaagcggcaaaatttcctgggagtaaagggccccgcaaggggaccaagaccggggtgcaaaaaaagtgtccctggaaaaaagcatgggcctggaaccagaaccggaataaggccaaaacccggaacgagcccgggaaaa

SEQ ID NO: 26943 - DNA, 401 bp, Glycine max
  Clone ID: PAT_MRT3847_124329C.1
ggacagggacgggtaaatgcccacaataaacatgttgcaaattacaatggagttcgggagggccttacatttttttgccatgcgggaaatccgttttaaaacaaaaggggggaaaagggaaaaattttcccttccgaaattttaacaaataaaaataaaatttgggcagttttgcaggaaatgttttttttgaatttacgggagccctttcaatgactactacatgcggatgcaataaaaaagttttttttaaaaggggactatttaactccgccttggaaaaaaaacttttgaaaaaaaattttttttccaccacggggttggcttggagcctttttaaaaaaattttagggaacttcccttttttttttgaaggcccaaaaaccttaacaatttctttt

SEQ ID NO: 26944 - DNA, 368 bp, Glycine max
  unsure (1)..(368): unsure at all n locations
  Clone ID: PAT_MRT3847_12432C.1
ttttcttttttnnngacaacccattccacattatttctcgtataaattgatcttttgattacatccaacacaaattatataccaaaaaatttaacgaaataaacaagaaaatcacttcacatgtcaaactaacactaaattcaaatcacttaaaaagcaacttttccaaccaaaaaccagacaactttaccattcttttcaaaatgcttttataatccacatatattaccccaaatcgaactttaaaaccatccttccattcaaaaatgaccaaaaataaccatgcctaataaccctttaaattctcaccatacttgatcactttaaaaacgaatttaaaattaccatcataatatttaacccttata

SEQ ID NO: 26945 - DNA, 939 bp, Glycine max
  Clone ID: PAT_MRT3847_124330C.1
tcggctcggagctgacttattgaccttaccttccacagtgtcagtgaacaacctctctctcacctacctacccactcaaatgcttgtattatcttcatttgtataaaaccaaagacctctcaatccatcatttgtctccagctcatgagaagtgcatcatagttagaagcaaacccacccttttcatccaattttgattatagatggaaaaccagcccccatcatcaaaggcttctgaagtagatgccccccttcaatcaattggttttgagattcaagaattgtctccacaaagggtatctggccatctacctgttactcaaaagtgctgtcagccattcaaggtgttgcatggaggggtatcagcattggtggcagagtctctggcaagcataggagcacacatggctagtggataccaaagagtggctgggattcaactcagcatcaaccatttgaaaagtgctgtgcttggtgacttggtctatgctgaagccatccctttaaatgttggcaaaaccattcaggtatgggaggtgagaatatggaagcttgatccttctaacaaacaaaagaaaactctagtatcatcatcaagggttactctactgtgcaacatgcctgtcccagataatgcaaaagacgctggagacaaactcaggaagcatgcaaggctatgaatgaagttgtttaatttacatatgcataagcaaaacttttcttgtaatctgaaacacaacaaggaaaggattgttgggtggtataaaaagcaacactaatgcttcaaaatgtacacaatggtcataatttgttgtttaaatggaaagacaacttcttgtaattataaacggatcgagataagatatacattgaagaggaaaaagccaacaccacccaaattccaatacatatgacatctctattttgtttttcttgtac

SEQ ID NO: 26946 - DNA, 1116 bp, Glycine max
  Clone ID: PAT_MRT3847_124331C.1
accacacaaagtacacttctttctcctgaatgggctacctcgacagctccttcgccttccattaccggatctataggcggacgcgtggggtttcatcaatttcggtccatttacccttaaactttccaagtttcggatttgaatctgaatctctctacatgcgatgacgtcaacgtcttcttcagcgcctcattatagttctctcccctcgccctcatcatctaactccactaactactatttcgtcacacgccccgcgacaaccacgcgctcctctttcgccacgcgtcgaccatgggaagaggtgttcgcgctctactccttcacgcgcccttactcgatcggggaagcgacgatgcgcgtgaggcgcaacctcgaccacttccgcgtgaactacttcatgatggtgctgttcgttttgttcctgagcctcctctggcacccagtctcgatcatcgtgtacttggtggcgctggtggcgtggttcttcctctacttcttccgcgacgagcccgtggtggtgttcggcaacgtggtggatgatagggtggtggcggcggttctagcggcggcgacagtcttgggattggtgctcagcggcgtgtgggtgaacgtggtgggttcggggatcgttggcgttggggttgtggtgttgcacgctgcgtttaggagcacggaggatttgtacgtggatgaacacgatggagggttgctttcgttcgttgggggcacccctacgaaacgaacgggagggtacacactaatataataggtcacccatttgtgtgatactgttacattattactacattacatttattttatgaaatattaatcggcaacgccaatcagtgcccaaaagatcaaggatattggttaagaaattttttcaatatttttattgaaagataaaaaattatattgtttataattttttataatttatagtataaatattttttctttttaatttcaatattctaatatatcactctaacatatcatgatcttttttttacatttgggaacaggggaagggaataaatgttcatgcattcttaatgtgatgatttttcttacatttgggaacagggtgagggaataaatgcccatgca

SEQ ID NO: 26947 - DNA, 200 bp, Glycine max
  Clone ID: PAT_MRT3847_124332C.1
cactaacaacgtcttgggctattggcaacctttactttggggacacagattaaattaatccactgtaactagggtatgttgtttatgatggcatctagcttcttcaggtagtcctaggtccatgcacatgccattggtgcaaacgcttcatccctgactcacataaatctatgacgacatataccgaaaggagaggaagt

SEQ ID NO: 26948 - DNA, 654 bp, Glycine max
  unsure (1)..(654): unsure at all n locations
  Clone ID: PAT_MRT3847_124333C.1
tgtttccgatttagatgagaaaaacaacaactactattcaaacaacaacaaagcagtggtatttgaggttttgagggaggacccttttggttcttcatagtggtgttttaggtgctatgccgtacttccactgtgtaagcacaaaatctgacaacaacaacagaatcttcatagattgtggggaacaaaaagggtacaataaccatagtgttgaaattgaagaatattttctgagttttttcaatcagagttgtgtgatgtagaaattggcactgatgtggtgatagctgatctgggtgttgctcaaatcactttttgtgatatgggttttgtgattttgaagtgtgatacttttgagttgagacattagttttggtggttaaagtttggtgactcttcttctccatcgcaagctttcatctttacttggggtctaagaattttggttgctattgttattgttagtatggtgtctaaagtttagagctttgatttgtttgagttgagtttgccacgtgacatgtcggcagcgtcgccgtcgccggcgacatcaacggctgcgccaccgctacaaacaccaccttcttccaacaatactagtccttcaccgtccaccgctaccactccaccgntgcaacaaacccctccttccac

SEQ ID NO: 26949 - DNA, 795 bp, Glycine max
  Clone ID: PAT_MRT3847_124334C.1
ggtacgcactgcaggtaaccgggtcccggaaactcccggagtcgactacgccgtccggcatgatgtgttttctgggtgtggttcacttcactgttgattcaggcacgctgtggtggaggaactagcggagtttggtgccacagtgtacacttgttccaggaatgaatcagagttgaatgcatgcttgaaggagtggagcagaagggattttcggtttctgggttggtttgtgatgcgtcttctccaccccaaagagagaaactcattcagcaagtggcaactgccttcaacggcaagctcaacatacttttgcttgcaaacaaacagcttgttaatgagataacatctcaaacgccgataaagcggatggcagaaacgcatgaagtttcatccttggtgactttcctttgtctgccagcagcatcctacatcactggacagattgtttctgttgatggaggattcactgctaatggatttcaacccagcatgagaatttcttaaagcaaaatggtcatttttattgttggattatgtgaataaagtggtggccacttgaaatttggaccatctatgatcaacttgttttgattggtcaatgaattattttagtattttagaaatttacattgtcatattcaacgacaataattgtgaaatgatgggtgatgttggaacacagaacacatttccctcacctctgagcatcgttcaacatatttcttactccctccatccctaatgcaagacattttttataaatttgttagtcctccttataaaaaaatttttttt

SEQ ID NO: 26950 - DNA, 450 bp, Glycine max
  Clone ID: PAT_MRT3847_124336C.1
aaacaaaaatagcttctgcatttatgttattgctaaacggggcctttgctgaatgaaacaagtttaaaagggggttccaaacacacagtaaccggttgtttgaattctttttagcaaaaacttccccccctccagcaaaaacaactcacgggagcttctgcctttctctgattttaacccaatttttttacatacaaatgttattaacaagtttccgaacacacaaaagggggtatggggaggatccctcccctctaaagaaaaccccctgggatctaacataaaagcaaatttttgcctccttgctaaaaaacgcagcttcatggggtaaatttttatacaaccctaaaaaacaaaatcatttttgggaacccccccctggattatcatatggaattttaaggcattcccccccatattttgggcccctgctctaaaaatgcagggggc

SEQ ID NO: 26951 - DNA, 1792 bp, Glycine max
  Clone ID: PAT_MRT3847_124337C.1
aaacactctttttatctgaatactcttataatgctgaataccaatccttaaaacttaaaaggagcatgaatgtatgaacttcaaagcacaagattatgcattgatattttagaacatggtatgaagactagagggatgaaggtggtgacaggatcaacaaaatagaagaatactatctgcatgcatagaatttactaatgaccaatcagttaacttctccattctcattcaactcaattttaattagtcaacataattaaccaatcttcatagtgagaaaatgactagtccttggaaaaggaaataaaacagggtaaaagagaattacaggttccacaagtgaagttatggtataccagggtgcaacaccgttgctccttatatcgtcttttgcccattcacaagcaaaatatttggtaagctgatcaatagcagctgaagaaaacagcatgatgaatctctttggtcaatatctttcaaaatagtttgtaatctatgtttgaaccggagatgacataattttacatcaactcacctttagttgcagcataagcttgtctgaccttcaacagaggaaatgaacacaatacttccatttccagatgctttaagaagaggataagcaagttggctcagatggtatgcagagtccaagttagttgccattaattttgaatattcttcggctgtatactcaattgttggtttcctcacatttgttccaacattgtttacaagtatgttgagcttgccgttgaaggcagttgccacttgctgaatgagtttctctctttggggtggagaagacgcatcacaaaccaacccagaaaccgaaaatcccttctgctccactccttcaagcatgcattcaactctgattcataagtcaaacttagatttatgtttatttaaaaattatttagctgattgattttaactttatatgtttttttttaaaaaaagaaacaaccaatgacaaaaatcagttcagttaaaaaagccaaattaaatcaattctgaaccgttttaactagtttgatttttaatccaaacagtccaattgttttaaaaaatcaatttgaaatcaaactaatttgaaaaatcaattttgaattgaattgattttaaattgggtttaaactagtttcaagaactgatcgatttttgaattttttttaaaataaaaaatggatttggttaacctaatcgattttgtaaaaataattcaatcaaccaaatcacttttatacaacagtgcagttctttgtttttgaattagttcagatgaaaactaatttgattttagtgtagttacaaaccggtttggtctaaactggttttttttcataccctgcttacaatcatatatgcttatccataataagagagtgccatgatttaggtttgttcatgtggtagataataatactgagcttgactttcagtcataaactatagatttacctaatcctatacaagggcatgcattaaaaataatcacgttttgaaccaatttcttgatggagtttttcttttaatcaataaagaagcaactatttttcaaatgcaattcattcccaaggaattttaattaatcatgtggcacattcacatgagtaggtaattaattaggaagccacaaaattacaaaaccctattatagctagtcacgggggagattcattacaatttacaattgccatcacgtgcatgtaaagattgtagaagcccctattcttacttcccctttgtcaaattgaaagaactactattttatctttaaaaaggtttc

SEQ ID NO: 26952 - DNA, 363 bp, Glycine max
  Clone ID: PAT_MRT3847_124338C.1
accacgcgttccgcgcgaaactgtctttactactgactcacacaaccttgctctgtgcgagcctactgattcagccaataccgaagggcgtcaagtggagaagcactacctttcttcatcgggacctatacgcctgcatgctgatcctgactgcaatagcagaaactaatgaattgcaaaccacagggggacccatctgcaaagagatgatgaccctactcactgagaacaagaaaaggcagagctctataatgcagatagcactaccagagatagatacccggcacagcatagctactatcatatagctgacaggagggcgaaggattatgcacacagtctgctacacaagtggaccaaaaa

SEQ ID NO: 26953 - DNA, 376 bp, Glycine max
  Clone ID: PAT_MRT3847_124339C.1
catggagcccgtcgaaaggagtttgtctgataccaagatcgatatcagtaccgcccatgaaggtgttctggtgggtggggctactacgatgccctacgttcaacagttgttgcaagacgtcttccacggaaaagatctttgccaactattaacactgattacgctgatggttaaggagctagctggcatgcatgttattgttagttgcaaggggaatgagaaacatcagcatattcacttgctgcatgttagtcctctataaactggtcggaagactgccggaggagtcatgactgtgatgattcccagaggcggatgcattcgcagcacgaatgagcacgtgttttgaatctattatgacgaaccgcgtggtgtg

SEQ ID NO: 26954 - DNA, 588 bp, Glycine max
  Clone ID: PAT_MRT3847_12433C.1
ccacgcgtccgagtagatgtacacattgttgcaaacccttctgctgagggtggaagatacgatgagggagctgctgatgcaggtgcaaaggttgatgacattgtggacacattcagacttcatgagcaacccgcattcaataagaagcaggctgataccttcatgaataggttcatgaggaatttgactcgaaagctcgatgcataccaacaggagttgtttaataagcacatagagggagcaactaaatacctgctgtttaagattaaagatgtccaatttttagctgacgagagcatgggtgatgatgctagcttgatctttgcctactacaaggacagcgcttatgatccaacattcctgtactttgcatataccttaaaggacgacaagtgctaagtgacttaatgtaccgagctatgtactcatattatatagatttcatgctacgttctgacctaagttacttgaaactatgacctgggattttgattctaatggagacacgtgtgctactgctacattataattcccatcaaatttaattatggaagcgatagaattacaaaaaaaaaaaaaaaagcccgt

SEQ ID NO: 26955 - DNA, 137 bp, Glycine max
  unsure (1)..(137): unsure at all n locations
  Clone ID: PAT_MRT3847_124340C.1
caagtgcttcttctaattgtgcccaantttntntcctcttctcaccacataacaacataacncaacttcttcccagttcccacattttaccaacttaatatggcttcctttgttcttgggactactttccttccact

SEQ ID NO: 26956 - DNA, 388 bp, Glycine max
  Clone ID: PAT_MRT3847_124341C.1
ctttgcggctcgagccatcactgtacaaaatgtcaatgttcgcaagcacgccccaagagaatgtcgagaaatcgttcttagcgttctacgaggggtggcttgcgcgtcaagagaatttgctgaaacagcttctcagcgtggcgcgcaatggtcctctctcactaccagcaatttatggaagagaaatccaacgtggcaaacgacgacgtttaccttctcttttctccaccctggctttccgcgtacgaaagggctctcctctggattggggactacaagccctctctaattcaccgtttagtagacggcgccgtgaaggggttaacggcggaccatagggggagggtggagagaacgagggacaagacgaagagggcggagagggagc

SEQ ID NO: 26957 - DNA, 610 bp, Glycine max
  unsure (1)..(610): unsure at all n locations
  Clone ID: PAT_MRT3847_124342C.1
caacctgatggcannnnacacgggatggacaagtaaagctgactgacattaacatattgggcaaggacaaagagttattacattaacaaaaattcatggtattacatggggatattattacatcaatatgttaatgtcgtcaacagcaataatgatacagggtaaaactgatcgatgttagtatttagtgataactagaactgtagtgacttcataacttaactaagcctaagacatttagcaaatgtcttgaatcattcaggggacagagtgctataagcagcaattgtcactgtcaccctgctgaatgcaaattaactggttccacatactgagatctacgtcttcttttggcttcgggggacttcatggcactcacctttccaagctttacagaaaacttgcaatttgttggtggtgacaccccagttgatccatatctagaagacgagggagacttttctcttacagttttgttcttgtcaccttttgtggagggtttttttgttggagactttgctctcttttttggcaaacgaagctgtgcattgtcgccttccttactgctttgcttaaggagcctaacatgaaagggatcaacggatgtgca

SEQ ID NO: 26958 - DNA, 474 bp, Glycine max
  Clone ID: PAT_MRT3847_124343C.1
gctcagagataaactgtatgggtttctgcggcggatgaagcaaccaaatggtggattcaggtttgatatcctatacatctctgtgacttcaattaacattaagaaattataccaatatcacatatccattttatttgtatttgataaatataaatattcattaattttttataaataatggataactttgttgtggtaatgcttacaagtccatctatttgcacactggttgcgcatgcatcaatcacaccaatgaagcatgacgggttttgatttgcttgtgtttgttgagccagttggacagaaattaatccaccaccatacacaaatctgaagggtgtgacttcaagtgctgtgttaaaagcatttctaaatgtgatttattctcattgttgttgacacatgtagaattgatttgggaaaccatctttttctaatccattctttctttttccatcatcaactacttttatt

SEQ ID NO: 26959 - DNA, 441 bp, Glycine max
  Clone ID: PAT_MRT3847_124344C.1
tcggttgctcggccgaactgaaaccgtacagacccgtagaaaccactccgggctgtgcttcctacattcattgtggacgtcactgattaccaattgtgatcgtggacactgctgcttctgatcggggttaatctctccattcattaacttatcatcacactgctccctactggtgatattgttggatgctctagagagactaggaccgaaacgaggaggatactctagctttcgagcctatagatgctcacatcatttgactggattgccctcctttcgctcgcagggtgcagttcgagacgctagcaggagtggttagcaaaatctatttcagatgagcagctctcactgaagctggacaaagtccgccgtgtgaccctgaaaccgaaaaaacactaccatgctgattcattgaaacaattccctaaaaaagcttacatc

SEQ ID NO: 26960 - DNA, 273 bp, Glycine max
  Clone ID: PAT_MRT3847_124345C.1
ggctcgagctccaattctttcttctttgatctcttttctaactatctgtgctgatctgccaccaaggacaggcacattaacgacgcctgtgtccagcgtgactaactagaaagacgaagatgacccatagcacactacggtcttgatctccgagatctcggcaggtgagccgtagtctgtagaagcacctaaatctgtcagcgagaactccacgctcacttgcacgcgtatgtggcgcctcatttgtaggccacaatgcacagcctacgcatc

SEQ ID NO: 26961 - DNA, 217 bp, Glycine max
  Clone ID: PAT_MRT3847_124346C.1
taccagtgggaacaacttgccttgcaatttgttagacaggggtgaacttattatcattggcaacgttggtgactctcgtgctgtggtagcctacacatcagatgatgggaagttgggaccagttcaactgacagtagatttccaagcccatttacctcaggaagcagagagaatacttgaatccaatggacgagttttctgcttagacgacgaagcc

SEQ ID NO: 26962 - DNA, 328 bp, Glycine max
  unsure (1)..(328): unsure at all n locations
  Clone ID: PAT_MRT3847_124347C.1
tctctctatatatattatttctatttctccacnccctncccanaaaaagtgtagttcttattttaaagcacgcgccccnctcccttccttctactttaattaccctccacaacaaataaacgatcttcatcaattattccttttcccttcattcttacctcttttttcaaaaaaccacctctaccttctgtttctgataccttattttatcctttcaatcttccctttttcatttttccctacttctttcaattttcttttttatatattttcacttaattttttagacaattaattttttttcaaattttttacttatcattatttt

SEQ ID NO: 26963 - DNA, 168 bp, Glycine max
  Clone ID: PAT_MRT3847_124348C.1
ttataggaaaagtactaggttgggaaccgtgagttctattatcgctgcataatagagcagcacggatgttcgatattagctacgacacatgaagaaaaagctatctaaatagagactgcgtatgtaatacaatctgaagtatgatatcgtaagaaaggaaattttttt

SEQ ID NO: 26964 - DNA, 177 bp, Glycine max
  Clone ID: PAT_MRT3847_124349C.1
atactacttttaaacattttaactcatccttcatacctaccgataatgatcactccccacaggaccagcaaactccttcctcacaaactgcttcaaactacaacacctccttccacaaccaaattcccaatcttaaacaccacaatttcaaaatcaacatcctcctataccaccctc

SEQ ID NO: 26965 - DNA, 490 bp, Glycine max
  Clone ID: PAT_MRT3847_12434C.1
aggcgtgcgaacacgtgcgagagggctcccataggggacacaagcaagttctatatagttcactgacatatattgaactatcttcaatttcacaacatgaagaaagtggctgacacatttgtcgctctgctaattgaatctgcccttacagcgaccgcttcatatgctaagccccagtcgcaacaaattcaacaccagacgactacaattgttcacacgtgatgacatacttgtttgtttcatgcgtgaattacctcattggcggagatgctgtaacttcaggagattgttgccaacgtgtgaatgcagtgaatgcatcttcacacacgcaaagtctacgcgtggccgcatgaatgtgctattacaacgtagcaactagacttactttgtcgcatcgagacagggcacggacactgtctatagcgtgtgcatgagagatggattttatcatgagcgcgaacaccgattgagtcaacgtgaccgagagctc

SEQ ID NO: 26966 - DNA, 203 bp, Glycine max
  Clone ID: PAT_MRT3847_124350C.1
accactcttgggttaccaccaccactggggtctacctctccaccgccatcgacaattcctttgttgttaccacccgcaaaacctcctcctcttcctttaaacgactatcgctggaagaaatggcgaatcgccgcgagaaggggctctgcttcaactgcgacgagaagttcactcgagggcacagatgctcctcaaagttcttc

SEQ ID NO: 26967 - DNA, 360 bp, Glycine max
  Clone ID: PAT_MRT3847_124351C.1
tgtgttttttacccacttccaaaaagaaaagccgatgggtgtttcactacagtcttatcccctttaaggttttggattttgacccaacctttgacgtatcgaaaccttaacttatggatcaaggctgaacaatctcattgatagaaccttttgtcttacagagccaagttttatgtctcaattagacgatcaaattactactgcctttgatccttttgctgatgcaaatgctgatgactcagctgctgcctcaaatgaaaatataacatattcacctacatcagcctaattgaatgaaaatcctgacaaccactcatgcattgaaaaaagaatttagctataacatgatacttaaagatg

SEQ ID NO: 26968 - DNA, 257 bp, Glycine max
  Clone ID: PAT_MRT3847_124352C.1
tctcgagccgaatcggctcgagacggctgcgagaagacgacagaagggtacggctgcgagaagacgacagaagggacctacaggacagaagcttttgaaaatcaacatcattctcaagtgaggtcctgaacctaccagcagaagctgaaccaaatgaatcatgcaatgcactgtctaccttatcaaaatgaaaaaaaaaagaaaaaaaaaaaaaaaaatggggccgccgaataggttactctcatgcccgggaatta

SEQ ID NO: 26969 - DNA, 336 bp, Glycine max
  Clone ID: PAT_MRT3847_124353C.1
gacgccatgcgcacgggtttacgttcgtgcatgcgattggttcgaaccgaagtctacggtgtgttgtttgtgatcgttcgttcagtatgtttttttttttcgaaccgtttgtcgttgttgctgttgatgattttgttagtttgatttgtctggcggcggtggcaaaatgcggcaggtaggtgggtgcggaaatcggtcgaagctcgatgtggaatgaaaatgatgacgaaccaatcttcttcttccttccttctttcttttgcttgtctctctatcggctcttctcatttggtcgaaaaaaaatacatgtgcgtgtgtgttgttctgtgtgtgatg

SEQ ID NO: 26970 - DNA, 406 bp, Glycine max
  Clone ID: PAT_MRT3847_124354C.1
acatgaccttttttttttttttttttttgttttgcttttccccgggccacaaaacctgcaggctaacaacacccccaaaaaaaaaagaaccaacaaaagatccaccggaggcgactcccaccgccaaggaccctcaaagaaaggcaccgcatctcactccctccgccagacttaaacgcaggcggaatccagagccaccggaatttctacacaaataccgagacaatgccccctgcgggatgggaaaccacgatcccacccaaaacagaaggcaagaagtcggcaccgccccgcaatacaaaaggggaagaattgactgaagaagttttgggaaactctaaaaaaacacttaccctgggggacaatgacgcccgggaggaagacaccccttcagaacgggaagaaa

SEQ ID NO: 26971 - DNA, 363 bp, Glycine max
  Clone ID: PAT_MRT3847_124355C.1
gtttctcatcatagccactggggaactcccaaattctttatctgtattatttgcaaaggtcagaatcttaacctggttcttggtattggaattgattcatgattaccctaccatgaataggatttttagacattttagatcttgtctttttatatactcaatcaaataaattcaattgtttcacaaggaactgccaaaagcctcagtgatactatagttaatcccaaaccgcaaatatgttagttaagtactcattcatttccttataattgctttcctgtgttgttggacatttcaagaagaattttatcatcacttttattcccttcctctaactgataatgtccgccgagtagttttgtg

SEQ ID NO: 26972 - DNA, 332 bp, Glycine max
  Clone ID: PAT_MRT3847_124356C.1
cttttcttgttggaccgagatcacaggttgccccaccttaaaaccggaaacaaatgcaatcgttacttgattacatgaatttcttaatttgttactcctccttggtgtacgatcttttaagggaaagaaatttactctttgtgctggccacagacttcttgactcatttttttttccactcttggtttatatgctgaacactctcctattagatatacgatttcgtgtcagacttaaactactcctgtctctttatcaatactctgttttatttcaagttcaagctggagaaatcttggattagtgataccactttttttattctggatagg

SEQ ID NO: 26973 - DNA, 465 bp, Glycine max
  Clone ID: PAT_MRT3847_124357C.1
taaacacagaaaggtatatagtttccaattgtcaaaataccgaaaaagatagatagaacctcacactgcacaaatgataacactgcgtactctctccatcactttgatcagcaacataagaaactgcaagaccaaggatgaaactagaaagtaaagcatcacaattactatctcataacttagtattttctttcaatgtgtaacccttgtgtgtgtgtctcactctgattctttcaccacacaaaaatgcaaaaaaaaaaaaaaaacaaaaaacactcaaggggtgtagccttgttcttcctgctgcttctcgtactcttccatggtgtcaaactcatttggatactgactcttctcatagtaaccttcgttttcagtagtcctccctctccctgattcgtacccattaaggttataattctcattaacactattcacatgatagtagtaatttctattctccag

SEQ ID NO: 26974 - DNA, 820 bp, Glycine max
  unsure (1)..(820): unsure at all n locations
  Clone ID: PAT_MRT3847_124358C.1
cccactttgccttgagcccgacttaaaaagtccagctgctccgcactactgttatagcctattaccaccgcacaaacaacactcctaacactcactcacacttcagcctgcacaacaacatgtctcagttttccacctccaaacgctgaataaaaaaaaaggaatcacagaaacagagtatccacagcgtatagtcccaaaatgcatctggatcaacatgaccccaaaacgacaacaagagcaacaaaagtcctccctctgttcctctacttgttcttcttcttcagcctcgcctcttcggctcctcccatgctcccctccgacgcagtatcgttagtgtcgtttaagcgtgaagcggaccaagacaacaagctcctctactccctcaacgaaagctacgactactgccagtggcagggcgtgaagtgcgcgcagggcagagtggtccgctttgtggcccagtccatgggcctgcgcggcccattcccaccgcacagcctcacgagcctggaccagctccgagtcctcagcctccgcaacaactccctcttcgggcccatccccgatctaagcccactcgtgaacctcaagtcactcttcctcgaccacaacaacttctctggctccttccctccctcccttatcttcctccaccgnctcctcactctctccctctcccacaaccgcctctccggtcccctccccgtaaacctcacccttctcgaccgcctcatcgcgcttcgtctcaactccaaccacttctncggcacgcttnnctttcttaaccagaccaccttaaaagtcctcgacctatcctaca

SEQ ID NO: 26975 - DNA, 396 bp, Glycine max
  Clone ID: PAT_MRT3847_124359C.1
tcctctatagcgggcgctcgcgatctacaaacgaaaatcatcatcaacaacctaacacccgtgctgcgtgggtccacccgtgaatcctataccaggacctgcaggcgcaccacttttcactttcatgagtaacctcacaactctggactttacacggtcattgttagatactgtgacatgccgtcatccgacatcagagacacagatgatacaatctcgcatccatcaagagtaatacctgtaagtaccgaatgagtgatcttactcgcaataaatgcgtacaagctaactgccggcgcatcactgtctaaacgtgttgcgcagacagcttatgagcaccttgcatcactcaccgatagggactttgcaaacagtgctccaggacgggtcacgttt

SEQ ID NO: 26976 - DNA, 1542 bp, Glycine max
  Clone ID: PAT_MRT3847_12435C.1
tgttctagtaagagttgaagtagccgacaatagattcagagattccattttgaaagagtttgttgatatccaaaatcgtctgaaatcagttaaaaataaatgtgaagaggctggttgttctcttttaaactcatcaaaacatgacgaggaagatttttgggaggagggtaatgttgtatctatggaaatctcatctagtgcaaccaacaataaaaataaacatcttgacgtggcatcaacttcccataaaatgagtaatgataatcttggtttgcacaataaagagtctaatgattctggtacggacaccctgcttcatcgaggacgtgaagttgagccaaactctccaaggagtaaacttcaagccgaagctcctgtggtacgatggagttcttacttggataactggggttcaaacacggtttttatggctaatcagcggggtttggagcttgaaagtcactggggtagggtggacaacgatgcagttattccagcagataaaattgccgaattgaatgttcatgcaatgccttatgaagaaaaggaaattgagatccaaccatgcttggctcctttgaggaaaggaggattatgtcagagaagagatctgaaagtttgtccatttcatggggctatcatgctaaccagcggttgtagggagggaaagtcactggggtagggtggacaatgatgcagttattccagctgataaaattgccgaattgaatgttcacgcaatgccttatgaagaaaagcaaattgagatccaaccatgcctgactcctttgaggaaaggaggattatgtcagagaagagatctgaaagtttgtccatttcatggtcctatcattccgcgagatgatgaagggaggccactcaatcagaattcttcagaagacatgaatatggatttaaagactgatagagtagcgcacttccaaaaacaagcagagaaaaatgttcgtgaaagtgcgaaagaagttgcaatcaaaagagaaattgataaacagttgctgaaacgtgcaaagcaagctaaagttcgggaacacaatgatgctgttttacgggatgctgctttggcttctacttcaagatcagccacacttggagaagatggggaggcaactaatgaagataaactgtctgccagagataagaagcaaagtctcgcttccatgctgcgaaagaaagtaacatctaaagatagaatagctcagaaacttttaagttcacgggcaagggttactgcagataggcagcatgtgtcatgtgaagatgccaaatatagagaagccttcccaaatcaatggtgaactgagtatactcttttttgagcttgtctgattactccgaagtcttaacaatacttcagagtcaactgtattttgggtaaaaccttgcctgtgagtcatgaggctgattagtcgaattgagtatgccagattacaatttcacttggatttgttatcctcatgtgctttgctgcatggcttcttctctgtgggctgtctcactaggtggcagggaagcagtaaaaaa

SEQ ID NO: 26977 - DNA, 490 bp, Glycine max
  Clone ID: PAT_MRT3847_124360C.1
actataatgtgtgtcaagaattaccacactaagcctttatttgtaatgaacaaataggatcagtattgattacataggatcaatctaataatgaataataaggactaaatcacttattaatatctaatcataaataacaagataatatgtaatcttaacactcgccctcaagctcgagcatatacgtcatacaaatcgagcttgatacaaatgtgatcaacctgatagaaactaaaggcagttcactagagatgcatcacacgtcttgtgtgtgaacttcacgcgtgtgacagtgttttgagttggtggtgttggatttgtcagagggagacgcttctggtcgtttgggcacgagggcgaaaaggcagcgcagtggcagtgtaatagtgctcgcagcagttgcggtactgttcaagcaacaaagggggctgtggctgaggaaagaggaaaaaaaacaaaagtgaaccgaaacaatttggcacgtcacgac

SEQ ID NO: 26978 - DNA, 634 bp, Glycine max
  Clone ID: PAT_MRT3847_124361C.1
aggggaaaaagccctaaattatggacattttattttttaagaattaaggaacgaatatattacttgccttaattttttccctacagagatgcagatgcttatctcgcagtatttagatgacaatacaagaaaaatcactaatttgaatggttatgggatccattccttacaaccacacattatagttttggtcactggtgagctattctgtacatatacaaactcactcaagtgacacgtgtaaagtatattaaaccaaaatttaaggaaaaagaagaagaaaaaactgagggtaatatcaagagtacatgtgaccaaataagattaatccttttgactgttgtttctgctatttctacctctctaatccttgtttgcaaagagggcaacatgatgtaatttttagccattgatccacacattttaggtggaacatatgggaacagggcaattgtctaacttcctctttgtctttgtacttggctaagcagatacagcattcctgtaagcagatcagaacataacaaatctatcaattcaatagaaattgaaatatgtcaaatcttaaaatgaatggaacttaaaagcatacatccaaattgagggtaaaaaatgcccaactacattactagct

SEQ ID NO: 26979 - DNA, 119 bp, Glycine max
  Clone ID: PAT_MRT3847_124362C.1
gtaaagctttttataacataaatacacattgtagaaattaaacttgtttgtttatctaattaaccaagaccacagagcagcacgcctggaattgagcattaattggagaccatgtaaaa

SEQ ID NO: 26980 - DNA, 456 bp, Glycine max
  Clone ID: PAT_MRT3847_124363C.1
aatacacatcacggcaactcatgtctaatggtgcactaatcactctctgacaccatcttcatgatagggattccagttcagaacgactcaggcactagttccactctttaatcctacacactcctacctgcttatcctgcgcatcttacacctagatccttcccatcactccttcactatcctattccagtggcaaagaaccatgacttgcaacagctaacgcgaacaggatgacctccataacgctgctgaaagtgcacgaccctatgttgtaaaaaatccatcatggaatgatgccaattatcatgcttctcatactgcaaaccaaggcactcagcctgttaaacctcagcccatcgcagtttctaatatatcatcagatgaactgaaagcagttacggataactctagtcaagattctctgattgtacagggatcctatggaagagtatatta

SEQ ID NO: 26981 - DNA, 227 bp, Glycine max
  Clone ID: PAT_MRT3847_124364C.1
caatgtacactttatggtcttacaacgctcgtcctcctattcatatcgttcggcaactgtgcatcgttccaccgttagtcttgtcatatcactccagctgcccacggatacgtgatacgatgacaactcctacggcattcggtgagtcgtccatctcgaacgttcgaacttgtacctgcattacatctgtcacgttgaagctcggcatgtcgatctggtgcgtacta

SEQ ID NO: 26982 - DNA, 438 bp, Glycine max
  Clone ID: PAT_MRT3847_124365C.1
ggctcgagctcgagccgattcggatcgttcaaggtcattagaaaggagccaaattcttgtacatggaaaacctcccagttactcattcaaccaatcttacgaaggaaccagagacaggggcgaagccgatcaacggaatggaaattcagatgatcaaccaaatgacttcccaacagtggatacaagacgatagggcaccatgagttttgtatgatacgctgcgcacagaggccttagccttgaggaaagtcgttgacgataaagaacagagtctaactgataaagacgacgccattgataggctgatatacaaagtagatacactgaccaaagccatggaggtggaggcatacataattagaaaagaagtggcgtgcatggagaacgaggtagctgccatgcgtgttgtaaaagaacaagacagacgagctcagcgtt

SEQ ID NO: 26983 - DNA, 251 bp, Glycine max
  Clone ID: PAT_MRT3847_124366C.1
gtacatttttatttttatctttttttttttgcagacgagcaatctcaaatgattacaaagagcatttcacgaaggaccggccatggattcaacttgatactttctcacgtaatcgccgatagttcttcttccaccagagacgctcgcgtttgttacactttacccatccctggcgctcctcaactctttttgacacaaagagtggacaaccgtgctgacctcagtgattttgagatatgtaacagatacaa

SEQ ID NO: 26984 - DNA, 432 bp, Glycine max
  Clone ID: PAT_MRT3847_124367C.1
acggctgcgagaagacgacagaagggatgttattcctgatttactatgagtgtgatgaaatgagtaggaacattaatatgaacgaagatgttgtaggagaatttagataactactgatttgctatgagtgtgatgaaattagtaggagcatagtatgaatgctaagctatgaatctggaagaatattagtataatatatgatggtggaagagtaataatattagttgagttttagttcagctgaagttttagtaaattttctctcgagattattacctggaatttttttattattattgattgggttcttatgaggccacattctataatttggcgcttggcttaagggatggttgtcgttgcttaccttgttgccctcatattcttgccttttcaggttggtgtccatgtctcaattcaattattcttatt

SEQ ID NO: 26985 - DNA, 516 bp, Glycine max
  Clone ID: PAT_MRT3847_124368C.1
cacaattgccattaatttaggctaacaaaagattacagtgggtattttcacaaacaaagaaatattacaaccagattagcatgtggattttctattagattgtgtgcaccggtgatgtcacggaatagatcggatttactctaataaacctaattagagctcagttacctatgccgccagtagaattggcaagaggaattgaagaggaatcacaaaatggaaaccagagacctcgttcctataccattaactgtgccactccattggaggacaaagatcaaatgccttgtgaacaataaagctgacgaatgttgcctgaagcatataaccagtccttgaagcacacatgaagcgcagatgacacatctcgatggcgactattttctaaaggggcttctacaaagaggagccttatctcccctaaattttttgattcttatgctgagataccatatagggatatggaaacatgaatggggtgccttttgtagccccagaggactctcctacaaacca

SEQ ID NO: 26986 - DNA, 414 bp, Glycine max
  Clone ID: PAT_MRT3847_124369C.1
gggaaaaaaacccccaaaggggggaaatttggaatttagggccccaatgggtaaaggttccctcaaaaaaaaggggggggaaccccccccatttttttaggggccctaaaaaaaaaaaccccttggctaaaaaaagggcaaaaaaagccccggggatacaaaaaccagggggggaaaaattggtcatgaaactaaaccgtaggaaaaggggggggcctttccgggacaaattaaggggggcctgggcctgggggggggttttttccttggcagggccaaaaaagggccttaaggggggggtttaaatccgggtaaaaaaggttgggggcccccaggggggccccatgggacttttaaaggcccaccaaagggaagggggggggaatctaaaaaatttcaggatcaacacccaaa

SEQ ID NO: 26987 - DNA, 583 bp, Glycine max
  Clone ID: PAT_MRT3847_12436C.1
tattgactcaacaaaaatttattatcggtcagagaagttgattcagggtttcctcgaaagatgataacatagttagcagatgaggagtgccaatctcaaacaaaatccccttgtattccagaggatgaaccttccctgtcttcagtgtcttgtgtcaatataaacaaaaattctaaaaaagaaatagaagagagaatcaacaccaaatttctcggatagcaggtttctttcttctttttttttttatgcattctggtcaatggtgtttggcaggtgtctgatctgatatcatgatccgcaggatcaaccttgaatgatctatccaccaacttcagacatatcatgaaatacaggacttgaataaaggcaatggttagttagccttcacccacccacttgaaatgcagtgtaaaacctccttagtagttaatatgtatggttgcatttcaattataccaatattcatccagattgtctacaatataccagccgtgaagatatctattctgcgtttgcaggggctcctgacaatcatttaacactcgttgctggatatgacacatttatcaccagctcctcgtgc

SEQ ID NO: 26988 - DNA, 809 bp, Glycine max
  unsure (1)..(809): unsure at all n locations
  Clone ID: PAT_MRT3847_124370C.1
ccacgcgtccgttcttcatactcttctcttctctcttctcccctataataatataataatattaccaacacaacacaacactcacaaaaacagcagacaagtagccagaacaagaaatcctttgacacattaatcactttctttaaggaaactaattaacatgggaggaaggggtncacatggggtggttcctcttctgttgttgttcttcttctctccttttttttgttgcttcttcttcttctgtgtcacccagaagaaacttgcccatcatagcctttgaggatggctacacacccttgtttggtgaccataatttggccatccatagagatggcaaatcagttcacctttcacttgatgaaagaacaggttttcattttttcttcttcttatatgatgcctttatttttattttattttatattttattttgagttgtgattacaggttctggatttgggtgtgatgacctttaccttnncgggtntttgagggggtgggtggggggggctgggggttgcgctgggtgggggggcggggccgggggggcgcgcggcggngggggcgcggggcgggggggggggggggggngnggggnggggggggggggnnggggggggggggggggggggggggggggggggggggggcnggggcggggggggggggggggggggngggggcggggggggggggnggggggggngggggggggggggnngggggggnnggggggcggcgngggggggggggggggcggggggggggggggggggggggggggggcgggggggggggnggggggg

SEQ ID NO: 26989 - DNA, 368 bp, Glycine max
  Clone ID: PAT_MRT3847_124371C.1
tcggtttttctgtcctacggaaacttagtcccgtcattttgaggcctacgttaaattcaccatctttctcaccccacaccactgacgccccctctcactccttttaaatcccgcatttgcattcgtatttcccaacttcccggcgccgttatgtggtggtgaatcacgtgacatttgaaaccagatctgcacccggacgtgccagacccgatggaggaagcgctcgagctcgcacgcgcgaaggacgcgaaggagcgcatggcgggcgtggcgcgcctccacgaggtgctggaagcttccagaaggagcctcagctccggtgaggccactcctctctgtccttgctgcctggacctcttgaaagacag

SEQ ID NO: 26990 - DNA, 494 bp, Glycine max
  Clone ID: PAT_MRT3847_124372C.1
caattatttatccttaagtaaaagatctcaaggatagaattagggacagagattgaagttgtcgcactccatagtaagccaattgatccacaagttatggttgattagttacacttatttagaggcaaaccaagacgatgcaaatgtacatgtgtatacgtttgattctgaactatagatgcttaggagtgtggttgttgttgatgttatgtatggaaaatgggggcaatattgaataattgatattttttgtatgaaacagaaatagaagatgatgcgagtttaactgaatggtgttggcaggatgttgaatatgattggtgaagatggagtggcattggaattaaacttgagattgagattgagattctaaattctagtatgaaatggaaaaaaaaaaaatagttttcttggctgacatgattgcacgtggcttatggatcaaaatataaattgggagccacaataacagaagccagaaaggccacacaaat

SEQ ID NO: 26991 - DNA, 485 bp, Glycine max
  Clone ID: PAT_MRT3847_124373C.1
gcgtcgggaacattgatagatttttataacaattatgtgaggacagatagatcttatggttttagagcattgatggtaatggaggatcattcactcttattagtacaacaaggagaaattgtctggagtagagaggatggtcttgcatcagttgtagatgtaacaacgtcagaactacctgtggaaaaggaaggtgtatctgtggcgaaagtggaacagaacctctttgaatggcttaagggacatgtgctgaagctcaaaggaactttaatgattgcaagcgctgaggatgtagtagctattcaagcgctgaggttaaggagttctgagaaaagcaaatgactcgtgatcataatggttttcgtaagttgcttatagtacttacaagggcaggaaaggtttttgctttgcacactggagatgggcgtgtagtttggtctattctacttcatactctgcgtaaaacagaatgtgtgaacatccga

SEQ ID NO: 26992 - DNA, 551 bp, Glycine max
  Clone ID: PAT_MRT3847_124374C.1
ttttttttttttttttttttttttttttttttttttttttttttttttttttgttttttttttttttttttttttttttttttttttttttttttttttttttttttttttttcggaaaaaaaaaaaaagggacttttttttttaaaaaaaaattttatatcaaggggtgtcacttgggaaaaaaaacacaggggaaacccacccctaaaaaaaaccccgggggggccatttaaaaaaaaaaacccccaaactttaaaattaaaagatcacctaaggccccaatacgggggcaaagatggccccttttgagactttccttattaaaaccccctataaaaatttttaacccccctacaaagaaaccctctcggtcccgggggaaatattttttttacccgcctttgggcggccccctgaaaggggggaaaaaaacaagggggtgtttggggggggaaaatttggaacaccctatttttggggggggggaaaaaaatcaatttttagagggggaaaaaaaactctaaacagcggggggggggggggccccctg

SEQ ID NO: 26993 - DNA, 685 bp, Glycine max
  unsure (1)..(685): unsure at all n locations
  Clone ID: PAT_MRT3847_124375C.1
gtaaaagagaagttggaaagtgtttcaatattccagtggtggtttagagtggctgtgcagctcagcttaatcttgctcggtgcctgttatagaagcgtttcgacgtctcctcccccagtcaagctgaataccgaaaatcctcaccaggtggtgattgacaacggcatcatttctctcaatttgtcaaatcccgagggcgatatcattggaatatataatggaattaaaaatgtacttgaggcaaaaaataaagaagacgatagagggtacttggacgttgtttggaatgaaccaggaaaacatggcatgtttcagagaatccgtgggacagatttctcagtcattgcagcaaacgagaatatagtggagatttcatttttaagaacatggacagcttccatgaaaggctcaagtgtccccatgaacatagacaaaaggtatatattgcgaagaggtgattatgggttttattcatacgcaatatttaatcgaccttcaggattacctgcagtggagattgatcaaattaggattgttttcaaactcgacgaaaccaggttccactacatggccatatccgatactaggcaaaggaacatgccatctgtgagagatagagcatcgggtcaacccctggcgtatcctgnaagctgntctcttaaccaattcatctgagcaacaattt

SEQ ID NO: 26994 - DNA, 590 bp, Glycine max
  unsure (1)..(590): unsure at all n locations
  Clone ID: PAT_MRT3847_124376C.1
tcgatctatcgctagaaatgtaccagataccgtacactagccagtgagtttgaatgttacgacgccagttcaacttactggtactgtgcactcgacaagttaaagttgcaattgtaataattgctcctagtattagtgctgccaggagtaatacgagtattttgcgaagttctcgtcagtatctttctgtttatagtacgcgtaggtgaataaatgaatagggctataaaatatcttaaaaccacgcaacagtgaaataactaagtgcgcgcgcggttcttagcaatcaacaataatacgcgtgctggtgtactgtactggtgtctggtgccttttttaaaccacgcaactgagtcgatcctatgctccctggtacccttcagctagtatggtgttaagtcatccgcgatacacgcccaagttggctactttggacagtctgtaacatttctgttcgtagtccttgtagcagtattcttgcatataatanacgtgttcagaatccacgtaaaagtctgcatttaactcctcctagctgtgtgtactaggcccaatttggtcttcatctttgtcttaatcttttggtgttt

SEQ ID NO: 26995 - DNA, 247 bp, Glycine max
  Clone ID: PAT_MRT3847_124377C.1
ttcaggtattattactatgaattcttggccacacacacactatcttaaatttttcggtgtatatacatcataagataaatgttagtcatactatttttaatattctttattattgactaaatttttttagaaattttaaatttaatgaatttcattttttatttaattactccctcgatttagaggtagaacccacaaacatatgtgattttcaatcaatttcattcaataacagatagtgttaaaa

SEQ ID NO: 26996 - DNA, 428 bp, Glycine max
  Clone ID: PAT_MRT3847_124378C.1
gggttgactcagcattcgcttattgataaatgtgatcgggtatggaataatggtaataatgaaaacatgtggctgattacttacaatttcgcaggcatatatcaaatacaacaaaactgaaggattggaaatagaactacaagaatcagaacttttccctagcgggaaaagcttttctacacctgcactctattattaattactaatgcatgctaaaatctattgcgagaaagaacaggccatgtgtgaagggcaaccgcaagtgtacttatctaggaagccgcatctgtgagtgaggaattgaagtacctaccctattaaaaatatcgcacacatgatgaacagtgttatgaaaatgattaagaatcacttaatgaatcatatccaccgggtttgaatgtaaatgatctttctttttattaataaaa

SEQ ID NO: 26997 - DNA, 536 bp, Glycine max
  Clone ID: PAT_MRT3847_124379C.1
gtaagagtaaattatatcacttccaattagagcaaaatctttgtttatcattgagcaatgggttcatagtttgtttctacatatgttaagagttaccctacaccacttgaactccttcccagttacctatcgtttgtatgtgaaagattattttacaagttgcaataacgttataaatttaaatataatattccacattaataaagagattaaacaataacttcaagaatcatggaacgggcaaaatctcagctccaaattcccagctagtaccttgggcaagtttgagacgagggtcatcacagggttcatcagtatagccaaagttaccaaaccatgaaatgatcatcatcaggacttactattccctttttagtcaatctcctttggcaataacaacaaaaacatcaccaagggaccattttcttggcactgacttttctgaagggttgataatagctcgatcttggttagccaggcgatagccgataacaatctcctttcttgtacgacccctaatcattatattgtaaaag

SEQ ID NO: 26998 - DNA, 800 bp, Glycine max
  unsure (1)..(800): unsure at all n locations
  Clone ID: PAT_MRT3847_12437C.1
agtcattttaatctcagtttttatgtatcagttctttaaattttagttatttaaatttcagcaccttgagttgtttgcttgtaccaaaagcatgtttgaacagtgaactaattgaatatgatatccaggcgtccgttttgcatgagatgagtgtttgagaatgatttgaatgagtaattgtatgatttgaatggattggaatgattagataattgttttgatcaagcttgtagccattagaagagaatgagcatgtgattagaagtatgactgaaaatgtaagtcagtttgtcagattgattgtgaaggaatgcattaactgtatcccgatgagagtgtgatccttaaattttgagagaaacaactatcatttaatactgaattttgcatgaatctttgaagtatggactgaatgcatgaaattgaggatgatgaaggccatgtttgattgtgatggctacttagccaaaaagctgaccatgtgcttgaatgaattatcccttgtacccagtttgagctgaatgaatagattgattgaaccctgagcctatacaatattatctcctgctaccttgacttangttgtaagagagcatcatccacaggaagcgtggttcaaagcaaatttgtcccaaatttgggggaggcactgggtaaaaatggaaagtggtcaaagtaaacaccatacacacactatttcagtacatacacataatgtctctgtatatatggtattaaaaaaaactgtatgatgggaagctttcttgtggagcttctatggagggctggatctttgagca

SEQ ID NO: 26999 - DNA, 751 bp, Glycine max
  Clone ID: PAT_MRT3847_124380C.1
aaaaattccaacacaagttctatactaaagtgcagagagcatgagctagcatctatatatgctatgatagacttaaggaaagtgtgtctggtcattgtgttgtacatgcatacagatagtatgaggagcgcactggtatggatttttaccttgaacgtttgccttcacattttatttattcctggtggtgactcaaagccgcatccgcgtttcagagagaaaatcactgaggattacaatcgcggatttataagcattgactgtggagcaagtaacgattacttggacgaggaaacaagtacattttataagacagacacagatttcatagaaacgggagaaaacttgttggcgtcttcccaatttattgacataaatatccctggttttggaagacaactacgcacattgagaagcttccctgagggaaataggaactgttatactctgaagcccgagtataagcaaggtgaacagcaaagttatctgattcgggctatgttcggatatggaaactacgatggaaaaaatcatccccctacgttcgatctctatcttggggtctactactggataaatggtaacccggcaaaatattcctatctttggaccgagattattcatgctcccacaacatacaccatacaagtgtgtcaggttaatattgacactggtacacctttgatttcgtgattatacctacgaccttgaagcactttcgtgtaccatatcatgtcacaatcatatctac

SEQ ID NO: 27000 - DNA, 414 bp, Glycine max
  Clone ID: PAT_MRT3847_124381C.1
cggttttagtagaacgttcccatgttcccaaacctgctcaacaccaacccccgtcccctccaaagctcaaccgtgcggtcaccaccaacctcttgcgcgccgacaccgtcaccaccaaattctaagattacatggggttaatgatgatgcgcatcaaagcactcccttcccagaatcttgtttgattcgtgaagagagacagggagagggagagagaaccaaaacaaagaggggaaagtagatcgcgtgaacaaatgaagaagaatcaagcgttgatttttcatatttgcttctagattttcttgtttggttgggattaatttctaagttttgattttgggtttttaatcattcattttgagattccattgtgggttgattgtttgattgagattaattgattctggtttttga

SEQ ID NO: 27001 - DNA, 484 bp, Glycine max
  unsure (1)..(484): unsure at all n locations
  Clone ID: PAT_MRT3847_124382C.1
ttttntttttttttttttggttacaacataacaaacttaattaaatatttcctcgtngggttttaatattnaaanatatacaccctcctacataatttaaattctctaatatccacacctaaaaaacctttaaacttttacattcaactaccttaacatctnnnnnntgcaacaacatccattaccttaaacttaatttgtaataatccacattaaactccaaaaaattttcctccaacttatatttcccctataacaatttaacctttaaccaaccactattttatccttctttccctttcataaacaattaccaaacatctttacaatttttttttgccataaaccattaatattcgtctccctaaattaatccaccttaacttcaaattctaattaacttatataatattttttcttcaacatttatccaatttaaataattttttaatccctcttttaaaccataacaatctcttaaaaa

SEQ ID NO: 27002 - DNA, 229 bp, Glycine max
  unsure (1)..(229): unsure at all n locations
  Clone ID: PAT_MRT3847_124383C.1
accgagnaccaccaacaaaggaggcggangacaagcggaccaagcaacagcagaaaggagaccccgcagcgggaaaaacaagccgaccccaaagagacgcacaggacccacacaaagagagcgacaaaaccaccacgggaggcgacacgaaaacacgcaccgaggagcacgaggggaagacacagaaacaacagagccgggaaaccgccggacaagaacaagggacgac

SEQ ID NO: 27003 - DNA, 240 bp, Glycine max
  Clone ID: PAT_MRT3847_124384C.1
cccacgcgtacgaccgctgctacgaagacacatcaggggacatctcagttcagatgtcacacaaccagagacagagtattcatacatattagcagtctcgtactctcgcatggagatttcggcgtctcaaattgtctctgtgtagctagctaggatttcgatgatattcagtttgttgagcgaacgagtttggatggggatcataatatgcagttcatggtgtacaccatttcgggtcct

SEQ ID NO: 27004 - DNA, 350 bp, Glycine max
  Clone ID: PAT_MRT3847_124385C.1
gtagcccattcatgttcatttttatcagaccccaaaccgcatgctgaaagagagaacttttttctaaaggccggataccccgatcatgtttctaagacgttcaacatccgataccaaaatatgtggttttactcggaaaaaactctcggaagacagcacccccatcaacactattagacaaccataagggctaggcttgcgctcaaagccccccaaaatatgtagaccccttttgaaaattatttaccgcaagcttgtgaacccacgatcggtccctagaaccccaaggaatgtaacactctgctccaaatccccaatggttttttgggcactctgttcaaccctggatg

SEQ ID NO: 27005 - DNA, 694 bp, Glycine max
  unsure (1)..(694): unsure at all n locations
  Clone ID: PAT_MRT3847_124386C.1
ggaataggaagggctatgggtctacttaaaatttctaaattggggagcccaggaactcttatacagtactttatattctttaaaaaaaaaaaaattgctgccaattttgtttgtttcattacaaagacacgcaatcttcaggttgtcaagggctatatgacattcttgaagattaataacgagtatacaaggccttatcatctatccacgcaggcttctttgcattgtaatagaaaaatgcaatcatctgaaccagctcatccgcagttcggagttctttctccctgtacacgaccctgtgaccccttaaaaataaaatttgaggacattctctaactttcagggcataagccaaatctctctcaatattgatatctatcttaaccgcccggggaggcaaccgatctttagctctccaatatacctttattgctttctctagctctttcaaaattttccagttatcaaatgccctgttatagcgttcaaagacaaggacaattaaagggctgggatggaaagcaaaactctcccactccaaacagttgatctcttgcacccagttgtcatcaatccccccttcccagtcaatttcatacccatctttctccaccacattcttgattggatgctgctcaaatactcgnaagctcttattccccacccacatctgcatccaaaggccagcttttac

SEQ ID NO: 27006 - DNA, 182 bp, Glycine max
  unsure (1)..(182): unsure at all n locations
  Clone ID: PAT_MRT3847_124387C.1
ttttaagtgttaatagtgtgtgnttttttttttntttgtgaaaaaacaaaaagtgcaaancatgggtnagaaaattgttttagaagaaattgtcttcaaggttcccgaaacgattggggggggcgttaacaactggggcgtcaccggaaaccctgctacgaagaagatgggtcagaagtgct

SEQ ID NO: 27007 - DNA, 372 bp, Glycine max
  Clone ID: PAT_MRT3847_124388C.1
gggacacatggaatgtgtcaatttatggggaatccaggtatgaaagactccgaacacaccttgctttttaacattacagttttaatgtgcacagtgacgtttaccctttacataacacatacacaaaatagaggaacctagccttaaaggctaacccgacacacagaaattgggcattggtgcgatatgaggccctcgaaccatgggtgcgaataggggtgctgttggcaaaaacagggatgttgcattagcaatgcttgggcatgccactggtggtccaacgttatcatcgagggaaggatccaccttattggcatcgaaccgaactgggtaccctttgacgattacccagaacgacgagagctagatgtg

SEQ ID NO: 27008 - DNA, 690 bp, Glycine max
  unsure (1)..(690): unsure at all n locations
  Clone ID: PAT_MRT3847_124389C.1
ccacgcgtccggaaccagaaatgctggtgttgcacgtggcaaagctgtgatggtggttgaagatgaaataaatgctggttacatatccattgctatgcttttgggtctcttgaagcaacccctttatttgaggagcatagctcatcttgagcagttgctaaatttactggatgttatcattgatagtgctggaagcatgcctagttcatctgataaatctcagatatctactgaggcagttgtgggtccacaaatttctgcaatggaggtagatgcgaatattgattcagctacatcttctgctcttgacgcatctcctcaagtcaatgaatcctccaaacccacacctcacagtaataaggaatgtcaggctcagcaagtattgtgtgatctgccgcaggcagaacttcagctcctttgctcattgcttgctcaagaaggtttgtcagataatgcatatgngtcttgtctgcggaggtaatgaaaaaactagtggccattgctccgattcactgtcagcctctttgtcactcatctggcagaagcagttcgaanattgacttcatctgcaatggatgagttacgcactttcagtgaagcaatganagctcttctcagtacaacatcttctgatggcgctgcatttntaaagagctttgcaggccttaagttccctggtaatctcattga

SEQ ID NO: 27009 - DNA, 909 bp, Glycine max
  Clone ID: PAT_MRT3847_12438C.1
attaacattctcaaaagaataatctctctctctctctcatttgacatggctgcttccaactcgaccctccactcacccaccactcccaacaccaccttcgtccaagccaacccttccaacttccgcgccgtcgtccagaagctcaccggcgcctccgatgacccctccgcccataaactccccctcactctccccacgcgcctcgcggcagcgcagtcccaccgccccgcctccgccggcgaggtgatcggccccaagaagccgaacttcaagctccacgagcgccgcaacgccgccgccaagaggctggagctccccatcgacacagccatgagcatgatgatgatgagcgtctcgcccacgtcctcgctggttcgaagcagaacaacgacgacaacgttggtagcttcgccggtttctccactggagttgtttctggcgcgtgctagcccacgcacgccgcacgaggaggaagaagagagagcgatagcggagaaagggttctacttgcacccttcccctcgagcttctcaacctcctgagcttttgccactcttccctttgcattctcccactcacaaccacaaccacaatcacaccaccaattcaccatcaattcctaattaattaacccttttgtgagcttttttttcttcttaattttactggtgctatgaattaattaattatttgccacttttatgtttatttaattattatttatgtttaatcaactgattagtataaatgattaatgtgctgaagatatatgtttgtatttcaatttcgatagaaataattgttgagcagattttagttatgtttggattgaatcttaaattagttgaaattttttcttgtgatgaaacagtggcttaagacaagaaaaaaaatattatttatgttttg

SEQ ID NO: 27010 - DNA, 243 bp, Glycine max
  Clone ID: PAT_MRT3847_124390C.1
aagatatggtcttcctccattgcttatgtttttttctcatctaagacacccacggatggagattcatggatggaatctttcataactccatattgctttaacaagcaccatgcgtataccatatttaatcccgtgctcacaaaatactgcctacctaggcagaatccaaggctgtttttgaatatcaacgtagccgtcttacaacctacaaacacctaaaaacatccaaaaaaaattggattc

SEQ ID NO: 27011 - DNA, 205 bp, Glycine max
  Clone ID: PAT_MRT3847_124391C.1
tgatcttctccttaagcctcaactggtgactaagaccgcactttttattgcggcatttcacattcctaggatgcccacggacatatcacttgaggcacatcatcttgtcctggcttgcttttgcgagccaagccatgagggaaggctcaatgacgccaccacgaatcctgttgacgagatctactatcgagcttttttgaatatg

SEQ ID NO: 27012 - DNA, 727 bp, Glycine max
  Clone ID: PAT_MRT3847_124392C.1
gtctttcgctgtcatcctcatttaccttcagattggatgcgcgttaattggatcgctgggagcatcgtacaatggcgtgttccccacgcgtccgcccacgcgtccggttcgctttggtcgcaattgagagtagcagtcagagccttggccgcacctacgcttttcttctcttttgtgccatcttgctcgacatttcttggttcattcttttcgccaacgaaatttgtaaatttacttttcatgtaccgttgtggactatgttgttgagaccaagtgactgagtgcgtgtttgaattagcatccgtcatccgcgattgatcaaattttcacgtcaagatgcaccaaaaacaactaaaagttgcttctgtgatccacgtttgagtttggtggatgtgaatccaaacacactatgagttttggcttgcttgtgtaatgattcttgcccctaaggaaggggaattgactatgatgttgtctttatcttgtattatatgtgaccttaggttatataaaaagtgcaaatatggattgtgacaaaatttacatagagttccttaggtgtttttggtgttgttgtttaattagaattgaagtttcagctcaataatgtatgttagtctttaatgtaaacttttgttacacggatgtaaccctaattttgattggaagagagtgctaaaagcacctatagagcttcatctaaggaaaaaaaaaaaaaaaagggcgg

SEQ ID NO: 27013 - DNA, 384 bp, Glycine max
  Clone ID: PAT_MRT3847_124393C.1
ctagattgaggttccagatgcatgggtctgatgggttgcaattgtgatttcacttcatccaacacacagacatcactcactttctttcttcttatggggaaaaagaaaaactgaagctaaggaaaacaaccgagtgttgacaatggcactgtcgtgtctcactctcactgccaacccttcttccgttatctgcaaatgcaaagtgtcccttcccaccgtcccccacgcgctcgacgccacctacattcgacgcgctgcccacctcgccgacaaatacgccggcttcacctccccccaccccaacttcggctgcgtcatcgtttccccctccggcaaagtctccggcgagggctacctctacgcccagggcaccactgccgccga

SEQ ID NO: 27014 - DNA, 408 bp, Glycine max
  Clone ID: PAT_MRT3847_124394C.1
tcgcagaattaagccatcaacaccaacttgttttttaattcggaacaataaacggttaactttccaaatcctaattttggtttgggttgggttaaattttgtccgaaaacatggttttaaggccaatggtacggttttctaaattttcttcctttttcctccgggttttttcttttctaatccttactcgacgttcaacatgtggtgcaaagtggtaattggttagcactgttaagaaacagttatggaggtaaagccgcgtacgcaacctcaacagcaccaaagatgaaagcgtatgcagctgcggctgattacggacacaagcaacaacatgggaagtcggccaaacgggactttgtggcaatttacgtggcgattgggatgatagctctgtccacagggctgggt

SEQ ID NO: 27015 - DNA, 270 bp, Glycine max
  Clone ID: PAT_MRT3847_124395C.1
acgttatgaactttctagaaatcctttgtgaacggctagcagccgtgaaaggcgcacagtggaaagagggcgaccttattgtactaattgtacctagggcaagcgagcatagtggcggaccgatcccgcgactgttacagggggaaggcctatagggttggagacgtgatctaataccagtcgtgggaaggaaccagacatggattcaaggttccagcttgtgagtgccactaccaatggtgattattggtagggaaaagagctctgaat

SEQ ID NO: 27016 - DNA, 2086 bp, Glycine max
  Clone ID: PAT_MRT3847_124396C.1
gccgctcgaggcggcgggccggagaatcctaaaaagctttttccacaatgttgggttgagccttttgaatggggtcgttaactttatgaacattgaaggcatgaaagggtattatcataagcacaccaatgggcgaaactgaggagtcgacaaggacaacatgtacgcggccataccactttttgtggttggaatttaaaaccgaaacaatattagatccagcatccagctaatgtgtttctaccgttacaacttagttctactgcatcatctaatctttttttattttattttgtcggttctgcatcatcatctccttttatacgagagaaggaatcatctattctacactcgaagattaagcaagcaatggctattacaccttcgaattcttcaattctcctctccctttttctattggccatcgccctctccctcgctgagtcccaatctttcatcggagtaaactacggccaggtcgccgacaaccttccggcgccggaggacacggccagcctcctcaaatccaccaccatcggaaaagtccgtctctacggcgccgatcccgccatcatcaaggccctcgccaactccggcatcggaatcgtcatcggcgcctccaacggcgacattgcgagtctcgccggcgatcccaacgcggccactcagtgggtgaacgcgaacgtcttgccctactacccggcgagcaacatcactctcatcaccgtcggaaacgagattttgaccttagccgaccagggtctactgtctcagctcgtcccggcgatgcgaaatgtccaaaatgccctcggcgcggcctcgctcggtggcaagatcagggtctcgacggtgcactcgatggccgtgttgactcagtcggacccgccgtcgtccgggttgttcaacccggcgctgcaagacacgctgaaacagctgctggcgcttctgaaggacaacaaatcgccgttcacgatcaacccgtacccgttcttcgcttaccagagcgacccaagatccgaaacgctggcgttttgcctcttccagcccaactcgggccgggtcgactcaggcaacgggaagctttacacgaacatgttcgatgctcaggttgatgctgtacattctgctttgagtgccatggggttccaggacgtggagattgtggttgctgagactggatggccctcacgtggcgacagtaacgaagtgggaccaagtgttgaaaatgcaaaggcctataacgggaacctgattgctcatcttagatcattggttgggacacctttgatgcctgggaagtctgtggacacttacatttttgcactctatgatgaggatctaaaaccaggcccaggatctgaacgtgcatttggtatgttcaaaactgatcgcaccgtgttgtacgatgttggattaaccaagtctagccagcagacttcaacaactccggtaactccagcaccaaacactgctggatggtgtgtagcgaaagctggagtttctgatgctcagttgcaggccaacattgactacgcctgtagccaaggtatagattgcgggccaattcagccaggaggctcttgttttgagcctaacacaatagcatcccatgctgcatttgccatgaatctctactatcaaacttctggcaaaaatcaatggaactgtgatttctctcaatcagcaacactcacatcccaaaatccaagttacaatgcttgcatttacactggtgggagcacctgaaaacagaggctttagcttgatgatgttaactaataaattttgtggatagagaggtgtatctttagaattaaattaatgaataagggcttatactctgccctctttttagttatatataggctttcgattttatatagctttaactgtagaggcattccgattctggttgtgtatgatatccactttttagtgtggcaatccacaattgttttctttaattttacgattccaatccctcccattttttaaatgttaaatattctttcggccccaaaaaaaaaaaaaaaaaaaaaaaaaaaaaaccgcccgctagaaaggaagcaagcgtacgcgtgcgtgc

SEQ ID NO: 27017 - DNA, 453 bp, Glycine max
  Clone ID: PAT_MRT3847_124397C.1
gatggagtaatggctgtggtgccacaaccaataatgattatgagattttaccatgaattttatggcattaaattcagtcatcagggtagttttaccatgaatttgtcagaaacacaatatcactaaagtgcccaagacttcacacctcgcaaaacacatggtgtagccttgtgctttgcagagaaaacctcaatactcaaggaaggctcatatcctatggaagcattgctccctaaggaagcctaacttcctttgccctagaaaactgtacttctaggggaattgaattatacttgtgtattgtccaatactttcaaaatttggggtatccccatttctgggtccgttttgtatcgtatttgcttattattttgtttctctttaaatttacactcttccagatgaagaaattgatctattgactatgttatttccttaaatgtaacattcatt

SEQ ID NO: 27018 - DNA, 280 bp, Glycine max
  unsure (1)..(280): unsure at all n locations
  Clone ID: PAT_MRT3847_124398C.1
ccaaatatagaatgcaggccgactctgcganntngtgtgatcgagatataaatcacacctaccaataatttaatataaacactaaccctctcccatcaatagcaagtctgactacctcttccncagcgaggtattaatccaccttccctcccaagccaccaccgatctctacttccctcccaataatgccnccaaccaaccttcttttagccacgccaccgccctgctcaagctgcaaaaagtctaccgtacccaccttgcacgctggccgactcccccg

SEQ ID NO: 27019 - DNA, 718 bp, Glycine max
  Clone ID: PAT_MRT3847_124399C.1
ttctcactgaaaaggttggctggcaggatgaggccatatacgctatcaatcgaaccgtgtctcgttgtagatccggtgctggaaagcttagtagtggttcacatgttagagcagacatatggcttgcttttcttggaccagataggcttggaaaaagaaaaattgcatcagcacttgctgagattttatttggaaacaaacaaagcctaatcactgtggatttgagctcccaagaccggtgttacccatcatactctatttttgaattccaaaattcatattgtcatgatgtgcttatgaggaagacagtgttggactatattgctggggagttgagtaaaaagccgcactcggtcgtctttcttgaaaatgtggatcaagctgatttcctggtgcagaatagtttgttccatgcaataaaaacaggtaaattcccatactcacacggaagggaaatcagcatcaacaatgcaatgtttattgtaacctctagtgtgtttaaaagtagtggctcttttaacttggaggaggatcctaaaatgtttccagaggaaagaatcctagaagctaaaagatgtcaaatgcaattatcacttggacatgcttctgaggtgccaaaaggagcggttgcacaaatgtgaaggttgcacagagaaaagggacatccaaaacaacatttctgaataaaagaaagctaatagaaaagtggtgatttaaa

SEQ ID NO: 27020 - DNA, 403 bp, Glycine max
  Clone ID: PAT_MRT3847_12439C.1
attagaaacaagtttttattgtttaaaaaaaaaaaacaagttttctcttattttttaaaagggccattagtttttttcccccaccggagagcagtacatcatctcctcgaataccagaaattcgatgtcacaatgccattgactgaaataaagcttcttatattttgccggaaaggctatagaaggggcaatactaaaacaaataaaaaacaatttaatgaaaataaatggatcaatcaataataaggctgaccagagaaacatgtacaacaaaagacataatttagtgcatgctgtatacggttaaggcagtaagtaaacaatatgtctctatgatttcttaaaaaaaacttcaaatgtcgaacctctcaaataaataattgaattttatttgaaatttcta

SEQ ID NO: 27021 - DNA, 462 bp, Glycine max
  Clone ID: PAT_MRT3847_1243C.1
cccacgcgtccgtacggctgcaagacgacagaaggggattgggagaaaagtaataatattgggggtttgcttctgctgcattcttctgcgcttcccaaaaacaatgcagtcctgccccttccctgatactaaccccctctctctctctctctctcttagaacattttcttttttgtttttaattttgatttcattgcttagatctccttcaatttcaattatatttgttaattgtttgttctgttactcttttgtttgatgataagtttataaccctaacctaatttcgcgctttgtaacctaatcacaggtactcttttgtttgttcctggtcttctgcaattctttcatacgtttctgtcactgttcttcatatgagaagagtaatgttttggaggggaaagtgaaaattttgttactttattatgaatgtgtggaagagaaaagcatcacatatcaatc

SEQ ID NO: 27022 - DNA, 669 bp, Glycine max
  unsure (1)..(669): unsure at all n locations
  Clone ID: PAT_MRT3847_124400C.1
ctgcaattaatggacgaggatgaaaagagaggatttgaattatnnngtacaatctcaatgttgcatggttcgtctatacaatggaagcttatatatataatgattgaatccaaaatttaatccatcttcaaatacacacgaaccaaccaattaactattctaaatgaaacattatgtgttgatcctagagatcaatgataattcctgtcatcgcaatgataaaccttgaatgccgttgtctttaaaagaaactgtcgactacggctagttactggttaattagtctctttgtctatgagatctttccaataagcatcgcttacttcctcatacatgaaatctccccacatttcaaagttggttgaagtggaagaagaagggtcggagcactcatttggcattaccttgttttccatttgcatgagtacatgagtggaacattcaggtgaagctgaaactagatttggaagagaattgaacggtgttgaagaagaataagggacatcaagttgttcatcacccttttcaggtttcatgcaactactatcaatgcttcctccatccatatgctgattcccagttggtagaacttgctgctgatgagggggttnnnngnnnnngagatttggctgattctgnnctgaatagccattataaaggttttgaagc

SEQ ID NO: 27023 - DNA, 623 bp, Glycine max
  Clone ID: PAT_MRT3847_124401C.1
ggtttggcaaaggtaaaaagaagtcaacgggaaggagatggcagcagggtactattataaggtatgaagtgccatacagtgagcatagcagctttacagaactcaaagagtttgtaagagttgtatctcctgataacattataccaagtgtgaataatgatggaccagaatcttctgatgcaatgatttctctgttgttatcttgatttgttcaccaaaagggagtttagtctactgttgtgatgtgtgaatcttaaataaaggtttagtgaattttgccaaacttcttcgcatttaagggtgaaaagaagacaaattgaaaacactctagcagaagtgctcatcatacttataatccaatttctatttgggaattcaaggtgaattctcttatacgggagagctgaaaataggttgcattgaactaggttttactaggcttaggtctattgaaattaatttctctcactctcacatgatgaaaataagttgtgttcaagtaggttttgttaggcttgcatctgaccttaattaaaaatatatttattgtctcagtatgtttcgttcacttgtcagatacttattttaaaaatttgagtttgaattacataaaagtttgactt

SEQ ID NO: 27024 - DNA, 412 bp, Glycine max
  Clone ID: PAT_MRT3847_124402C.1
aattcaagcggccgctctatggggtgtgttagatcatttacctttgcaaagggacggggaagggatttattacatgatcgaaaacagaaaatgttgagaactattcaaaactcataagaattaccggaaggggccattgaacagcttgaaaaagtgccaagcccggttaatgaaagtcgaaaccgaatcagttcggtttcaggtgaatggctattctgagatccaactacataaatttaatttaattaattcaatttataccactttggatcaatgtgaaaattacctaaacgaagccattcatttttaacaataataactgattaatcaagatcggcaacaggttttacaacatgccttacagggagctttaggaactctttggagttgctggaacaacgagttacattta

SEQ ID NO: 27025 - DNA, 281 bp, Glycine max
  Clone ID: PAT_MRT3847_124403C.1
cctcgagccgatgcggctcaggggaaggccgtacttggcacacagcattctggtttgacacactcgaatatcactgaacgagagaagaaacattttagtacagaaaattaacatagtattctggttcgaaactaacaggtgctacccttttaagctatcagtttccttcaatttgtaggattgtgagttgcaagcagggacctcttgaatcttgatggacgttgaattagctgctaagagtgtttctaggagtgaggaattggatgatgatggcagaatca

SEQ ID NO: 27026 - DNA, 181 bp, Glycine max
  Clone ID: PAT_MRT3847_124404C.1
cgtacgaaacaaagtgagagttcagcggatattgctgacttgaaagaaatgtacagagaccaagtaaccttggtggttattaatacccagggcattggtttccttcattggttaccgcctagtttggccgaaaaaagtgctcccttggggaacggaatgttcactgttcattaactatttg

SEQ ID NO: 27027 - DNA, 1423 bp, Glycine max
  Clone ID: PAT_MRT3847_124405C.1
cggcgcccgcctcgtgcaaactttggaaaggatcgaggtgggatgagtcgatttgactctggtggtggtggtggtgggcgctgggatactggtcgtcgtggtggctttggtggtcgtggaggtggcatgagggatggcagttttggtggacgtggcagtggctttgggggacgtggtggcggcattagggatggtggttttggtggacgtggcggtggctttggtggtcgtggtggcatgagggatggaggtagtgggcaaggtgggcgaggtgatttctttcctggtaggggcaacaggggtaggggatccggtggccctcgtgggggtcatgttggttggggtaggggtgaacgtggtatggatgatcggtacaacatggaggggcgtggacaaggtcgtggacgtggaagatttgacaatagaagagatgtttcttccaaaggtagaggcagaagtcatagtcgtagccctgaaagagtccgaacatgggactatagcaaaagtagcagcagaagtcgtagcagaagtagaagcaggagttggagcaggggccgtagtcgaagccgcagctggtctcgtggtcgtagtcgcagctatagccgtagtattagtccacgtcgtagtcgtagccgtagccgtggtcgaagttacagccgcagtcgtagccgcagccccagttatgataggcgtgataggtcagatcaacaacttcctgatcaaaaggatatcagggcgcatgaagtaggaacttcagatccaagaatgcttcccgtgtcttctggtcttggcacacaagggaattcgtttttgggaactgaacaagtggagcagcaacctattgttagtagcactgatccaggtaatccagaagctgtagcagaccttagtcatcaatcagtttctgatatttagagccctgattcgattcttttttgaaaagacattctaactttttgtcttcagagtggactggtggttatgttaacctttccgcttttgtttaagtttggcttggctttaaatagtgattaccttgtggcaagaggttcattcaggggtattggtgtaagaaatttgagtgaacattctaatatgatatactgcagcattattgggtaacgcaggtggttaattttgatcaatttgtaatggctcatcaagcttgcttatttgccaagggaacatgcaaatgtctggttggttgaattggagggcattatttaatatttcatatgtagtattagttgtggaattgggataaacaattgtagcggaatcaattattgttttgtactcggctagagttctagtcacctgacattggggttattgtttaattttttgcctttcccgtttcttttcggctgttgctaacgagtgtagggcatttgtaaaagaatataaaaacgaactattgaat

SEQ ID NO: 27028 - DNA, 1256 bp, Glycine max
  Clone ID: PAT_MRT3847_124406C.1
aatccaaaatgtctcttatcaagcacataaaaaggttctggaggatatatacaaaaggtcaaaatgcatgggaattcagtttcatctcttggtttttggtgcaactgaaatggattttgagaagagtgacagtttcttcaaaattgacggtttctttgacgatttcttttcttgatagtgattgttgttaggttcttgagagccgttgagatttggctcacaacaatcttcatactcaaactcgctatcacccttcaaaagacggagtagttctaatgcataagcctttgccatatcacttcctttgttggagatgttgacaagagaaggaataatcccctcatacataaccaactgacagtattccacacgttgagagcataaggagagaagaataaccagcgcaggttctttttcctcatcactgccagtcccaagtatttcaacaacagaagatatgcatccttttgtttctacaacagtaaccctaccctcttcagtatcacaaaggtttttcaagatatgtatactgtctctcaaaagggttctgtcttcaaaaaatggcagtaattttgggatgcacccgagagacaccatgtagggacaaatttgaccattggatgaaaaattatacattattttaatagcttttcgttggaactcttcattacctgaatcaaggatctttgaaacagaagagagtacactgaaagctgcaatgttagttttttcataccaattccctgtcagttcttccattatggtgagagcttcaccaatcacttctgtatcaagaagactttccaacataatgcacgtatcttcacttaaattggtcataccatttctgcaacacttcataaattccaatagcaacttagttcctgctctcagagcttttacatcatgccgctcacacgcagtgctcagaaatctcgtgagtgggtcaatgaaattctcagatgacacacagcaaaaagcttggcaattgcatttgaaatccatttttatattttcaatgacttggcattgagattcccattgacgctcatggagtttagacaaatgcatccaatcagcatcatgtatccgtgcacgagattgatgcctgtgtgaattgtcactgctcttgttcaacatcaaatttaagctatgattggccttagtgtgggaggaatctgaattataattggtatctaatgatccaagagacatgttactaaaatccgttgggaagttcaaatcatacaaagaaa

SEQ ID NO: 27029 - DNA, 386 bp, Glycine max
  Clone ID: PAT_MRT3847_124407C.1
tttgttttcattggttttatatattaattttattttgtgtgtgtaggctctcctgtttaatggaagggaaacggcacaaaccttaactgatacggggcttacaggatatcaggttgaggatagccaacgaccgggagtgtacaatctctgacaactggtacaatgggcccgggggcagggcgggcccagcaactgagcgacatactatagcgctggcgtgagactaatgggcggggaactgactggaaacgtggccagtgaggagcgtgtatgaaactgcaatcgccccgtgagaggccccccggggacccaaagaatgggcgggtcggacgaataacctctgagggcggcaacaatgagagggctcgggggggacatggcaaaac

SEQ ID NO: 27030 - DNA, 257 bp, Glycine max
  Clone ID: PAT_MRT3847_124408C.1
gttttgtctgatttctaaaatgacagcggctagggggattatttagggaactcttttatcgaacaagcgcccactgttttactttggtccaacaacagtgatagggcatggatcctgaatatttaaaagcgatccgtgttctattgagatacatgtgagttatttgggggactgatcgtcgaacgcaggaggatcaagttgcagatgtatggtgaaatacatgacaacaatgtggttctgggacctcatgtgattga

SEQ ID NO: 27031 - DNA, 362 bp, Glycine max
  unsure (1)..(362): unsure at all n locations
  Clone ID: PAT_MRT3847_124409C.1
tctttcttttttttttttttttttgnggagctttttttaaaaacaaaactgtagcttgcacactgttgagcggaaaaatctgtcacgggcctgcccaaataaaacaagtggttcttgctaatttacctgcccatcgccacctgggactaccgtattgtaggttcattcccactagacggttgagggggctattttgataccctttggcaaagcatattctcgccaatttacgcgtggaatcttgttttgagacccagtcgctccttttttccacattgttctgaaaggccgggttttttgttgatccgtgtaccctctcactgtattcccacgccctctggtccgtgaaaagttgaggtacc

SEQ ID NO: 27032 - DNA, 473 bp, Glycine max
  Clone ID: PAT_MRT3847_12440C.1
acgcacgctcgcaattgcgctcgaggatgatcgcgagtcttcggtaactccgctggcctggctacccttgctgaggcagtacatccatgggttagctgcaatagcccgttggcgtgcaggctccaatgggcgctacaggctcaagcctcatattccacgcgtcggagtggccaaccggaatggcaccaatacaactgctactgctatccaaccgattgcccataacggttacagtgggaaatcgcagtgataacgccggagcacagactacagctactgcggaactctttgatgagacactgtacagcgtccacatcgcgcaggctgatctttatccaaggaccgcggctacaggatcgatcgcctgagatcacccttactgcataggctgctacgtcatcactcgctgccgcagatgattagatacagcgctgatcacacgcgcacgtaacactcgagatcgggaatatgca

SEQ ID NO: 27033 - DNA, 488 bp, Glycine max
  Clone ID: PAT_MRT3847_124410C.1
tacggctgcgagaagacgacagaagggtctcctcattgtcgtgtcgtgttgttaggcgaaacaacagaagccaaaataaattccttcaaacttgcagagaacttgtgagaaacactaataaagtatagagcgcaaaatagaaattaaaaacaaaatagagacataatttatttaacatgaaaaacccctcaatacaaaggtaaaaaccatatgtcatttagaccacataaattaactccactataataaataaaaatacaagagaacctccaacaagagcactaaaatatgctacaaacagtcaaatcaacatagaccacaattggtaccatagagacaagaaaataaaattcccagaatataaatgtgaaacacttatctttctctaaatatctttttcacaatccaacattttttccttctcaaatgaatctctcttagtgtatctcattttctaatgggatccctctccacttaaataagtgaga

SEQ ID NO: 27034 - DNA, 341 bp, Glycine max
  Clone ID: PAT_MRT3847_124411C.1
gcccacgtaagctcggaattcggctcgaggtcgtgatgcgcttgaccgactattccaccacactaccaacctgctcatctttctctatcattcgcgagccgatactctctcatccagtcaggcgaagctctgcataagctatgtatctcactccaaccacatatgctgatgctcaaaaggctccaaaatttgctgttatgaacaatataccactcacaaagcaatcattaaatacaaagaccaggctttgatctcaagatatacgaatcttatgtacttaaagttacccagaactcgtgcatctcattctgtaccgctttatttcaatacaacactggact

SEQ ID NO: 27035 - DNA, 335 bp, Glycine max
  Clone ID: PAT_MRT3847_124412C.1
gccgtgcctgcgatccacaatacaatcaccacaagggagagtttgttaacgacaacggacctcgccaagactgcttaagcatgcatacccctgaaaattcggttcgccataatccgttatacaccacatgctattatatctcttggatgcacgagcagtctcctctttatattaggaggatgggactgaagcgccaaactaatacaggaggatgtctttccgggcaagcagggcccccacatcatccacaccgtctaagtaacccaaaaactgaaggggtgtgagcgaacccttgttctgatcgataatcaactcaactgtcaacaggtaacaaa

SEQ ID NO: 27036 - DNA, 280 bp, Glycine max
  Clone ID: PAT_MRT3847_124413C.1
aggggacagtgcctcaggagctggcaatgctcattctttgacttaggggaggttggtaacaataggatttgaaaatctgaatgatccgagttcgtgtgcaggtaattgtaagtgtgtagctgtttctgagacatgggtgtctgcttaggctttgattacgttagtagtagataacaaactggctttgtgggtgtctgacagcagtacagcaccatgtgtatgtaagctggaggtggaaggtactggtgtgttacaagtagctgatcgaccttctcgtatg

SEQ ID NO: 27037 - DNA, 237 bp, Glycine max
  Clone ID: PAT_MRT3847_124414C.1
gtcttcactgctctcttcgcaacacaacaaagagggacaacacagagagaagcgtcttaataaacactcttctctgaaaaacctgattgctactcttcttctcttctctatcgcttcgaacttccatctcagtaaatgagagagtgcattttaatccacatctgtcacgccgctatacacgacttaaacgcctggtgggagctctactgtctccacacggtatttagcctgatgggc

SEQ ID NO: 27038 - DNA, 470 bp, Glycine max
  Clone ID: PAT_MRT3847_124415C.1
tcgcccactcttacaaatgattcgacatacctaaacggagaggttaaagagacggtaccacttggctggccgccttgaccgagcagagctgtgtgttggacctagattttgcgctaatgtactctcagacacaacagacaccgtgatgcggcgacggcggcatgcaatggaaccgaagcataccaaggctgacaagaacatcgcttactatgcgaagctgagcgacctaatggaggagtgccgcctgatcctagttgtgaactccgataacgggggatcgcaccacttcaagaacatacgcaagggtctcaggggcgactacgtcgtcctgatggggaagaacacgatgatgaagcgctcaatcaggatgcacgctgagaaaaccagagacaacgcctgtttcaacctgatgcagctcattgttggcaatgtgggattgattctcaccaaaggtgacctgaaggaggtca

SEQ ID NO: 27039 - DNA, 166 bp, Glycine max
  Clone ID: PAT_MRT3847_124416C.1
cattttgctctacccagtcgctttgttcattgcgtttctgaacgatgtgtggcattagttgtgcagtcactctacgtggccaccatccattatgcggcagtcgtgattcattgagcaagacactcgatgagagtttggacacgatcaaacatcgaggaccagactc

SEQ ID NO: 27040 - DNA, 572 bp, Glycine max
  Clone ID: PAT_MRT3847_124417C.1
ggggaaaaaaacccgaaaaccccgaccacaggaaacaaacccccagggccggaacacttaaaaaaccaaacccaaaaaaacattggtgggtttggggaaagggcccccccccccaatataggaaacaaaaattaaaaaaacaagggggcgggggaaaaccgattattccaacccccccgggttaagcaaattaattaaaaacccaattaaaggaagcggggctttcggagccaaaaaaggtgggccaaaaaaacagggtgggggggcccctgaaaaaccccaaaacctttggggggggggcccccaaaacggacgggggggaaaaagccccaagagcccccccgaggaaggggccaacccaaaaaaaccagggggcatcccaaacctttttgggggggaaaaagaaagcaggcccaagggttttaacgggggggaacccccggccggggaaagggagggggggcaagggaaccatgaacacccgaaacccattgggagggggggcccacccggggaaccggggagcgcccttggcccctcttgggggaccggggacaaaaaaaaaagggggg

SEQ ID NO: 27041 - DNA, 279 bp, Glycine max
  Clone ID: PAT_MRT3847_124418C.1
agaggaataacaccaatgttctaattagagcctatcttgtgcaactgaattttattttcacattgacctattcttgtgggagttctctttcacttgggggggggacaaaataaaccaacaaatgaatcgcgttgattgcttataaccacgcatttacaatgtgacatcatcaaagttgagtattatgttcacgcacaaaatatactatgtttttaatgtatctgctaatatgtactcttctattctcaatacccaaatacttcttaggtttccaaataa

SEQ ID NO: 27042 - DNA, 357 bp, Glycine max
  Clone ID: PAT_MRT3847_124419C.1
cgcgttagggagagacagagaaaatcgtttgtttaaaatgagcggcgcggagaagaaagtaaccgatgtagcattcaaggcggcaacggacctcggtggggatggaatggcggatcttctcgtctcccatgaggctcgcagggagttctacaatatccgtcgcgcttacaacgaggacagcttccaactagaaaccaagttcagcgcagtaacctgaccccatagactgggattactctagaaggggaattgtcactagctaggaggatatgtacatagagtattatgacagcattgaagtcctcttctttgatgacgcaggatcttctaaatacaagtctgcctttgaggccctat

SEQ ID NO: 27043 - DNA, 776 bp, Glycine max
  Clone ID: PAT_MRT3847_12441C.1
aagacaaactcaagcatctaatgaaatttagattcatatcaccgagagttgagagggaaagtgcgaatcaagcaacttaagtaaaaagttgacagaaattttcaggtcctctgcatctgtctacaggcatttcaaataatagtgatacagataactgaactcaaagcaacatgtctaaatcatcagaaataaataagattatgataataaaagcttcaaacactgcaattgtttatttccaaactgttgggaacttctagcacagaataagaaagcaaggcatgacaatgttatcaagcaggcatgccggctgcttccagcagctgtttcaccttagtgatgtaatcactcattgcttcgtccttggatttcccttcaacagccttccatgcatcccatttagctctgtccctcatgttgaacattcccggacggctggtgttgacaggtccaacggtggcctgcttgtacaatccataaaggataagcaagtcttcgtttgattgagtcggtggcaaagtctttgctttctcagcatactgctcaaaatcctccttcaaacccatgtctgttttgattgggagacagagagagagattgatctgcttgttggatctttgttactagttgtagatgacgatgatgatgttgctaatcagcgttacgttcgaagcgtacttgtagtagcagagtggatggagtgtgggcctgggaacaatttcacacatcacgcgcgtctacgtaacgcaactatattcctctctctccgtttaaaa

SEQ ID NO: 27044 - DNA, 593 bp, Glycine max
  Clone ID: PAT_MRT3847_124420C.1
gctggcggaggaagacgacagaaggggatagttacatacgtaaaaaaacttgcaattgttttataaggaatcagattagttacacttccattcccttccagcagctgggtttgagaagacaattgattatataggttttgttagtaaacaaaagaaaaggaaacatgaaggacgcagatgtgtcaaggcagatccagcagatgatcaggttcatccgtcaagaggctgaagagaaagctaatgaaatatctgttgctgctgaagaggaattcaatattgagaaactgcaattgcttgaagctgaaaaaagaaagatcaggcaagagtacgaacgaaaagccaaacaaattgacgttcgaagaaagattgaatactcaacacaactgaatgcagcccgaataaaagtgcttcaagcacaagatgatgcggtgggtgctatgaaggacgctgctaaaaaggggcttttacgtatctcaaatgataagaaagtatacaggaaactcgccaaagacatgattgttcagggtttactacgcctgagggaaccatcagtgctattaagatgcagagagagtgaccgtaagcttgttgag

SEQ ID NO: 27045 - DNA, 567 bp, Glycine max
  Clone ID: PAT_MRT3847_124421C.1
ataaaaacgatgagtttcttgcgacaagtattacaataaaaatttgcaaagtaactgaagacaaaaaatataggggtgttggaccttacacctgcagtgcagtccttttcttctccacatccttgacatcattagtctgggattttggtttttcatttagcgttaactgcctcagcatcctcttcagctccccaagactcttattatttagatcgtcagaggtcacgttttccttcatcattttagtgttgagcacatctaccttcaactgctcctggattgaattttctgtgatagaatccatagagagacgaggatcctccttgtttgaaatggcattatcttctgctgatgaacaagagggattcgaggactaaaaaatgcattaccagcttccaacataacatcctctccagctacagggtcctcaaattcttcagtttccaagtttttccgaaaaattctcctctgcttctacatctggcaatgaaaaattacagcaaaacctcgatagcaagcggaatggagaaatcgactcgagctcaacaaaaccccctttcaaaacct

SEQ ID NO: 27046 - DNA, 818 bp, Glycine max
  Clone ID: PAT_MRT3847_124422C.1
acgactgcactgaatcttcattgccagatgtagaagcagaggagaatacttcggaaaacttggaagctgaagaatctgaggaacctgtagctggagaggatgttatgttggaagctggtgatgcattttctagtcctcgaatccctcttgttcatcagcaggtttcagttgaatctattggaaattacatagtttcctgtcctttagatgttgagctgagttgcaagtccaacacaatggtggatggtgatgttgtttcagaagataatgccattacaaacaaggaggaacctcgtctctctatggattctatcacagaaaattcaatccaggagcagttgaaggtagatgtgcacaacactaaaatgatgaaggaaaacgtgacctctgacgatctaaataataagagtcttggggagctgaagaggatgctgaggcagttaacgctaaatgaaaaaccaaaatccaagactaatgatgtcaaggatgtggagaagaaaaggactgcactgcaggtattgccacagaatcagattgatggctgaatgaatagttatggaataaacttggaaatttggcactctaaataaatcttttggttgtttactggatgtaggtgtaaggtccaaacccctatattttttgtcttcagttactttgcaaatttttattgtaatacttgtcgcaagaaactcatcgtttttataaattttttccccgatgcatcaatttcagttgtgtttttggatccttgaaatgcatcttataatttttttccctgaatggaattactgagacggggatgccatgctacagtt

SEQ ID NO: 27047 - DNA, 197 bp, Glycine max
  Clone ID: PAT_MRT3847_124423C.1
gacaccaaaccaacatattctcattctgtccggggctcatatcatgtattagagacccaacccatccatatcagcgtcaacatgaagcactttatttacagctccatttgcaagaaatatactcttaaaaacaaaggctatatgccaaatcacaattactcataaccctctcaagcccactcccacaaaagtcttat

SEQ ID NO: 27048 - DNA, 293 bp, Glycine max
  Clone ID: PAT_MRT3847_124424C.1
tactcaataattactccttacacactaattattactaccatcgcatccgtacaatttctactttcctcctcaaaatccaaatattcctaaacatatactatttccaactttattctaaccaatacctcttcttcaaacttatacattatagcttactctattcctaaccaacctataccacactaccttgataattcatcacctattcactttctattctaccctcttcttcttatataaattaccatataatcttcatatactccaatattcataactcattcactgtaaat

SEQ ID NO: 27049 - DNA, 532 bp, Glycine max
  unsure (1)..(532): unsure at all n locations
  Clone ID: PAT_MRT3847_124425C.1
gctttgcttgatttgtcgaacttcatatttgttacgcagactccgcatttttcactttacagtcattcttagtgtcagctaagaccctattttattctaattttcttgtaatcatgggcgttgacgttgaaaccatatcacccggagacggtcatacctaccccaaaacaggacaaactgtcatcgtacattataccggaactttaatcaatgggaaaaaatttgattcatcgagagatcgaggccaacccttcaaattcaaaattggcaaaggagaggtcattaaaggatgggatcaaggtgtagccaagttaagtgtgggtgaaagagcaaaactgacttgcactcccgactttgcctatggttctcgaggccaccctggaatcattccccccgactccaccttaatnttcgatgtggaacttctgaaagttgaataatcaatattcttcctataatcaatataagccaattctttgatgcattttaaacaaattaatctanactgattaagtttttgcacttaatttct

SEQ ID NO: 27050 - DNA, 666 bp, Glycine max
  Clone ID: PAT_MRT3847_124427C.1
cggctgcactcctgatcacagacaaacaccacagccaaaatggacgcgatcaagaagaagatgcaggcgatgaaaatcgagaaggacaacgctctcgatcgcgccgatgccgccgaggagaaagtccgtcagatcacggagaagctcgagcgaactgaggaagagctgagagacacccagaagaagatgatgcagaccgagaatgacctcgacaaggcacaggaagacctcaccgctgccaccactcaacttgaggagaaagagaagaaagtccaggaggccgaggccgaggtcgccgctctcaaccgtcgcatgaccctccttgaagaggaactcgagcgtgctgaggagcgtctcaagatcgccaccgagaaactcgaggaagccacccagaacgtcgacgaatccgagcgtgtccgcaaggtcatggagaaccgctcgttccaagatgaggagcgcgccaacaccgtcgaggctcatctcaaggaagcccatatcctcgccgaggaggctgaccgcaaatacgatgaggttgcccgtaaattggccatggttgaggctgatctcgagagagctgatgagcgtgccgaggccggagagacaagaatcgtgagctcgaggaggagctgcgaagttgtcgcacaatctgaatccctgaaagtgtct

SEQ ID NO: 27051 - DNA, 1046 bp, Glycine max
  Clone ID: PAT_MRT3847_124428C.1
acttgttttgttttcagaaagaaagcatctcattgtcatccatgtctgtaatcattttactaaaaattaaaagatgaaaaaaacatgttcaaattatcatgtcttttatctcaatggaaaaaatctctgttcaagaagcgtttagtgcggggcgagaaaaaaaaaaggtcgctagcgcacgggattttggttggtaatcaaagggagaagaccattttaggtcggggtttcctttccttccgtctttgttcatttggtgacaattctgtattgttcagatattgtccggtccaaagacctctctgcatattattatttttttttgatcgggaactttcttccctttcttcttctctttttttttttaagagacgaaggatggggaaggcaaaagaagcggcggtggtggcgggagccctagcattcgcgtggctcgctatagagctcgctctcaaacccttccttaccaaggcacgtgcttccatcgacaagtccgacccggcacgtgaccccgacgacgatgctcttcctaaaaccaccgccgacgacgttcccgaagcctccgctgacgacgtgcctgtcgctgctgataccaaaaccaccgacgacgcctgaacttatctcattcatgttattttgaatgtcctgaaaattactgtccaaatgaaataatgttgctagcctctttgtgtttctgttaattttgtgtatattgtgttgtcagtatttttgttctgttttgtttggttttaggattgaaaaaataccaggttgttctgttctgtttgtttcccttgtcatggtcagatataaacggacaattggtattttggtacttcccgttttagcttttacaatcatatgcctccttgtagttgtagctatcaaattggaacaacactaggatgtaccaaactaaatgcctatctatattttttgggggaggaggaattaacattttaggagtggggatggtgcttaatgcttattgtttgacaattttgctactttgggttcctttactcacagagttagtaattattatt

SEQ ID NO: 27052 - DNA, 317 bp, Glycine max
  Clone ID: PAT_MRT3847_124429C.1
attcaacactctcaatcattcattgaaatgatagaacgagtactgactggcgctaccctaaaacataacacagggaccaacagtttgccccaagctgccaatgaatcgatttataagtgacaactgaccctatgccgttgtttacatacattgaaatgcatagaagtgaggcgtattaaaggaattcagcgctgggatactcttcaacagcctgattggccttattgccccgctgttgatctacataggtactggatcggtgccacgggatgacactctgctgatagagcactaccatcatagtacgcaggttctag

SEQ ID NO: 27053 - DNA, 848 bp, Glycine max
  Clone ID: PAT_MRT3847_12442C.1
ttttttttttttttttttttttttttttttttttttttttaaccaaattcagattcatatcactgagagttgagacttgagacataaagtgcgagatcaagcaaactttaagtcaaaagtcgaagtagttttaattatactagactttttatttgaaattttcaggtcctcagcatctgtctacaggcatttccaataacagtgatacagataactaaactcaaaagcaacatgtctaaatcattagaaataaatatgattatgataataaaagcttcaaacactgcaattgtttatttccaaactgttgtgaacttctagcacagaatcagaaagcaaggcatgacaatgttatcaagcaggcaagccagctgcttccagcagctgtttcaccttaatgatgtaatcacccattgcttcgtccttggatttcccttcaacagccttccatgcatcccatttagctctgtccctcatgttgaacattccaggacggctggtgttgacaggtccaacggtggcctgtttgtacaatccataaaggataagcaagtcttcgtttgattgagtcggtggcaaagtctttgctttctcagcatactgctcaaaatcctccttcaaacccatgactattatggttgagagagagagagagattgatctgcttgttgttgatgatgatgttgtgatcagcgttacgttcgaagcgtatttatagttgcagagtggatggagtgtgagcctgggaacatttcacaactcacgcgcgtctacgtaacgcaactatattcctctctctccgtttaaaatttgttttcaatttcctttccttggtggatgcaattccg

SEQ ID NO: 27054 - DNA, 656 bp, Glycine max
  Clone ID: PAT_MRT3847_124430C.1
aagctgttcaagcaagatccatgagttcattgagcacaaatgtggccgagccttttgggtcaccattttctacattatgagttattaattcgacaaactgactggaagaaaataaaaaaagaagaagaaagaagatagatataatgaggagaattaagagagtcaattgacaatgaaatgattaagggaatgatcatatggagaaggcatcaaatacaggttgtttttccttcccactgcagctccaaagccttcagtcatatccaagtcctctggtttcattccattggggagttcccagtcaaagtgatagagcaatgcaacaagaggaagctcaacattagctatgccaagtaaaatgccaggacacattctcctccctgccccaaaaggaatgtactcaaaattactccctttaaaatcattacttgtgccatcaaacctctcgggtataaacttctccgcatcataccaatgcttgggatctcttccaagtgcccatgcatttacaatcactttagtcttgattggtatttcatatccacctattttgcatggttccctgcactctcttggaagcaacaagggaacaggaggatgtaacctcattgtttctttgatcaccgacttcaagtagctaagttcatatacatcac

SEQ ID NO: 27055 - DNA, 382 bp, Glycine max
  Clone ID: PAT_MRT3847_124431C.1
gtggaactgcttgtcccagagggctttatggtatcttttgtgaggaatgccctgttggtacttataaagatgtcagtgggtctgatagagctctttgtcatgattgtccccctgatgagcttccacatcgtgccatatatatttctgttcgaggtggtgtggcagagactccttgtccatacaagtgcatttctgatagatatcacatgccaaactgctatacagcttttgaagagttggtctacacttttggtgggccatggctcttcggtcttctactcttgggtcttcttatcttgcttgctctagttctcagttgtgcacgaatgaaatatgtagctggcgatgatttaccagctgttacgccctgctcaaatgacac

SEQ ID NO: 27056 - DNA, 407 bp, Glycine max
  Clone ID: PAT_MRT3847_124432C.1
aaaacaacatagttcaatattgccattcagtttaggtccctaacaggggcagtgaagcataaaagccatgcttccaaattaaaaccccatggggactgggacccatttgaaccttaaacccaacaaaaaacagaccccaggaacaagaatctgaagttgattttagtagtcttcatcctttttcgggcccttaccaaacttagcacccactttttaaaaatccttttgaagggctgcaagggccttacgggcttcaaaaaattcacctttttccataccctaacccacgtaccaggggacaaaagcacccttggcatacatgagatccaacttgggatcaatgcgggcaaacacttgaaccacactgggggagtttgaaatcatgcaaactgcccctcgagcccaat

SEQ ID NO: 27057 - DNA, 366 bp, Glycine max
  Clone ID: PAT_MRT3847_124433C.1
aaaaggaaggggggaatttgcaaaaaacgggcaaaaaaaaccaaaagggaaacccgggggtcgaaaaaaattttttattgcccaaaataacggggcgcaaacgccaagggataaccccccaaaaaatttggtcgccctaaaaaaaaacccagtttaaaaatctccgaaaacccggggagcccccatttttcccaaaaaccctttgaattgaaaatattacccaccccccagggggggcttttcccaaaaccctttttttctggcccttgcccccgggggccaactggaatcccccaaaaaggaaaacccccgggccccctttaaaggaaaaatcttagaccctgggccagccctttttaaccccct

SEQ ID NO: 27058 - DNA, 253 bp, Glycine max
  Clone ID: PAT_MRT3847_124434C.1
gtttaattttaagtgatttgggatgttatttgtttttgctttagtataaaagctgggttcgtaaatgtttaaataccatattgctcccatattgatatgggttctcaatgaatatagatacaacgattagcagcaatatatcaaatgcagagtaacagccaaggctcaggcaaaaaaaggtgatgatgaacttcttgtatttatagaattaaaaatgcttgggactgtaaatttaataaatttattctggaac

SEQ ID NO: 27059 - DNA, 470 bp, Glycine max
  unsure (1)..(470): unsure at all n locations
  Clone ID: PAT_MRT3847_124435C.1
attaattcttggtcggtggtttgtctatcagaggtgtttttttgcagttgcagtagaacctaagatttgtgttcagatataaaaaagaaaaaaaaaaaaaggagcaacatagtcatttcctttgaccaagatgaagtttatgaaacttggatctaagccagattcttttgagagtgaaggggataataatatcaggtatgtcgcagctgagttggcaactgacatagtcattaatgttggaaatgtaaaatttcatctccataagtttcctcttttgtcaaaaagtgcacgcttgcaaaagctgattacaaacagtaatgaagagaacaatgatgaagtccatatccatgacattcctggcggatctgctgcttttgaaatatgtaccaagttctgttatggtatgacagtcactcttaatgcatacaatgtcgttgcagctcgctgtgcagcanaatatcttgagatgt

SEQ ID NO: 27060 - DNA, 438 bp, Glycine max
  Clone ID: PAT_MRT3847_124436C.1
attataacatcggggccaaaaggcttaaggacatataaaaaaactgaaacaacaaaacgtgaactgtaaacaaaatgggaacagtaaataggcaggaaaagcatacaaaaaaccttttacatatcagaacaaagcttaaacgcaaaggcaactgaggaattgaacgacctaactttcctactataccatgaccaccaagttcacctacagcttgtccaacccaacccggttggacaccctatcctactgcataaagttgaagtgctggaccaagacgactacgcaaggtcgtggtggaatcaaattttaaatgcatctctttcggaaagggaagaaagtgattcacacgcttgttgaaattaaaatgattagcagagtcatccttcctgatgaggaaaaagcacctgctgatgaaggggggatgcttggcgactggga

SEQ ID NO: 27061 - DNA, 270 bp, Glycine max
  Clone ID: PAT_MRT3847_124437C.1
gttgagactggaaagcaattagtactcgaggaatgcttgatggtaggaatttcttcagtagctgcagctgtacgtgcttaggaaggttggaaacaggcctgagaatggaggaaagcttattgcggttggcatcccaggctttggtgtcatatatttggcaactatacttttgcagtcaatacgggcaggttgcgagttaatgcaacctgagtcatagattgactccgcttgctaatgtttcagacacatgtgccacaagtatctgtatgg

SEQ ID NO: 27062 - DNA, 335 bp, Glycine max
  unsure (1)..(335): unsure at all n locations
  Clone ID: PAT_MRT3847_124438C.1
atattttttttttttttttttatttcaaaactacaacnnnnaaagacgcttttcttactcgaactaaattaaatcccaacaaaaactttaccaatacaatttcaaaaaaagcttcacaaccataaataaaacccaaaataaattatccaacaaattcaaatacctgcctnttttttaacaaccaaacctccacattttcttaacaacaatttcccaatgacaattaatatcactaccaattaaacacctattttcccctaataacctataaccttcaacaaaaaaaaaacttactaactaaacaccatccacaaccaccaactatacattttcac

SEQ ID NO: 27063 - DNA, 491 bp, Glycine max
  Clone ID: PAT_MRT3847_124439C.1
aatccaacacgaacacctctaatgtaaaactcggtggataccaggtgagcaacagagtgtgacacctcttctagactaacacaagaagcaccggactggaacattgtcttaagcagatggagccgatgagccacggtgaaaatatgagcatacgagatatctcatatcctcgcggaacgcctaagaaaaacaagaggaggatatttactttttatcatcatctatcattgcggcactgatagttatggatgcccctatgaaggttagagtatggtaaaggccacgctggcgctttcagggaattaacatgggtcttcccttgctagcatactttgaaactatgctctccttttgctttgactagaacagtccttttgcacccttgaaagggaggtgccacatactatgaggaaaagctatttatcctacactgatacacctttcagtgcccgcggcaaagcggagcgcaccgtccatgccatgccgtgaac

SEQ ID NO: 27064 - DNA, 1455 bp, Glycine max
  Clone ID: PAT_MRT3847_12443C.1
gaatctataaaaatcactatatgatatcgggttacctcctccaattctcaccgaaatccgtcgtcaaagttggtttccggcagagatcatatatctcctagggtttccagctgaatcgagcatactccctcaatctccaattccacatcacaaaccctagaaaatcttttcagatgaatccaaaatcgctccaaatcctggtgcagtcaccggacctcggaatttcccttcaacccacaaccaaacacgaaaccctttccgatctcaaacactctctctttcctcaatcacaccgatccttctacttcaccttcaatggcaagcccctccccgacaaaacccctctctcgcaattcccccctctctccaccctctccctccgctcccgcctccctggtggtggcggagacggcggtgccacaggcgccgagtcccgtgactgctacctcaacatgtacgccgacaagaagcccgacaaggtggaccccaacgaacagcgcctctccaagtggcacaactgcgccctctccaacgaacccttgagagagccctgcgtgatcgataaattggggaatatcttcaacaaggaatctctggtggaagcgttgttagggaagaagcttcccaaggaatttgggcacatcaagggtttgaaagatatgattaatgttcagctttctgcgattcctggagcggaggatggggcaaagtttcagtgccccattgcagggcttgaatttaacggaaagtataggtttttcgcgctgaggaattgtgggcatgttttgagtgccaaggctctgagggaggttaagtcctcttcgtgtttggtttgtcacaaggagtatgctgacttggataagattgtgctcaatggaagtgatgaggaggttgtaattttgcgggagaggatggaggaggagaagcctaagattagggagaagaagagtaagaaggttaagcataataatggtgatggtgtgagcttggaagggactaggttgagtggtactaagcatggtgttgatgttaagggtgtggagaaggcttcggctaaggtggaacgaaatgggaaggttggtaatgttgctttgaatggtaatggtggtggtggtggtgctgctgctgccaagcgtttcaaggctgttgatttggccccggcgaatgctactaaggatgtgtatgcttccattttcacttcctcgaggaagtctgacttcaaagaaacatatagttgtaggtctcttcctcttggaaaaaactgattcaggcgtctctactgttttattgttgtccaatgtactgaattttagtttgtgcctttgtggttatataagtgattgacttttcctgtgatggatttactggtttcatcatcagattattatcattaatcatgctttggaaggagttttgttaataacatatatttatttggcaataggtagattttag

SEQ ID NO: 27065 - DNA, 360 bp, Glycine max
  Clone ID: PAT_MRT3847_124440C.1
gaaactgtatgggctaccactctcgccctaagacacactccggatatcctctaattcgaaggatgacgtgtaagggaggctatccctctaaactagggatatgacaaaacggtctcactcaggctctgttctttccaccaagtctagggccaagcctaacaaaggctggcttatcctgtttacatcccttggtgcgatggccacctcaagtttgatctataagtgattattggttctgagcttctgttacttattattcattccttttccttttgtttgatctctctattctgaaacttaaccacatgtcttgcttctgtcatgagaaactgatgtcattcatacacccttaatggcaca

SEQ ID NO: 27066 - DNA, 279 bp, Glycine max
  Clone ID: PAT_MRT3847_124441C.1
gattcccgggcaggccggctgcatgagaacaactcagtcctaaaagcgcatctttgtttggtaatccccgatgaaagacttgaggagtagctatttatagggggggggggcacaacacctccctatctgtaactccatcctctcatatcttgctgcattgagcaagaaacggtttgattcaaagttcaatggctagctgaactataacctcaagaagcatgctaacaatcaagatccatttccctgcaattactcccttaagggggggacttgcacctg

SEQ ID NO: 27067 - DNA, 236 bp, Glycine max
  Clone ID: PAT_MRT3847_124442C.1
cggcccggaaccccgggggcgacccacgcgcgcgctaaaagcgaggaaccgagaacacaggaagggggaccataaaaccggaaacacaagcaagccccacccgagggcaagaaccacacaagggaagcccacacacacgggaccgaaacccaaaagggaaagaaaaacacgcacagcgccgggcacagacggcgagaaacaccaggcccagccacacgcaggcaacaagcagaaca

SEQ ID NO: 27068 - DNA, 578 bp, Glycine max
  Clone ID: PAT_MRT3847_124443C.1
ttttgtacttataaatataaccaattatcgctaatataaccaaatgaaaatatgaattgagcatcattacaaaatagattacaaagccaatattggttggctcggcccaaaaagactaaaaaagtcatcaattgaaactctataaatgaagagtaatgccaaaataaaatagaagaggtgatagcaccaaccaggcaagttgcaatacgaccttcctacatacattttgccacatcaaaagaagaccaaacaatatgacagaaaggagaaatttcataatccctgaatgagcaactgaaacatgtagctaaaactgcatcaaagctcaaacgtttcattgacaaacctaaggggaaatccttgagggtcatcatctgggtagaaaggattttaacaaataagctaaaaggctttcagcaaagtttgaaaaatatttaggccattgattcgggcagagagccttcacactatttgtttaagagccacatcaagtttcccaattgtaaggtttgggtgggaatggtcatctggatccacttcttcaatttcctgaacaatatcctggcccttgatgactc

SEQ ID NO: 27069 - DNA, 611 bp, Glycine max
  Clone ID: PAT_MRT3847_124444C.1
acgagatgaattccagctgtagtgaaaccaggaaaaaggtggatcagttgcaggaatcagattttgacattggtcggaaacattaccatatcaagccaagtaatattgtgcttctttgtccagtagaaattccccagtcaagttcttcagaggattttcagctttctgaatcaagaacgtcatcggatgaaaatttttcggaatcaaccaaaagtagtttgtcatatgtttcccttcctgatgaggtttacactccacaatccgggccactgcgttctgcagttgagttttcttctttggaaatgatgcaacacagcattagtactgatctgggtgtagatcgttcttctgttgtgtctgagataccatcttccacgataaataaaattgctagtctgcaatctgcgagcgcttgctttgaaaaggatatgtttgatgcttggctgagagatcagtgtgcttttagtaaattgaaggaatcactggaccaagaaactgctgagctgacagctcagaaggaaatgaatacttcccataaccgtcggtttggcttcagcgtaagtcgaattggaagaagtttcagcttcaaagaggggcctacgcttccacac

SEQ ID NO: 27070 - DNA, 403 bp, Glycine max
  Clone ID: PAT_MRT3847_124445C.1
aaatatagccacttatcactaatataaccaaatgaaaatatgaattgagcatcattacaaaatagattacaaagccaatatttctggttaggcccaaaaagactaaaaaagtcatcaactgaaacactatgaaacagcataggtagacaaataaaagccttttttttctgtgatctcaatgtgccccctttgaggttaccaatgaagagtaatgccaaaataaaatagaagagttgatatcaccaaactggcaagttgcaatacagaccttcctacatacatcttgccacatcaaaagaagaccaaacaatatgacagaaaggagatttcataatccctgaatgagaaactgaaacatgtagctaaaactgcatcaaagctcaaacgtttcattgacaaacct

SEQ ID NO: 27071 - DNA, 729 bp, Glycine max
  unsure (1)..(729): unsure at all n locations
  Clone ID: PAT_MRT3847_124446C.1
atgcacgcgcacgcatgacgtgggctccgaattgagctcgagcttacatcccccgaacgaaagaaaaacagaaccacacaaaaaacaaattcacaattaaatctgtgaatggagaacctaatttctttggtgaacaaaatccagagggcttgcaccgctttgggtgaccacggcgaagcaagtgccttaccaactctctgggactctctccctgctatcgccgtcgtcggtggccagagctctggaaagtcctcggtgttggaaagtgttgttggcaaggatttcttacctcgtggatcagggattgttactcggagaccccttgttttgcagcttcacaagattgatgagggtggcagagagtatgctgaatttctacacctccccaggaaaaggttcaccgattttgctgctgtgagaaaagagattcaagatgaaaccgatagagagactggacgaacaagacagatttcaagtgttccaattcatcttagcatatattctccgaatgttgttaacttgacactcattgatctccctggccttacaaaggtagctgtagaggggcaaccagatagtattgtccaagatattgagaatatggttcgctcctacattgagaagccaaactgtataattntggctattacgcctgccaatcgagatcttgcaacatctgatgcaattaaaatatcccgtgaagtggatcccactggggaaaagacattt

SEQ ID NO: 27072 - DNA, 405 bp, Glycine max
  Clone ID: PAT_MRT3847_124447C.1
cccgcgcgccgcccacgcgtccgcccgatttatcttatatatcgaatcatcctcaatatagcctggatttagtgtcaataacgcactgctaaatttctacgactctcaaatatcctctttcctcttttagtccaaccacatgtcatatttgcaccaaatttgttctaccaagattcgtaagatcacatttcacatgccccacataagaaaaacgttattaaattcttgaaagcttcatttttgacaaatacagttgaagctaaattcaattacgtaatatggatccttcacggacaaatgcagggctatatataaccttacttgtgatgttgctacaaaagttgctctgtgaaaaaagacaaaggctcgttcagcgatcatctcattgcagattttgcattcaca

SEQ ID NO: 27073 - DNA, 294 bp, Glycine max
  Clone ID: PAT_MRT3847_124448C.1
aaagcaattgattgctagattacatacccttttatgattccatagcaggcacatctgttcttacgaaggaaaaactaatctggtattccagcgctggtaaagtacgatttaaagcaattctcaacaatagcttcctatagcgaaaatttagatctggcttttccactaaattctgcggtgccataaccctgaaaaaacatttcaccatgtatatcaccaaacctagatggggaatcctctggtggatatgctcatggagtacctgctgaacatatcgaggcgctccactacatc

SEQ ID NO: 27074 - DNA, 289 bp, Glycine max
  unsure (1)..(289): unsure at all n locations
  Clone ID: PAT_MRT3847_124449C.1
ccacgcatccactgaccaaaacgatcctttttgacagttcttgattataacttactttcgttaaaatgtgctgttcttgcttctcaattacctcaaaaaatntatgggtccattttcatgtttagggtttcttagttcttattcgctacttgcgaagatgttggattttaaggttgtcttgattttcttcacctggctttgatgtttcactttttgcgaattattgattttttttttatcaatattttattcacttattaagctatcaagcgctctattccccagtagc

SEQ ID NO: 27075 - DNA, 634 bp, Glycine max
  unsure (1)..(634): unsure at all n locations
  Clone ID: PAT_MRT3847_12444C.1
accggnaccggnaattcccgggtcgaccccgcgttcgggttactgaattgaagatgaaacttggtactcggtcccagttttcaactcaaaggaaaaaagtcgatgaatcaactaaacagttgcaattcgatattcaaaatttgaaggctcaaaaggttcaactgcaatgtaagatcaaattagaatctgtgcaatttcgattatgcaaggccctacttgaaaaagatttttttcagcttaagaaagagggaaggaggaatgaagtcaagacccaaagtttgctggcttcaaatgataggcttaaaatggttttacagcggaagacagaggaagcttctgctgctactaaacgtctacaagacatgataacagcacgaaaagctgtatcacatagatcaactggtgctagaagtagaaatggtcaattaattctggatgctgagcaagaactagaagccacaactcagttacacaagttatgttctcaatatgaatccaaaatggaaaagatggctggagagatttcacagctgaaggaagaaaatgagatccttaggcaggaaaaattagggtctcagctacaggaggtagactgtgacagtcaggagaaagattctgatatcccagatttaag

SEQ ID NO: 27076 - DNA, 154 bp, Glycine max
  Clone ID: PAT_MRT3847_124450C.1
cttcgattattcaattgccagagtctccttttatgtattcgcctgaatcgaacctccaagttaaaagttatgaccatttaaatttcgcgagagcttcacatgagcaattactagtttctcaaaatataatgctcctgaatacaacctcaccact

SEQ ID NO: 27077 - DNA, 460 bp, Glycine max
  Clone ID: PAT_MRT3847_124451C.1
ccactatgtgtggggtctgtagaagttgaacccactatgtgagtgtatattatgcagccttaacttgcatttgctggaggctgattctatgactcgaacatgtgacgttcaggtctcaaggcaataattccaaccattatgccacggctccccttcccccattttccatatcataatttatgatgttgaagtaaagtatgttttttatttttgggtctaaaggagggtccacgaagatgggcccaggggaattctgctggaggccccacaaggaagggggtgtggactgcattgcttgatttgaacctatgcactcttcttgcatgtcacgtgactcactcaactgagctatgtcaaccggactatttaagtaaaaactttgagtctttgataatatagtaaaaatatggaacaaatttaaaccatggttggagaatttttttagtagggaagggagaga

SEQ ID NO: 27078 - DNA, 388 bp, Glycine max
  Clone ID: PAT_MRT3847_124452C.1
aattcggctcgagaaaaaagagtggctctatgttaaggaaagcaacctatggagtttatctggcgatgcaaactctataatgcctatgctgagactgagttacttgaacttaccgataaaacacctaaggtacttgaatctttctgaaggtagctttgaaactcttccagaatcgctatgtgcattgtggaatttgcaaatattgaactttcagcttttttagatgtctaaaaaatttgccttacagtttgatgcgcttaaaagctcttcaggagctatctttgattgagtgctcaacactatcaagcttgcctcctcaaatagggaagttggcaaggagagagagttcccaattcttgatctcaagatattctttaagcttcaatct

SEQ ID NO: 27079 - DNA, 481 bp, Glycine max
  Clone ID: PAT_MRT3847_124453C.1
cgtcagttcataattggaaccctcacaacaaaactcaatcttcttcttctctatctctctgctacgttcatgttctgctgaatcatcaccccaccatcatggaacttgttccatactctgacccatcctccaccaccccagcatggcaggacatgttccgatccgcctctgcccgccacccctcctccacccctgcaccccacgcgcctccctcccaatcccacgcgccctccccctcaccccacgcgccgccgaatccgccatccgacgccgacccagatggaaaaaacacattttccggcgatccccaggtgcgcttggccctctacatcgccatggcccatgcgggtctcgccttcgccattttcatcctctacactttctcgaagcttctagaacagtatttgagaccccttcaatgggcagtgttgtgttctattcctcttaggggcattcagcaaaccctcgttaagttttggtc

SEQ ID NO: 27080 - DNA, 541 bp, Glycine max
  Clone ID: PAT_MRT3847_124454C.1
tcgggaattactcttcaaaggccgtcgttggctatgttacatgtggttagtggacgagatggtttacccaccacttgacacaattaaatttttagatagcaaatttttcattagatatcaacaataccaattttacagaactggggataagctagaaaataattttctttaaaaaaagtgatccttaatcaaaaactttactgggtactttttttggcaccaaaaaataaattcttaattttaacaccaataaatctatgctgacacgacttcttagagaactgtaacaaaactcaaataaatggaagaaaaatgtccttttacattagggaaccatttgtcaaattttatttacttaaataaagcgcattactataagcaaagagtgtgtttaaatcttctaaaaactatgctgacaccacttcttgagaactgtaagagtctcaaatatctggttgatgagagtgcttttgcatttgtgaaccagaatgtagtattttattcacttaaataaggcgccccactatatgcaatgagtgtg

SEQ ID NO: 27081 - DNA, 439 bp, Glycine max
  Clone ID: PAT_MRT3847_124455C.1
tatgactttgactatgatgactttaacaggtaaattgcctctacacatttttattttttattttctattttggtcattcattttgttggttctgctccctgttcctctactagtagaacctgcaagatcaatacaaaaacagaaaacacagcaaagcaacaagcaaggatctacaccatgagtttatgtggttcagcaatgtgcctacatacatgagaaatgacagctcatcatcatcacattgatcatgaaacattacaagttcaatacaagcagtaactagcttgatctctcttggcaaaacctccctcaatctcctagctctctttctgatgaactctctctctctgtttcttttcacagaaaaaaaactctcaatgaataacatgatcaaatatatatatactctaggtgctagctctaggaacaaagactatac

SEQ ID NO: 27082 - DNA, 512 bp, Glycine max
  Clone ID: PAT_MRT3847_124456C.1
cttacgcgttcgaaagaaacacccaaaatggcatcctcagcctcgaccacgctgtcttctcccttcctgcgactagaattcccctcctcaaccaagcttccgatccgcaaaatccctggcgactgcgggttcccggtgatcggtcccttcaaggaccgccaagactatttctacaagcaagggcgcgacgagttcttcaagtcccgcatccaaaagtaccagtcaacggtcttccgcaccaacatgccccctggccccttcctcgcccccgacccaaacgtcgtcgttctcctcgatgccaaaagtttccccgtcctcttcgacaactctaaggtcgagaaaaaagacgtcttcactggaaccttcatgccttccaccgaactcaccggcggataccgagtcctttcttacctcgacccctgcgaacccaaacacgccctcctcaaacaactcatgttcttcctcctcaaatcacgtcgcgcccacgtcatctctgagttccacgcgtccta

SEQ ID NO: 27083 - DNA, 2192 bp, Glycine max
  Clone ID: PAT_MRT3847_124457C.1
tgtcgccggttattgtgatattctcaagagaaactttaagcagatgtctaatgttttgtgggcggctcctgaggacaaggcgagtttatggtcacaacttcattatgtttcatgtaataacccggaaatgcaagaagctcatcttgccaacctcatccatgtgtgacgagaatcctattaacacatctctctatcatctctctatatatatatagtagcaatagccctctcccctcgcctcctcagcctccaccccaagaaacacccaaaatggcatcctcagcctccaccacgctctcctctcccttcctgcgactagaattcccctcctcaaccaaacaacgctcttcaatctccatccgagcctcggtctccgagaaacccccgctaccggctgtgtcggtgacctccccggagcccagcaagctccccatccgcaaaatccccggcgactgcgggttcccggtgatcggtcccttgaaggaccgccaagactatttctacaagcaagggcgcgacgagttcttcaagtcccgcatccaaaagtaccagtcaacggtcttccgcaccaacatgccccctggccccttcctcgcccccgacccaaacgtcgtcgttctcctcgatgccaaaagcttccccatcctcttcgacaactctaaggtcgagaaaaaagacgtcttcactggaaccttcatgccttccaccgaactcaccggcggttacagagtcctttcttacctcgacccctccgaacccaaacacgccctcctcaaacaactcatgttcttcctcctcaaatcacgtcgcgcccacgtcatctctgagttccacgcgtcctacaaagaactcttccacgccctcgaagccaacctcgccgaagccggcaaagccagcttcggcgatgccaacgaccaagccgccttcaactttttatcacgctccctcttcaactccaaccccgccgataccaaactgggcctcgacggccctaaaatcgttcagaaatgggtcctctttcagatcggcccaatcctccgcttgggcctccctcaattcttggaagaatcaacaatccgaagcttccgtctaccgttctctctgatccaaaaagattaccagagactctacgatttcttctacgagtcttccggtttagtgctagacgaagcggagcgattggggatcacgcgcgatgaggcttgccataatctgttgttcgccacgtgcttcaactccttcggcgggatgaagcttttcttcccgaacgtgctgaagtggatcggacgcgccggggtgaagctccacgcgcggctggcggaggagattcgctccgccgtgagaagcggcggcggggagatcagcatggcggcgatggagaagatgccgctgatgaaatccgtggtgtacgaggcgttccgaatcgacccgccggtggcgctgcagttcgggagggcgaagagagacttgatcattgagagccacgaccacgcgtttcaggtgaaggaaggggagatgctgttcgggtaccaaccattcgcgacgaaggatcctaggatcttcgagagggccgaggagtttgtcggggacaggttcgtcggggaggaaggggagaagctcctcaagcacgtgctgtggtccaatgggcctgagactgagtctccaacacttgggaacaagcaatgcgccggaaaagacttcgtcaccttggtttcgaggcttttcgttgtggagttctttcttcgctatgattccttcgagattcaagtgggaacttctcccttgggttcttccgttactattacttccctaaagagagcaagcttttagttagttagttaattaattaattaattaattaattaatatttgttattaattttgtttttgaccggttaggatgatgatagtattattattattattatttttttatcatcgagaatgatagtatgtgataatttataagtttattgtatggttacattttacatttttagtctagatttgatttgctagatctgaaaaaagttctgacagcccccaacacgaaaacacagtgtaatcatgtatattagtgctggtctttcaagtttcttatagcaagagggtctccgaccctgcttatgtaatgaccgacctagatctttaacattctcattttcgaatgttaatattcattatctctaaca

SEQ ID NO: 27084 - DNA, 492 bp, Glycine max
  Clone ID: PAT_MRT3847_124458C.1
ggaataaaaaaagtggtatttgtctatcattttctgggcatattaactacctattcaatttagttaactacgtgaagctaatgctgagttataatagttagttagttggatctagccccggtgaaaccaaagcagtagctggatttccattcggatgcaaataatagggacggtggggatttagggtttgatcaaattttgagctcatcttgctagaaagaaaatctataatgaaggaaaggaagcaaaggtacaagaatagatcagaataacacagtagagttctcatttgaagagcttcgatttagatattaattagaaaaataataataacaagttttatgagccttaaattgtggaagatgaaagttgtaaggttataagttataatgtcttgaataagcaattatgtgagcatttagtattcttgaataaataaattatgtgagtgctcactctattttagtataaatagggggatcaatactcttg

SEQ ID NO: 27085 - DNA, 499 bp, Glycine max
  Clone ID: PAT_MRT3847_124459C.1
ggggcaaggaaggacctttagtcaaaaactggggataccaaaacaggaaattaaggggcccaggaaaaaggttaaaaaaacattatctaaaaaggggaaggggggcatccaccaattaaaaaattggggaaaaaaagggggagccccaaaattttttcccaggaaacccacccaaaattggaaacaagcctcccaggaaaactttaaaaacttccaaggaaaccccccaaggtaaaaaaccttttaacccccaatatccttttaaggaaatttttccaggggggcatcccctttattatccccaaaacaaccaaaaatggttttaaggggggcaaaataacccaaagaaaaagttttttaacccccctttttttggggacaaaaacgggattaaaactgagcagggccagttgggaggctccaattttaactccaactccgggtccaaagatggggctaaccaccatgggaaaaaccccggggggtttctttcttgggg

SEQ ID NO: 27086 - DNA, 1410 bp, Glycine max
  Clone ID: PAT_MRT3847_12445C.1
ctccttcaattctcaacgaaacccgtcgtcaaagtgggtttccggcagagatcatatatcttctagggtgtccacctttgaaattcaatctccaattgagcatcacaaaccctagaaaatcgttccagatgaatacaaaatcgctccaaatcctggtgcactcaccggacctcggaatttcccttcaatccacaaccaaccacgaaaccctttccgatctcaaaaactctcttttccctcaatcacaccaatccttctacttcaccttcaatggcaaacccctccccgacaaaacccctctttcccaattcccccctctctccaccctctctctccgctcccgcctccttggcggcggcggagacggcggcgccaccggagccgagtcccgcgactgctacctcaacatgtacgccgacaagaagcccgacaaggtggaccccaatgaacagcgtctctccaagtggcacaattgcgccctctccaacgaacccttgagagagccctgcgtgatcgataaattggggaatatcttcaacaaggaagcgctggtggaagcgttgttggggaagaagcttcccaaggaatttgggcacatcaagggtttgaaggatatgattaatgttcagctttctgcgattcctggagcggatgatggggcaaagtttcagtgccctgttgccggggcttgaattcaacgggaagtataggtttttcgcgctgaggaattgtgggcatgttttgagtgcgaaggctctgagggaggttaagtcttcgtcgtgtttggtttgtcacaaggagtatgctgacgtggataaggttgtgctcaatgggagtgatgaggaggttgcggttttgagggagaggatggaggaggagaaagctaagattagggagaagaagagtaagaaggttaagaataatggtaatgatgacggtgtgagtttggaagggactaggttgagtggtactaagcatggtgttgatggtaagggtgtagagaaagcttcggctaaggtggaacgaaatgggaaggttggtaatggtaatgttggtgtgaatggtggtgctgctgctgctgccaagcgtttcaaggctgttgatctggccccggcgaatgctacaaaggatgtgtatgcttccatcttcacttcgtcgaggaagtctgagtttaaagaaacttatagctgtaggtctcttcctcttggaagaaaccgattcaggtgtctggtatacagttgtctctactgttttattgttatccaatgtactgaattctagtttgtgcctttgtggttatataagtgattgacttttcctgtgatggatttactggtttcgttcccatcagattattatcattaatctaacttaggaaggagttttgttaataacatctttttatttggc

SEQ ID NO: 27087 - DNA, 377 bp, Glycine max
  unsure (1)..(377): unsure at all n locations
  Clone ID: PAT_MRT3847_124460C.1
caggaaaccgagaccggaaaaacccggtccgacccacgcgatagataacacccacgcccacgcgaccgcccacgcgaccgagacagaaggaccagcacaaagacgcgccgaaggaagacaaacagcaaaggcgacagcggcagccacagaccccagaacggcgcagacacagaggcggangacaaaccacaaagcagcggggcggagggccacgcccgcacgcaagaaggagcgccggagacccacaccaccagcagcgacagagcccagcaccagaagcagagggaggacacggccgggacgcacaaggaacgcacccacagcccacccaacaaggcccacggcgaacagaccaagaacggcccaagaaaacacgg

SEQ ID NO: 27088 - DNA, 219 bp, Glycine max
  Clone ID: PAT_MRT3847_124461C.1
gtcgccccccgtccctcggatcctctaagcgaccgcccgggaatactttttctttttccaccaagcatctggcggcatgaggttgtaatggccaggcgagggcctgtactatctactttaattagtgaaggacggtaaattgatgtctgttttggactccaaatttcctgtgatcaaagctgaagatgcttgggctaaaatcatagatggccatgctac

SEQ ID NO: 27089 - DNA, 193 bp, Glycine max
  Clone ID: PAT_MRT3847_124462C.1
ggaggcttgtgtctactaacaatacacgcttacctagctgtatgtgaagatgcagcattgagatagctgtgttttgtattctcatgttgtgagggttcggtcccgctctggtaggcgtaagtgtgagcctccacagtgatctctcaggcgcagggtttatgcacctacgcctggtacgtctggtcaagctccc

SEQ ID NO: 27090 - DNA, 394 bp, Glycine max
  Clone ID: PAT_MRT3847_124463C.1
cttactataattttcttaattttcttcttttgctccattaattcttaccttgatatcaaggaaaatatcatttttcgtaaatacaaaggagcaactgggacgttaaattcctgtcatagttatcacccaaataactcacacctaagaaaggcagagcggtcctttatttgaggaattgcctattagaagtcaaacatgtttatttcccaaccaaagctgcctttagagagctgcgcagctccacgcatcgttccagtttccctacccatatacttccgttccgacattggaaaggttcattttagtcttcccaattgatatggacccgcgcgatgtgagaaacacgggcaattcttttaccttggtgagaaaacataaataagagccagggtct

SEQ ID NO: 27091 - DNA, 466 bp, Glycine max
  Clone ID: PAT_MRT3847_124464C.1
atactttttatcatccaggaaagattgctctatttattatctatccagcgtcccacgtgctaaaatcaaaaggcatccactctttttgataatcaatgatacatattgtgttatggttattccatgcgtctagctcgtaagaaactcacacaccttctgaaatgatcagtattgagcaaaaagtttgtgataaccgaaaaaaaaaggtaagtacacgtgctttatattataaaattcattttgtctctctttattttgaattgatagcgtttgaatttaaggaataggcaaaatagaagaaaatagaaggcattcacagaatattccctaaagtttgctttcgccaaggacaaggaacacatggtattgtttttactatcgtgcattcctcgcaaatcagtgtacgccacatagccttatcctcctctgtgtgacaacgatcttttcaaggaaatcatctctaccc

SEQ ID NO: 27092 - DNA, 477 bp, Glycine max
  Clone ID: PAT_MRT3847_124465C.1
ggcttggaacctttgggctgatttatgtgcttgcatggtcgtgagaagatgatagaagggcatggtcgtgagaagatgatagaagggcatggtcgtgagaagatgatagaagggggttgcggaagagagaaatttcagggcccggaagaagtcgactggagaagacggcgtagtgctctattcattgtaagtgttatagtcacgttattaaacttaattagtatagagctgctaagatctttggcggtaagtccgcccactagattatgaagaagagggttagtggatttaagcgtttcgctatcggaaagaggacctaagggaccttatacccaaggttaatagaacacaagagactaaggccatttaaaaattgaaggatcgcgaattgcgtacacggcggcgcgccgctcggtagcgtcgccagagagagaactacctgagtccctccggccgaaagagtaaagaccgcgaaaa

SEQ ID NO: 27093 - DNA, 143 bp, Glycine max
  unsure (1)..(143): unsure at all n locations
  Clone ID: PAT_MRT3847_124466C.1
taggaaaaggaagttagagctcatttatactggtccacttggccctaaatcttgagaacttattagnntattncgaggcaactcgaagagagttcccaaagatcatttttctggatataaccctgctacgnggatgcaggagg

SEQ ID NO: 27094 - DNA, 317 bp, Glycine max
  Clone ID: PAT_MRT3847_124467C.1
ccacgcgtccgacctgtttctggcggctgcctcaagactacgtgatgcggcatccatctgcgcttacgtaaactcttgcccagaggaccatgtgaatgagggaggtggtaacagcaacaccagcgggctctggaggtagatgttctgttgacaccgttggcgactctgtgtgggttcccaaggaggtaacctcagtgcagcatgcttcttctgcattgtagcctgactcttgttctcagttgagctcatttgaccaacacttggttcggggtttgacagaagcagaagccactgcggcttgagcttcacctcctgat

SEQ ID NO: 27095 - DNA, 520 bp, Glycine max
  Clone ID: PAT_MRT3847_124468C.1
cccccccaaaaaaaaagggggcattaaaaaaaaaaggtaaggcccctatttgaaaggggcatataagcacccctttttacatttggagggggccaaacttttcctaaattgttgaaaagggggaaggtcccccccaagggaaaacaggggattaggaacctaaaaggccctgttttcccctttggggcctcaaaaaaaaacgccccatggggccccaaggatcccaacaattttgtttccccccccaaaaaaaatttttttaattgcggatttgaaaaaaagggcctttggggggaaaaaatggggacccttgaaaataaaccgcccccatggggggaacccccccttttttagggtgggtttggtgccggccattttggaaaaaatttttcccgaaaaaaaaacaatttgaaagccaaaaaacaaaagtttggggaaattttaaaaagtctttggaaaagccggggggccccccttttaaacccattcataataaaaggtttcataaaatccccccccc

SEQ ID NO: 27096 - DNA, 298 bp, Glycine max
  Clone ID: PAT_MRT3847_124469C.1
caggatatgaaaattgggcagagtgcattaagatcctaaatgaaaacgaaagtggaacaggctcagctcccttaacacggaggggaattgtataaaataattacatcgagtaatgagattctttttgtaagttatttcttctttgagaggtacatatttgctaacttgtatctttactttctttcatttggaagtccatattggctttatttgtagcaaagggaccattaaagctctggtagaaatgcacaatgagttttttttataacagagaaaaaaaaaaagtctggttacttta

SEQ ID NO: 27097 - DNA, 299 bp, Glycine max
  Clone ID: PAT_MRT3847_12446C.1
cttgttcaagggcatgttttgaccactttatactaagggggtttgttgagacacaggacaccagagtgcaacataatacatactacataattttgaagttttgaaactatatatagatcttatcattatttctaagggccatctctgcttgaagctatagctctccaacacctcacttgcaagtgcaggggttgcaggagcagttagctccacatagcgcaccaatgatgttacccggaacacccattttagccatctagcactgacccttaactgaccgacgctccatgaccaaggaa

SEQ ID NO: 27098 - DNA, 389 bp, Glycine max
  Clone ID: PAT_MRT3847_124470C.1
atgtttcttggcggtcaggaccggatggcgacacataagaccgaatagaaactcgatgatgtctagactccaagaggctccatgttggatcttacaaattgtcgatcgaaaattgcacggaccgagaacacatctgtgggaaccacactgactaggggactaatggccaattccactacaaagggaaatgctggacactgtgctgtttgagtataggactcatcgtcttaaaggaacgattaatgtggctgtcacagttgtctgcttcagagaaagcaggaatctgatgaaatctgtgcattgaagctcccactctggtggctgcgctaggactgatatggacagactctgctatcaagactgtgaatttgacaatcttgttctcacag

SEQ ID NO: 27099 - DNA, 269 bp, Glycine max
  unsure (1)..(269): unsure at all n locations
  Clone ID: PAT_MRT3847_124471C.1
cgcacccaatgtctggtcccgaaagtggcaagtactcgtggaaaggtctgcgtatgatgtacgaaaaagtgcggatcatctcaggcggtcacaaccacgtgatggaggacttcctccacatttgtgagacagaaatgtgccgcatgttggagatgacgtgcgagtcccatgatgagtatgggctcagcagccaagtcctgactcacttgactggccgaattctcagtgtacagggagtncaaaacacgctcatcgacactcgcgggttc

SEQ ID NO: 27100 - DNA, 975 bp, Glycine max
  Clone ID: PAT_MRT3847_124472C.1
cggtgaaagccaattatcgggttgagtcgtgtggaggcaaggtaccaaagtctccaaaagtcaacaggtagatccggttgctttgatccgtttcgctctctattgggtcgtaccctcttctttagtttccaacagcctctctctctgcttttgctagtgattgtcttctgacaggaacttaaacaatgaagactgcaaagggcaagggagcagcgaggccctcaaaagaatcactgaagcctgttgatgaccgaaaggttggaaagcggaaggcttctggtaagcctgagaaaagcagagcaccaaagaaggagaagaaggccaagaaagaccccaacaagcctaaaagaccaccgagtgctttcttcgtgttccttgaggagttcaggaagacctttaaggctgagaatcctctcgtgaaggctgtatcagttgttggaaaagctggaggagagaaatggaaatccctgtccagtgctgagaaagctccatatgaagccaaggctgcaaaaaggaaagctgagtatgaaaaacttatcaaagcttatgagaaaaagcaggcaagctctgcagatgatgatgaatcagacaagtccaaatctgaagtgaatgatgaagatgatgccagtggagaggaggaccaccaagaggacgaggatgatgaggaggaagaggacgatgaagatgatgactgagattgatgtccaaaaccttggttatgatattttgtttatgagggaggctattatatattctgactgtgcatactaggctactttttatgtttgtgctggtagaaaagaatgtcttctttgttggtacgatatattgccaactacttgagcttccctcacttagctatcgtacctgaatcactttttgtgcattgtagccttaaatgggttgctttaagtaatataatttctttctgatcaatgcattggcaaaattataatttttagtaaaaaaaaaaaa

SEQ ID NO: 27101 - DNA, 913 bp, Glycine max
  Clone ID: PAT_MRT3847_124473C.1
gtggtactgtcttagctttgattctctgttctctgttttgttctgtttcgcgtgtaagttcccctgttcctcttttcctctttctaagattgtcttcatacaggaacttgaacaatgaagaatgcaaagggcaagggagcagcaagggcctcaaaagaatcactgaagcccgttgatgaccgaaaggttggaaagcggaaggcttccggtaagcctgggagaagtagtgcaccaaagaaggagaagaaggccaagaaagaccccaacaagcctaaaagaccacccagtgctttctttgtgttccttgaggagttcaggaagacctttaaggctgagaatcctaatgtgaaggctgtatcagttgttgggaaagctggaggagagaaatggaaatccttgtccagtgctgagaaagctccatatgaagccaaggctgcgaaaaggaaagctgagtatgaaaaacttatcaaagcttatgataaaaagcaggcaagctccgcagatgatgaagaatcagacaagtccaaatctgaagtgaatgatgaagatgatgccagtggagaggaggaggaagaggatgatgaggaggaagaggacgatgaagatgatgactgagattgatgtccaaaaccttggttatgatgttttgtttgtgaaggaggctattatatattctgattgtgcatactaggctacttttttatatttgtgctggtagaaaagaatttcttcttttgttggcatgatatactctaccaactacttgagcttccctcacttagctatcgtacctgaatcactctttgtgcattgtagccttacatgggttgctttaagtaatataatttctttctgatcaatgcattgttataattatagttattagtataaatggaattatcattttctgatc

SEQ ID NO: 27102 - DNA, 695 bp, Glycine max
  Clone ID: PAT_MRT3847_124474C.1
cacgcgtccgcgcgcactctctctttttctctctgttttttgttctctcttcgcttaaaccctatcgttcttctcgttttcgccgattctcgccatgccgaaagctaaatccgacgccaaagccgccgatagcaggttgaagcggaagggcgctggtgctgggaggaagcaatcgaggaaagctgctaaggaccctaacaagccgaagagacctccaagcgctttcttcgttttcatgtccgagttcagagagcagttcaagaaggagcatcctaacaacaaatccgtcgctgttgtcggcaaagctggtggtgaaaaatggaaatcgctatctgatgctgtgagaattatgattttgagaaatattttaatgataattttttgtgtgtggttgtatatgatttaatttaacgaatcatgtctactttttctgtaacctagtttgcgttaatttaatgtttcaggaaaaggcccctttcgttgctactgctgagaagaagaaacaggagtatgagaaaactatttcggcttacaataagcaattggtgaatactttttaccctatgtacttttttacttcttactcatattgtatataactgtttataatgtattgaacttgttattttgatgtgttaggagggaaagaattcagaggaagactagtttgacaagttaaagtctgaagttaatga

SEQ ID NO: 27103 - DNA, 681 bp, Glycine max
  Clone ID: PAT_MRT3847_124475C.1
tacggctgcgagaagacgacagaagggggctagtggtactgtcttagctttgattctctggtctctgttttgttctgtttcgcgtattgtcttcatacaggaacttgaacaatgaagaatgcaaagggcaagggagcagcaagggcctcaaaagaatcactgaagcccgttgatgaccgaaaggttggaaagcggaaggcttccggtaagcctgggagaagtagtgcaccaaagaaggagaagaaggccaagaaagaccccaacaagcctaaaagaccacccagtgctttctttgtgttcctgtttgtatcttctttactctttccttcatatctctccctcagaaaaatgatatgacttattttccttctctgtgatagtgaggagttcaggaagacctttaaggctgagaatcctaatgtgaaggctgtatcagttgttgggaaagctggaggagagaaatggaaatccttgtccagtgctgtaagctttgcaattgtgataaataatggctcattttgttatcttttaaattatttgactcttcactgtttttttagttgttttcaatataaatttattttgaagtagatatagtttctcatttgtatgcaaatgttgcttcaatttgaattccagtaatatcaatatatatgtaccaaatgaactcattctattgaa

SEQ ID NO: 27104 - DNA, 364 bp, Glycine max
  Clone ID: PAT_MRT3847_124476C.1
tcctttcgtccgcccacgcttacgcggacgggggggtgtgggatgaaggtcctgcccgctgtgcttaacagctagtgttcttttttcgatccaacacctttatttgcacacgctgcttcttgagcttgagatatggcttcaagaaacccctttctcttcacatgtgagtccgttaacgatggttacccctacaagctgtgcgaccagatctctgataccctgccggatgcgtgccttaaacaggacccctaccgcatggttgcctgtgagacatgcaccaatacccacatggtcagggcctgtggagagatcacaaccaaggccaaccggcttctatgataagattgcccgtgacacatgccgc

SEQ ID NO: 27105 - DNA, 913 bp, Glycine max
  Clone ID: PAT_MRT3847_124477C.1
ctattgggtcgtaccctcttctttagtttccaacagcctctctctctgcttttgctagtggtactgtctcttagctttgattctctgttctctgttttgttctgtttcgcgtacaggaacttaaacaatgaagactgcaaagggcaagggagcagcgaggccctcaaaagaatcactgaagcctgttgatgaccgaaaggttggaaagcggaaggcttctggtaagcctgagaaaagcagagcaccaaagaaggagaagaaggccaagaaagaccccaacaagcctaaaagaccaccgagtgctttcttcgtgttcctgtttgtatcttctttgctctttcctttatatctctcccttggaaaaatggtatgacttatttcgttctctgtgatagtgaggagttcaggaagacctttaaggctgagaatcctctcgtgaaggctgtatcagttgttggaaaagctggaggagagaaatggaaatccctgtccagtgctgagaaagctccatatgaagccaaggctgcaaaaaggaaagctgagtatgaaaaacttatcaaagcttatgagaaaaagcaggcaagctctgcagatgatgatgaatcagacaagtccaaatctgaagtgaatgatgaagatgatgccagtggagaggaggaccaccaagaggacgaggatgatgaggaggaagaggacgatgaagatgatgactgagattgatgtccaaaaccttggttatgatattttgtttatgagggaggctattatatattctgactgtgcatactaggctactttttatgtttgtgctggtagaaaagaatgtcttctttgttggtacgatatattgccaactacttgagcttccctcacttagctatcgtacctgaatcactttttgtgcattgtagcc

SEQ ID NO: 27106 - DNA, 1145 bp, Glycine max
  unsure (1)..(1145): unsure at all n locations
  Clone ID: PAT_MRT3847_124478C.1
aagaaaaaagcaatagagatagaagtagaactatggaggagaccattccagtgattgatgtggagaagattaattctgatgaaggagaatgcaagaagctaagagaagcatgtgaaagatggggttgtttcaggatcattaaccactctattcctgcaaccctcatggctgacatgaaaaaagtcattgaagctcttcttgatcttcctatggagatcaagaagcgcaacacagaagtcattgctggcagtggttacatggcaccaagcaaagtcaaccctttctatgaagccttgggcctctatgacttgggttcatcacaggctatgcacaatttctgctctcagcttgatgcttcacaccaccagaggcaaatattggaggcatatggccaagccattcatggtttggcagtgaaaataggacaaaaaatggctgaatctctaggcgtactagttgctgattttgaggactggccatgccagttcagaattaacaaatataacttcgccccagaagcggtagggtccactggtgttcaaatacacactgattcaggcttcctaactattcttcaagatgatgaaaatgttggaggccttgaagtgctccacagttctacttcttttgtgccaatccctcttttccctggatcccttctagtcaatcttggagatattgctcgtgtgtggagcaatggaaggttttgcaatttgacacaccgggtacaatgcaaggaagcgaccaaacgtttttcaattgctacatttatgatagcacccaggaataggaatgttgaggccccagcagaattggtggaccatgatcacccacgtttgtatcaaccttttatttatgaagactacaggaagctcagaattagcaataagatgcacactggtgaagccctggagttattacgcttggcctagtcatagcaactaggatttatttaattgggaaaataatacccccacttttcagatatttatgtctttttttgccaattaatgggggaaataagtgaccaactgctaaataactcaacgacaccttatgagggaggaatggttaggtaaactttcgaattcaaatgaacttataaagatattcccattgaaaaaaaaaaaaannnnnnnaaaaaa

SEQ ID NO: 27107 - DNA, 477 bp, Glycine max
  Clone ID: PAT_MRT3847_124479C.1
caaaagttgcattaataaaaaacaggggaccaaactatcgacatcacaaaacaggggagcctcatgctatgatgaccaaaatcagatcgctgacatagcaaccaacacacaaaccagagtgcaacagacacagtgaggagctggacaaaactggaaaaaagcaagacatggccaaaacaagattgtccacgggaagcaaacaagaagatgcatggaacacaaggccccaggcactgagaaagaggccccagccatcatgcaagataactggttgtgaaagggacaccttcccgtgtgctaacaataaaatctcgaaccaggctggaggcgaattctgaatgcgaaagctaaccagatgtagaaaaagtcctggggaaataagtggcttaaccaataaaagggatgacattggctgctgacaacttatgcactcgagcgagccactttttgggcttacctttcacagtccgttctgca

SEQ ID NO: 27108 - DNA, 204 bp, Glycine max
  Clone ID: PAT_MRT3847_12447C.1
gattaatgaaaacatccttggcggaggcttagagagacattctatgttgatcaaaactttatggaaaaggtgattatgaaagacgaatgacataaactgaaactgggaataattacttggattccttcggccaacacgataagaaaagactgctgtggtgggagccaatgataatgtatacacacacttggctcgctgtggaaa

SEQ ID NO: 27109 - DNA, 442 bp, Glycine max
  Clone ID: PAT_MRT3847_124480C.1
tgttttctttgttgctgctgtagttatggttgcatggccatgccatggcgcacgctaacaaaggtttcctctgcgaatgagaactggctttggtgagcgttcttcggatgtttcattcccttgttttatgcttgctgtggaaacacacaacatccgagcctttaaaaccattcctgaacagtgcgatttaccaactaaggacttcattgatggcaaacaatttacatcaaactctatatcagttaatcaacaagctttcttttatgctagtgaacgcgaagtccatcacatcgacgtatttatattctgcatagattacaccgtactctctgatatcccatactatgaaaaacttggatatggggtggaggaatttaatgaaaccttatattatgaatgtgttagcatggcgatgcaccggcacttgtctgagacttttaag

SEQ ID NO: 27110 - DNA, 453 bp, Glycine max
  Clone ID: PAT_MRT3847_124481C.1
ttctctcaccttttttctacactgtgtaagaacacaacagtttacagattaaacaacacaacagaaaactctgctagcctttattattatattatggaagagaacagagggtgacccacaaacttagtccaaacacagttctcttgctgaaaccgatctgaaaaagccagtaaaagactcttacttaggatgacttcgatcttgggattcgtttccggatccctacaaagatcgtcttaatcccatcaccatgcatatttttttttttattcttaaaaaattcacaaggcttgagttgtgattgtgaaacaataaacaaattcatgggcgcagagagatcctacaaatctacaatttttctatcatggcaacattatggtgggtttggttttggatgcgggtggtaaaagcagaatttgttaaaatatcaacattttcgtaaactcatgtggc

SEQ ID NO: 27111 - DNA, 247 bp, Glycine max
  Clone ID: PAT_MRT3847_124482C.1
gggtttgctcttctggttcttgagaattggtttacactgttctgcaacttccgtttggtgttcatcttcctgaacttaatattgagtctatttgcactgctatatagataacaagagataagttttcacaaatcttttcgtcaacacaatatcatcttttttgaaagatgatgtttatataaacacaaagaaagagaaaacttatctcttgttatctatttgcactgctatatagtctagatcgcga

SEQ ID NO: 27112 - DNA, 291 bp, Glycine max
  Clone ID: PAT_MRT3847_124483C.1
ctcaatcccacctcgggtagcaattgtgtaaacgaaggcggatatgtttcacctggacagaatgatcagcgagccgccgttgaggtctcctacccctaaattgacaccgcgcatgagggacggaatgacgaccattgccggaggaaggccgatgctactggtgcgggatccagcggtcacgaccgactacgagcgggggccggacatagaagaagcgatcgggcacgatcatacggctgcacgagtgaacgatgcaggccatgacagatacggagatgcagacgtgagcct

SEQ ID NO: 27113 - DNA, 353 bp, Glycine max
  Clone ID: PAT_MRT3847_124484C.1
ggctcgaggagacactggcttttcttttgaggattaatgatagaggcagcacatgcacagggacatggacaaacatggtgttagcgggtctgaatggtgctgcatctggtgcttgttgactgtgcttaagtgtgccttttcggcttcggacatgaaaggtgggctcaactcatggggatgttgttcaagtttatgatactcacagattcatatatccaataaacggttcacgactgtgtacctttcctaaagagtaggatagggctacattacagattgaaaatgaaattgtaaaggacggggactgcgatttgtggtctttgcaactaatgattaactcccattgaaggtgt

SEQ ID NO: 27114 - DNA, 767 bp, Glycine max
  unsure (1)..(767): unsure at all n locations
  Clone ID: PAT_MRT3847_124485C.1
ggtatctcttcggaattccaaaagagacaaagcgtccgaaaaattcaaatggtaaccacgaaatagcagcagcatacatatattcaaattaaaacccgctaaaaactgtaattgcttcttcgttttcttcttctgcagcttctcgcttctctcagttcagtgcccagagtagaggctagagctcctttcagaagaccgaaacctagggttagtgttttcgttcttgtgcagactgcagagccatggaagccgcagtggtcgaccccggttccagcctcctcaaagccggtttcgcgattcccgatcaagctcccgccatgataattcctacccaaatgaagcgaatgctcgatgatgggtcgatgacggataacccggcagtcgatgacgttgccgttgatccggtgtgcagaggttatgtcagtgattgggatgccatggaggatttgctgcattatgtattgtatactggctttggatgggaaatgggcaatgaaggacaaatactgttcacggatccactttgtactccaaaggctaacaaggaacagttagtgcaactaatgtttgaaacattcaacatatcagggttttatgcttccgaacaagcagtgttgtcactatatgctgtaggacgtatctctggatgcacagttgatattggtcatggaaaaatagatattgcaccagtgattgaaggtgctgntaaccacattgcctcaagaagatttgagttnggaggtattgatctaactaaattcctggct

SEQ ID NO: 27115 - DNA, 792 bp, Glycine max
  Clone ID: PAT_MRT3847_124486C.1
ttttttttttttttttttgaattcaaaacaagtactattataacaaatacaatctcagtgaagttttattattaaatagaatacatggcacactgacgacaaccttacactacaggtagcaaacctgtattcacaaactgctaaacgtttcatcagatgtaatatttacagagggaggaagaatggtaaaagaacatcaccaactacctaatcaaagtacaattttcctaccttgataccccctccaccaccagattgccaaacgatttggatattctctcaactcaatttcaactgatgacagaataactcaattcgtcaacaacctaacgtagaatggagtaataatgtaacatgctgataaaatttgttaactacggagaccataacaatgaaaactagatttaaatccaactctggggcatggggtaacctttgattggttcagatggatcactaactagacctctcccgctgcttgagccacgggctagaactccccgttagcattgccatcagactaccaccatgcaccctgccttcaggaacaacaactgacattggcaagtgaccaccttccttaaccgagacatgagcagttgcagcttccaactgctcgaagtcagaacaggttgcagcagcgcctaggctactccctattttcatcatatttacatccatgtttttgtcaatgagtacctgctttagttcatctgctttactggaatgaggatcctgaacaacagatcccagtgagatgcctccatgaaccctcttgtcatgcactagccc

SEQ ID NO: 27116 - DNA, 2235 bp, Glycine max
  Clone ID: PAT_MRT3847_124487C.1
tttgtattgaattcaaaataagtactattataacaaatacaatctcagtgaagttttattattaaatagaatacatggcacactgacagaccttacattacaggtagcaacctgtattcacaaactgctaaacgtttcatcagatgtaatatttacagaaggaggaagaatggtaaaagaacatcaccaacaacctaatcaaagtacaattttcctttccaaattgatatctcccctccaccagattgtcaaacgatttggttattctctcaacacaatttcaacggatgacagaataactcaattcgtcaacaacctaaagtagaatggagtaataatgtaacatgctgataaaacttgttaactacggagaccatgacaatgaaaacgataactagcattaaatccaactctggggcatggcgtaacctttgattggttcagatggatcgccaactagacctctgccgctgcttgagccacggctagaactccccgttagcattgccatcaggctaccaccatgcaccctgccttcaggaacagcaactgacactggcaagtgactaccttccttggctgagacatgagcagttgcagcttcaaactgttcgaagtcggaacaggttgcagtgcctagactactccctattttcatcatatctatacccatgtttttgtcaacgagtacctgctttagttcatctgttttactggaatgaggatcctgaacaacagatcccagtgagatgcctccatgaaccctcttgtcatgcactagcccactatgaagtgcacatagacctgttttcccccttgcaaatgaattgcaaggaccatcctgttggatgccatattctgaacccggatggccccaagagcatctcttgcctcccccatgtgctttgcaaaagtcagtgctgccttgtgcactctttccacagccttcaaacttgcatctcttgcctcccccatggcggacacaatgatcagtccttcctctggcactctttgtgcagcctggtacagcacacctctttccacccccatgtgccacacagaagttggtacctccatgcacacttttagtgcatactccaccaccctggtatgtacagcgttttccccctccatggcccttgcaatatggggtgctcccatcagcacctttggtgcaccctggtgcagtacaccgtttacccccaccatgtgctttgcaaaacattgtgctcccctgtgccccttttgtacatccaggaacttggcatcgacgccctccaccatgtgagatacaaaggcctgataggccttccgcactcttggtacaattttctctctggcatctcttgcccccaccatgccggatgcataatccagatttccctctggcagcccgggtacaaccttcatgactgcatctccggccaccaccatgggcaatacagaaatctgtacgtccttctgcactctttgtgcaaccaaggaattcacatcgcctgccacctccatgtgccttgcagtacactgtacgaccctcagctcctttgtggcaaccaggtttctgacacctcctacccccaccatgagatatacaacgtccagaagcacctctggcacccttcccacatccctccacttgacatgttttagaattaccggggcgatgtagtggctgttgctgctgtgtaagcccagaagtgcaggtgactgaactttttggtccggttgacgagaggtccacaacaatgggactatgatcaaactgcttcgatgactgacttaaaagaaaattagtacctgtatttgatgacatcttagaagatggcaaaacaatccctggctgccagctacatgaagttgatccctcatctgtattttgtgtcccactgaatgttaatggtatctccatattcaattgaagaggtgatggatttagatgtacacttgtaatatccgactcagagggcccagtggaaaggcttaactccaaatcaaattttggttgcaactcaaatatcttcaaatttggattaacaggtttttttgggctctttaccttctcacagccaagatgaagtgtaaagtccagttcaatatccataggcatggacgattcctcatcaatctctttggctgaagacaaagcagtgcaagcagtagctgaactccccttgctgtccgaggaacttgttgaacgcccaagcccaagtgacaaagaagagtcaactctttagc

SEQ ID NO: 27117 - DNA, 819 bp, Glycine max
  Clone ID: PAT_MRT3847_124488C.1
acggctgcgagaagacgacagaagggggaagacgctcaaatttcccgcgtccaaaaaacacagcaaagtgatggaagtgacaagtgctgttcaccttcactcagttgggtttctgcatttacagacacacgttgaaaggctcaacggtagagctttcttcctctccacaagaccaagaaaagtgaaggttcatcttccttgtcatcaccatcatcatctaaaccacttaagcaataccaacggtattggtgcttgcagtgatagaacaagtgttatactcaactccacttctgttacttccacaacttcttctgctgcggggtccctctctgaagtggaaaagataaagcagaagtgccttacatggcagtggaagggtcaatattccatcaactactttgtttcttctgattctcctcagcagttgcatggcagccaccctcctctcttacttgttcatggcttcggtgcctccattcctcactggcgcaggaatatcagcacactggcccagaattatactgtttatgctattgatcttcttggttttggggcttcagataagcctccaggctttcaatataccatggaaacatgggctcagttgatcttggatttcttgaatgaagttgttcagaagccaactgtactaataggaaactctgttggaagccttgcttgtgtcattgctgcctcagattcaagtcaaactcttgttagaggcattgtgctgttaaattgtgctggtgggcatgaataacaaagcattgttgatgactggaggatcaagttactattacccttgctttggctgattga

SEQ ID NO: 27118 - DNA, 215 bp, Glycine max
  unsure (1)..(215): unsure at all n locations
  Clone ID: PAT_MRT3847_124489C.1
gcacctcatcactgcactcgcatggagtcaaatgtgctaaacgcaacggttgaccttgtgaggggggaggggagaacnatcgactttttataatatgctcatggataaaaaacctggcaactactacatgctatagttaatagaactacatctcttgaaattgatcactatgtcactaactataatcttgacaatttctatattctgttcattga

SEQ ID NO: 27119 - DNA, 367 bp, Glycine max
  Clone ID: PAT_MRT3847_12448C.1
cttctttgtctcggtgcgtccattgctccaatccattttttctttttccttttccgactgtaacacccattttccttcccttgtctcattactcctataaataatttatccatctatcttatgcattgttatttattacaaaatttaataatatcacaccttccaacaacccctgccacagtaatcttgggttccaaaagaaggagaagatgaacgtggatctggaatcattggcagaggcaacttctggggccataggatcactgatcagcaccactattctctacccacttgacacctgcaagaccaagtaccaggctgaggctcgttcctcaggtcgaataaaatacaggaatctcactgatgt

SEQ ID NO: 27120 - DNA, 316 bp, Glycine max
  Clone ID: PAT_MRT3847_124490C.1
gcttttgcttacaaatacccacggctggcgagatgatgggcatgccattgattgcaagatagctcatgctcgcctcatcactgtagctgaaaaggctgcgataaaattgtcgcccaactctgccaataatgatttgtagagcaagtgctcttgggcagatcgtcatgcgcgtgcctaccctagcgtctctgctatgcattttggcgattctcctgactacgcttgacattacaaggactcacggcattgtgtacataaaaaaactgcatttaatggaccatgcgtcgtggcatcgatcactgatttctctagccag

SEQ ID NO: 27121 - DNA, 609 bp, Glycine max
  Clone ID: PAT_MRT3847_124491C.1
aaaacacagcacaatttttttgattgaatgcccatttttttcactttacaaaactttttggtttgtacaaaaggtccatgaatccttatttctgacaattttaaaacattgcagtttttaattttcttcccaactcctttctcaaaaattgcctataaaaacctgacgcaaccaaaagccctgtttttttttccccccttctgaagagggaagggctacccctatttcccgggccaaagggaatatacttctcaactagaaaccctggattgttcaaaccaaaggaaagggcctgttgctttccatacaggggggcaaattttagctgggggttgacctttccaacccccaattgaatggctttggtggaagcccatttccctgaaccaatattgggaggggaaaaaacaactgaaattgaaccgggtcctttttctatcttttctgaaaaaaatgaggcgccgcccttgaagcaatggggtttttcttgaatggggttgccaattggggatgcatacccaagtgactcacccaattcactctttggggccatgggggcgcctctaacctatttgaaccccttaggacctcccattttttctgctgcct

SEQ ID NO: 27122 - DNA, 149 bp, Glycine max
  Clone ID: PAT_MRT3847_124492C.1
aaggtgggagatgctgcgaggttagtcattaggtcacaggccatcaagcagcttcgaagcagtctaccgcttgtcaggaagctatggattttggaaggtgtgactccaagggagcctaaggaagagtgcaaggtaactcatcagactta

SEQ ID NO: 27123 - DNA, 324 bp, Glycine max
  Clone ID: PAT_MRT3847_124493C.1
aagcataaatgagctaacaatcaacatactctactcaatattctcaagcctatccatacaaagaaaatttatcaatatataacactactctataacctttaatggcctccaaatattctctaacatcttcatataatcacatatcatcactctaaaactcctatcttaatatattaatctgacaacattacacatcttacattaatatatataacacttactaattataacatacactattacatatatcaacttcttaaatccttatattactatcattctcactccataattcatatatatctcaatctctataattttatt

SEQ ID NO: 27124 - DNA, 139 bp, Glycine max
  unsure (1)..(139): unsure at all n locations
  Clone ID: PAT_MRT3847_124494C.1
gcgaggagctcatgctgtttctcgaggccaaggagcggctgccgctgacgaaaaccaccgacgacatttatggtatcattgacatcatcataacgatatatatacatgtctctagctaatcactgncaccatgatgatg

SEQ ID NO: 27125 - DNA, 384 bp, Glycine max
  Clone ID: PAT_MRT3847_124495C.1
ctgcgcccaatttcaaacttaattacacgggttgggccaagggaaactcccggggcagaggttccaaaactaggcgcccgggggggacaatgaaaaacctttttaatggggaacccaaaaaaaaacccccgggcgggggtttaaaaaacgggggggggggaaaacccgggggaaccacaaaaaaaaggcggcgagaaaccccccccttaacacaagggggaaaaaaaaaaaagggccccccccctccgcctttataaaaaaggggggcctttaggggggaaagagcccccccccccctttctccttaaaaaaacccggggggggggggggggcccccacgaggacacccttttattcgaagggccggggggcccccccaaaagc

SEQ ID NO: 27126 - DNA, 212 bp, Glycine max
  Clone ID: PAT_MRT3847_124496C.1
ggaaaaacccaatcctttaatttttttaccgtccatggttttttagtaaaaggggattttaaacttaagcaccaaatcggaccataatggattcaaatcctcgatttcccatccaaaatggtaaacattccacccccaaaacagccttccggtggcttccaattcccaccccttgggaggccggtcccaaacccctcaggccctttactaaa

SEQ ID NO: 27127 - DNA, 476 bp, Glycine max
  Clone ID: PAT_MRT3847_124497C.1
tcccgcggtcgacccacgcgtccgaatccttactacatctgacagggtatataggttgacctatttatccctggtgagaccatgttgaatatgaagaatgaatgcatctggttttgctggcagcagttgcacacagttgggcctgtcattctaggcgattcaagcttacggtcccgcgtgcactggcgactgtcactagcgtgtgtctatggatgttctccgtaaggcgcacacactggccgggcgtgtcaacgggtggactcggtaaaccctagcgagacccaacttaatggcctagcaaactatccccctttcagcagctgaagacatagcgacaaggcccgaacctgaccgccttccaaaccggtgcgaaccatgtattgccactgggacgcgccctggagacgcccatcatgcgcgggaggagtgggtgaacacacacaatgatacatacacttggacgactcctgagcccc

SEQ ID NO: 27128 - DNA, 452 bp, Glycine max
  Clone ID: PAT_MRT3847_124498C.1
tggcctgggccctttgggcttgggctgatgcatgtgcttgtgcttgtgcttgtgtgagtgtgggctagaagggctggttcgttttgggcttatttacgtgcatggtcgtgagaagatgatagaaggggataggcgcccgtaacatcagtgacagtcgacaagagagacattaataagaaaagaaaaaaagaagagccgagacctttcccgaagaaaagacggtactttacaggtaaagtcacgaagtcggctaaatcaagggttgaatcgaggaaaagatgaattagatgacgggtaacaccggagagaaggtctaagtcgtaaaggagaagatttaggaaacggtttaagtcgtaaaggagaagatttaataaatagtttaagtcgttaaggataagatccgtgatatcctttaagtggtaagggagaagatttaatagaacataggagtc

SEQ ID NO: 27129 - DNA, 274 bp, Glycine max
  Clone ID: PAT_MRT3847_124499C.1
aaaaaccaaaccctccccctttttttttccaacaaggcccattaaagtttaaaaaaattaggggaaaaggggcccaacaaaactttgaatcaaggggaggaatggaagttaaaaaccctttttttggcccctaaaaatgaaaaaaaacctaggccggggcagcaaagttccccccaatgggatttgcaagcaaatagggggggggggggggtcttttactcaaagagagagggcccctaactccaagctttggcaggaaaacaaaagttttttc

SEQ ID NO: 27130 - DNA, 233 bp, Glycine max
  Clone ID: PAT_MRT3847_12449C.1
atatggcatactctcaacttcaaaaggtggaaactagcctgcagatcaaggcttctgctgaacagttctatgactgtggttggcactagccaaacactattgccaacatttcatcagaggatattcagtcagttgaagttcatgaacgtgcatggggctaagacggatcaatcgtctcctggaactatcgacatgagggaacgtctgtgtagccaagcaagtgcttgaaggca

SEQ ID NO: 27131 - DNA, 563 bp, Glycine max
  Clone ID: PAT_MRT3847_1244C.1
ttttttttttttttttttttttttttaagggaaaaaaaactgaacttataataataataataacaatagaaatattgatatcctggttgagtaggattatcgataattgagacagtaattacaagtcttgttttctggctcagcaatacaacggatactgtacggatgagtttcctagagaggaagctgatccagacaccttaaagttaaactaagcgtaaccatgagaaaatggattaatgttactgctacgaactgaattattatcacgatgaccaaaaagatttggatgaatgttttcgtcaccgtcaaatgttgttgttgtccaacgcctagagttgctgtgtttttctctagcaatgttgcgcatgttctccatttccgcaacatggtccttgaattccttcttcaccacatccagcacaacatcaccgtatcggtcacaccatgatttgggaaagtaattttttaactcagccttgtccactggaattctggtagaaattgcttcaatctgatcattggagaacttaagatttgggtttgtgctgctcagttctgtc

SEQ ID NO: 27132 - DNA, 236 bp, Glycine max
  unsure (1)..(236): unsure at all n locations
  Clone ID: PAT_MRT3847_124500C.1
tttttggttttttttttttttttttttttggcgcgaaggcggtgcaattattatacgccgcggttcgtaattcacatcagccgaactttatacagaagcgaccattttccaaacatttgaaaaaaaacgaaccaatccttagcttgacacacccattacatgtgcggaggtgttgaagttgctgaaaggcacaacattaccactttatactaaggatgtnggttaaacacaaaaca

SEQ ID NO: 27133 - DNA, 380 bp, Glycine max
  unsure (1)..(380): unsure at all n locations
  Clone ID: PAT_MRT3847_124501C.1
ggccgcccanaaaaagagtttggagaaatgaaaaggatctaagactccatatccagaccgagatgcttctacatttgactaatttgtacattggtgttatttctgaaagtagaatctcgatcactatcttttagcaaaaattattttatggtctcggaccactacatatccataattacaacctattattatataataacattgttggaatattaagactggttgaactattgtgacactgactatataataatttcccatctgaatctatcttaatacactcatacacatgcagtgctggaagaacaaagttagcaagctagagagncgaggccatatatatcaccgtgcttggagaagttccaggctttgccaccttt

SEQ ID NO: 27134 - DNA, 422 bp, Glycine max
  Clone ID: PAT_MRT3847_124502C.1
ggagacgcctaggatccaacctatatcattggccactaaccagtgccctacgtcgaggaaaccatgcgaaatatctactgccaaatgggtgctcgcatctactattgccgcattgacccaccaaccgaacgtacccttcaccaaatcaactaccctgagacctacaaactaatcttcaaccatctgagctccgaattcgagaagaacaacgcactgaatcaccttatccagctcctcggcgtacctatcgcctacccacgccttcaattgctccaaaacatattctgctctcccctgatcgcacccattaaatttctcaacaagcgcttcagctttagcggcagcgtcttcaacataatcgactgcaacgttcacctgctggacgacctagacgaccactacaccgcgcaccagcacaagca

SEQ ID NO: 27135 - DNA, 550 bp, Glycine max
  Clone ID: PAT_MRT3847_124503C.1
ccacgcgtccgagataaaaaaaaaaaggaaggagaagatgggggtgatgacaaagaagagatagagaggaagatgtagtgcagttatcagaggatatgtgcactggacggtgagtgatttaggacgtggacaacgctctttgctgaaactgatggctatattcttgctttgcactaccaaggcaaagccttgagggctctcactggtttctttgagaagctggacaaagagaaaacaaagttgggaggttgatgatgaacatcaactttagatgatcaatgaaagaatattatccatggagatgaccatgatggattatgtaagcaagctaacagcctacggtaggttcttttggtttttcccacaaacccccattagttacaattactatttttattattttaatttttatgttttcctttgttgtacttttggaagttgggatcaaggaaaatgtttatcccatgatcgatgttcttacatatttaattgttaattttttttttgaagttcttaacaggtctttctttctttatcactgcggtactat

SEQ ID NO: 27136 - DNA, 214 bp, Glycine max
  Clone ID: PAT_MRT3847_124504C.1
aatatttgcacggcgtcctcatctctttcttcttctctaggtctttttttcctggaaatctataaacgctaaattaacgagggtgaatcaactagccccataatccccaagctagttagcatccctcttaaacaaaattctaacctactcccgaatgtaacaacaaattcgaaacttctctgaaccattttactatctatgaaccccaaattcc

SEQ ID NO: 27137 - DNA, 1194 bp, Glycine max
  Clone ID: PAT_MRT3847_124505C.1
ttcatatagaaatcaattcttttatcgtatccacaaaagatgaaaattctttttacaacattcagcagcaaaacacaccgagagaaaggggacgaggggcaacaaaaataatataatagcagcattgaagaattgcaaactcgcagaagggaatctactgatgccagagatcctacacattttacctacaaaatagaaaagtgactggcaagagaaaaaaaatgtcttaattgtcattttcacccaaggttctagcttgactaccatccaacagctcctttacacaaaattgatgcaatttttcattcattttcttcaactggttagccatttgcactgacttttggtaatcatgttttagtttctccatctccatttcagaagcagcagctgaaccttgatgctgaagttccttaatgtaattagatatcacatgagaactgatgtatgaaggatccacagattttctgccacccccaaggctgatcatagtcttcatatctgagtcgtcatctattgaatttgcatatttttccaatggagggggtaaatttagatccctgctttcttgatgatgcttgtacattaagaagatatgtgattactggagtcattttctcgtcttgcgaagaatgttgcgatttacaggttttctagaatgtttaaacatgccctacaatgttacgagttctcgcattccaaacgtgccataattccatcaagtgacccaattgctaacaaattctcacttgagccatatgctaagcaagtaacttggttgctggggttagaaaaagaaccgatgatatgcatcccttaattattagtggcgatgctttcagtgttaagtgctgcgataaatatctttccatcttcactgccagcataaaagacatgttcggctggatccaatgcaatgcaattaattattgaagggaatactatatttcttagtagcattcccctagataagctccataccttacaagtccgatcctttgaagctgacacgataatcgcattgcaccctccattaccaataacaacatcagtcacagtcagggtgtgctctgaaaaactatactcataaagactacttgcttgctgatttcgcaaatcatcaaatatcatgaagagagaccaaactcttacggatccatcttcagaaccagataccagcagccggacgcgtgg

SEQ ID NO: 27138 - DNA, 436 bp, Glycine max
  Clone ID: PAT_MRT3847_124506C.1
ttatgataaatagcttctaaaaaattctagtcgtatctgaggtttcccttaactttcatgtactgtgtgtgccatgatttcagattatggtgaaaaactaattttgtgacttcagaagagacaactttaaaaggatattactaaaattatatcatgtgaaacttacaacaaccaatctctcttaggtactgccctgtcatccagagtatttcataactcatggactctaaatgagtcaatgttgagactatggctgttatgttaatagcattataccctgagattagcatcctttctgaatttaaaggaactccaaaagtctgatagaaaccttgaactagttagtaccaaacccaaaataactaaggctatgttaagaaaagaaaagagtggctttgtaggggatcacaacgaaatggaagagaatgaaaaggat

SEQ ID NO: 27139 - DNA, 484 bp, Glycine max
  Clone ID: PAT_MRT3847_124507C.1
aaaaaccgggccgacccacgcgtccgctccgataagacaacacaacgggatgaatgaaattaccaaatttaccttcactttcccttctcttctcttcttccttgtctaagttgctggagaggtcactgcaaacatcgagaagggagggtgaaaaaaatcgtaggagagctagacaacatggagttcagtggggccatcttggtattttgtttcctctatctgcattagttgcttatgctaattgttgcttctttttgttttctttggtcttgtaaggccaacttctccaaggtgttgaccgcgcagaacaagaatttaaataggacaaaaatgttgctaatgcaatagctggagaaaagttgaaattactgtgatgcgcattccaaagcaatacaatggataacaataaaatgaaacccaaagcaagagtccttatgcttttgcaaaagtacttttgcctcaaaagtacttttacacctaattt

SEQ ID NO: 27140 - DNA, 294 bp, Glycine max
  Clone ID: PAT_MRT3847_124508C.1
gcgcctacccgtccgtttcatcctttaatggcggctcacaaaaaaaggccatactacagatcatgcgggcgcgatgggctctatagggggagttgcacacgcgctggcatctcctacagaggctcacatgcgtcgaagcatggcccaatacggctaaagcagctgcacatcatacacacaccgtatggaatgcctgacgagtttaaacactaacagaaggtgcaggaccgtaagtgcctaactttgattgatgctaaggaaaatcggaacacgaacattggaacatgcgtagag

SEQ ID NO: 27141 - DNA, 947 bp, Glycine max
  Clone ID: PAT_MRT3847_124509C.1
gtcgctcgtaaaagtgacaagtgacaacaaaaccccactctaccagtccccctatcttaagaaaactaagcataatccattttcccaacatcgcatattgcacgacacgagcgttgagacagtaaccacgatgtccaaactatagacaagatgaaaacgttggaaatgagtctattagcaggtgcttacgttcaaccccgcttcccttgtaactacaacccaacgctttccgcatcttgcagaacccaaaagacagcaacttcactaaccgtaacaactcccaagaaaacagaaaaggcgttattcactgagtcattcgatcaaacacgtgacgcgcaacctctccccgaaaagaagaagagggtgttcttcttagacgttaacccgctctgttacgaaggaagcaaacccagcttgcactctctcgggcggtggctctctctgtttctcgagcaagtcagccataccgaccctgtcattgctgttattgatggagaaaggggtagtgagcatcgcagaaagttgctaccttcatataaagcacataggagaaaattcacgagacacatatcatctttgcaaagattttcaagtggccatgttgggaggtccctccaagttatcaatgatgttctcggaaaatgcaatgtgccagttataaaagttgatggccatgaagctgatgatgttgttgctactcttgctggacaagttctcaataaagggtttcgagtggttattgcctcccccgataaggattttaagcaactaatatctgatgatgtgcaaatagttatgcctttgccagagttacaaaggtggtccttctacaccttgagacactacagggatcagtacaattgtgacccagaatctgatctgagccttagatgtattgtaggtgatgaagttgacggtgttcctggtatccaacatctggtccctag

SEQ ID NO: 27142 - DNA, 281 bp, Glycine max
  unsure (1)..(281): unsure at all n locations
  Clone ID: PAT_MRT3847_12450C.1
gggggtttgtttttttccttnnnnttctttttttttttgtgtttttttttttttaaacaaaccttaacgtccttttttcatccttgcctaaaaccatgggggaataatggacccctaaaactgctggtggacaaaaaaaaatgacgttttttttccccgtgccgcccaaattttcatagcttgcttaagccccccaaaaatttaaacccgtttccctaataaactttttgacctttgatcaaattttttttaattgcccctccctttgatgaaattttttt

SEQ ID NO: 27143 - DNA, 264 bp, Glycine max
  Clone ID: PAT_MRT3847_124510C.1
ccataacatacgctccgatcaaaatttgacagaggagcactcttaatactgcttgtaccagattcttcgcgggcttaagcatatacagttccgaaacgtgatccatagagatttaaaaccaagcaacctgttgctaaactcaaatttgtgacttgaaagatttattgacttttggtctttgcgagactcaaactttggaaaagcgactttcattgacatgaatattgtaagtcacaagtatggtatcagagcctccccgaaatt

SEQ ID NO: 27144 - DNA, 1258 bp, Glycine max
  Clone ID: PAT_MRT3847_124511C.1
accaatttgttttccagaataagtaggttgggagtgatgatgttatgtgtagcacataggaattgccgaattggatacaatccggaagaataagcttggagagcaaggcaatatttggatgttttatggcagaaataggtgcacggcaggcatgggtttcagcttttgtgactcaatcacccaccataaccattattatcagtacatagtactagttaatctcagtcatgcctattcctaggtttatgctcttttcatcccagcatcgctccactgctgcggccctcgctcttcttcgaaggtgcgttccctctacgacaactcaatctgttaggtattcaaaatcaacaagtcacggtaaaacaaaacattatcttcatcctgtattccaaccagaatccagctccgcctcccaggtttctcgctcatggggtgcctatgttgttccagctgctgttcttggatttgctgggcttgcagctttttttcactataatgatgagagaagagcggttcccaaaggtcatcagggtggtggcctcagaaatgttgccaatggacccataattgggggtccatttacactaattaatacagagaaacaagcaattacagaacgtaattttcttgggaattgggtcctcctctactttggttatacctcatcccccgatcttgggccagagcaagtccaaattatggccaacgcaattgatatattagaatcaaaacagaatctcaagattctaccagtatttgtttccattgatcctcaacgtgatactccctcacaacttcgtgcttaccttaaagagtttgattcaagaatcataggattaactggacctgttgcagctattaggcagatggctcaagaatatcgtgtttactttaaaaaggtagaagaggatggcaatgattatcttgttgactgttcccacaacatgtatttgctgaatcctaaattggaggttacgagatgctttggagtcgagtatagtgcagaggagttgtcagaagcgatagtgaaagagctgaacagaaacccctcttgaatggttacgagatgctttggagtcgagtatagtgcggaggagatgtttctgtttttcgttttcttttaattagatcacagaataatttacatgtgatgaattaagttttactttagacgattggatttagctttgctttattttcaactagacttgcagaaaaatgtagtggcaatctgagcttcattttaagtttcgcaggc

SEQ ID NO: 27145 - DNA, 486 bp, Glycine max
  Clone ID: PAT_MRT3847_124512C.1
tgtgtttgtttgggcggacgcgtgggatgtcttaagggaaagaaaatcactctgtgcgctggccacagacttcttgaatgattttcttttccactcttaggttattggctgaacactcttctatttgatataggactttgtgtcagattaaaactctttatgtgtctttctcagttctctggttaatttcaagttcaagctggtgaaatattggattagggctcccactctcctatctggtataggacttcgagggtagacttttctatttctgttctttctttcactctgttcttctcactgatccgcattgccgttaaagtggtcttatttgaaaaacacttgggcgttggcgcaaatgtttgcttcgtaagcatctgtggggacaacagggtcactgagaaaacagtcttttacttgaagagaattcggacatgtttggttgcttattattccaaatgcgactcaatttagaaaattcctacc

SEQ ID NO: 27146 - DNA, 200 bp, Glycine max
  Clone ID: PAT_MRT3847_124513C.1
cattattgaatgaatcatgcgggcatcaaggccaccatgtgtacatcataaggtctagctattaccatacacgctattatacaattacaatctgacagaccaccgtattcgatttacccatcagaacacagtctaaaggcacactgtttacctccacattcaacacctgccaactaaggacagtccactgctgattgcag

SEQ ID NO: 27147 - DNA, 894 bp, Glycine max
  Clone ID: PAT_MRT3847_124514C.1
atttagttggtgctagcctgaatactatatgaatactatatggaccaaagctggtttgcagttcaataagtggaaaattatgggtttacagattttgcaatgcatggatctgactctagagttttggactgattagtgggttcagaataaatagtttggttgtatccttgaacaagagtgttagcaacactctaacatgttggaatttattataaaccataaattttggtgtcacttctaaattagaagagaaatcaattaaatgagaagttgttttagggtcatttggtgtcaaggaataagatacataggataatctgttattatattttattttcatccatcatttgatgagttaagatagaataagtttatcttatttacctgattcttttcattactttataatttatctcaagcgtgagctagatataactataaaactattactttaaatgttatttattcaattaaaatatactataaattgagttattatgaaaaaatattataacataatatataagtatgccatgtagtcgtgacttaatgtttgacatgtgcattacgaaaaccttccatatcttaatatattgatttttaaattaaagattgttgaacattttatatgtggagcattgcaatttgcaagtccttgcaatcggcatcttgatgagctgtgataataggttgggtttttttaggtcatcaagacattagtaccgaatatttataggtttaagtattaaagtatttatctttatatttcacatttaaaatttagtatctatgttgtgtatatgcattctcacatttaaattcattaaacaaaaaaagttaacctgtaaagtgtaaacatttaacgcgctgtttcaatttccaataattgtttac

SEQ ID NO: 27148 - DNA, 1151 bp, Glycine max
  Clone ID: PAT_MRT3847_124515C.1
cggctcaaacattaagtactgttccttaacaaaaaaaaaaaacagaatggctgagctacctagctcagaagcatcgtcatcatccgcttccagtcggaagcactcgtcttcggaggcccatttacccgccccggatcagaaaaggcccaagcaggcccgagatagcagcagcaagcaccccgtctacagaggggtccgaatgcgggcctggggaaagtgggtatccgaaatacgcgagcccagaaagaagaaccggatctggctcggaacctttgccaccgccgagatggccgcacgtgcgcacgacgtggcggcgctcgccatcaaaggcaactccgccattctcaacttcccagaactcgcggcctcccttccccgacccgactccaactcgccaagagacgttcaggccgccgccgccaaagccgccgccatggaggttaacgatgttccgacgacgccttcgtcttcgtcgtcgtcggcgtctctgtcgctatcgcaatcgtcatcttggtcttcattggcggtttcttcttcctccggcgatggcccgtcgacgccggaggagctgggggagatagtggagctgccgagtctggggacgagtttcgaaatacccgacccgagtggggagttggtgtatttggacccgtggccgtattctcaggcgtggagtcacggcatttatgatgagagtgaggggtattttattggggactctgagactgagagcatgatactttgtggcttcgagggttcattgtggcagcattaatgcttgtgctttccttttttttctttttttgtcttattgactttccaatgtgtgagagccctttcccaatttttcacttcaagggctgctaaatacattactactactactactactactactgttgtttcccccccttaggtttctcaatgtcatcctccttctccttccgcgtgttgcacaacacgacaggtatgcctgccatcctcctcaatattcaatgtcttgtttcatgtaatcaatgtaatgcaaatgatttatgctcaattcccatatacgtgtagaaatcctacgtctatcatatttattattattaactattctactttttattcactggactaaataaaactttaacttgattctctaaaaaaaa

SEQ ID NO: 27149 - DNA, 884 bp, Glycine max
  Clone ID: PAT_MRT3847_124516C.1
cggctcgagctcgagccgaatcggctcgagggctgagctacctagctcagaagcatcatcatcagcttccactcgcaagcactcgcattccgtctacagaggggtccgaatgcgggcctgggggaagtgggtatccgaaatccgcgagcccagaaagaagaaccggatctggctcggcacctttgccaccgccgagatggccgcgcgtgcacacgacgtcgcggcgctcgccatcaaaggcaactccgccattctcaacttccccgaactcgcctcctccctgccccgacccgactccaactcgccaagagacgttcaggccgccgccgccaaagccgccgccatggaggttaacgatgctccgacgacgccaacttcgtcgtcgtcggcgtcactgtcgcagtcgtcatcttggtcgtcattggcggttagttcttcctccggcgaagacccgtcgacgccggaggagcttggggagatagtggagctgccgagtctggggacgagttttgaaatacccgacccgagtggggagttggtatttttcgacccgtggccgtattctcaggcgtggagtcacggcatttatgatgagagtgagagttatttttttggggatcagatttcaatgcaggactcagagacagagagcatggttctttgtggctttgcctttgaggcttcattgtggcagcattaatacatgggtgctgttaacatgtgcccttagggcacatgttaatgtgtaataaatgatggttggtccccatttattatattttggaaaaaacagcatcataaatgtgggaccacttattatactttgaaagttaattttctctttgtccaaaataaaataggtgggaccatgagccatttattaa

SEQ ID NO: 27150 - DNA, 1226 bp, Glycine max
  Clone ID: PAT_MRT3847_124517C.1
ccggtccggattcccgggtcgacccacgcgtccgcaagaacaaaaccccactcactcaatgcgcataataatacattaatttcttagggagtgaatggcgaacttgccccaatccatctccacaagcggcgcgacgtcgtttggagcttcttctgccaccgccaaggatcgcagcaggatagcgtctgtggaacacctcgttctccaactcaacaaccccgatctccgagaaaacgctctccatgaactctccaagaagagagagttatttcaggatcttgctccattattgtggaattcttttggtaccatgtcagcacttttacaggaaatagtttcaatattccctgttatttcacctccaaaccttactccagcacaatcaactcgagtgtgcaatgctcttgctctttttcagtgtgtggcatctcaccttgatacaaggatgcaattcctccatgctcatatacctctatatctgtatcccttccttaatacaaccagtaagtccagaccatttgagtatttgaggcttaccagtcttggagtcattggtgccttagtgaaggttgatgatacaaaagttataagtttccttctttcaacagagattattccgttgtgcctgcgcagtatggaaatgggcagtgaattgtcaaaaactgttgcaacctttatagttcaaaaaattctgttggacgaaattggtttgaaatatatttgtactacagcagagcgcttttatgcagtagctcaagttttgggaaacatggtggaaactcttgttgagcaaccttcaagtcgtcttttgaagcacattattcgttgttatcttcgtctgtcagataatcagagtgcttgcaaggcattaagaacctgtcttccagacatgttaagagatgctacattcagtaattgccttcgtgaagacccaacagctaggatgtggctacagcagttgcttcataatattggagacaatcgggttcctgcactacaaggtggaggaggattcgatcgtatgatggggtcgtgagaacaaagacttgctactttgtgaaaattatcaactagctacatacataaaataggattttcagttgggcatgtattgagaatgaagaattgaatgggaagggaactatctttccgtaagatgttaagagtgaagtatacatgagaatagtgacctcttaattgaatacaaatattaaaatcataatgag

SEQ ID NO: 27151 - DNA, 836 bp, Glycine max
  Clone ID: PAT_MRT3847_124518C.1
ccacgcgtccgcttaactcttacaatcctaattacacccctttcttctcaaaacaaaacatgtctcacaccccaccctacaaatcctgaaccatcaacacaacatcataatggttgcaactgccgctacattgttcaatccacaacatcttcacacgcatggtagggttaacatatgggcaccaagaaggattagctacctaagcggaaatgtgaagtctaagttcccttttcatagatcagaaattcatcatcaggttcattacttttcacacattgcacccctaggtgcaacctttaaggaacccaaggggtttggacctaccccaaggaaaatgaagaagagcaagaagatgaaaaaggactatggagaagatgaagatgaagaagaagaagaagaagatgaagaagaagagccagacaggggagttattcctgaagtagtgaccaacagaatgatgaacaggatggcagtgtctgtagggattccactgggtgttgggcttttgtttttcccattattttactatctcaaggttgggttgaagattgatgtgcccacttgggtgccattcattgtgtcattctttttctttgggtctgctctgttgggtgtgagttatgggattgtgtcctccagctgggacccactgagagagggttccttttggggttggactgaagcccaaaagaattggcctgtgttttggcagtcctttagaggtggtggtggatcaaggaagaattagcccattctttctttagcctttaaatggttttttgttttcatgtatattgtatcttgccagcatttagagcttgtttggcattagttat

SEQ ID NO: 27152 - DNA, 379 bp, Glycine max
  Clone ID: PAT_MRT3847_124519C.1
tatcttttttaacgaaaacaacggacacacccaggtttcaacaagcaaaaaattcaaaattctttcattattcacagaaaagaaaatgtatgacaaggaacttaagcacccggttctgcaggcaaacaaagcttacgtatagggtcctaccaacactatacattttctgaccttatggatcctttactacttaaccacaccaaccctcataaagttcttgtgcctttaacacaccgacgtcaccctacctccccaattgcaaaacaaaaaaaaaaataaagcgcaggtccatgtggtttctacaaaccacaaaaaaaaatgggttggatcctacaaaaacccttgggttttttcaaaacaaacctggttactcccccaa

SEQ ID NO: 27153 - DNA, 862 bp, Glycine max
  Clone ID: PAT_MRT3847_12451C.1
tcattttataattttctattccccaaatctcctccttagactgccaacccaactatagccattgatataaattttctattccccaaatctcctccttagactgccaacccaatatagccattggatcgaattcagtctgaattcggtctaatggtttgggagttctaattaagtctaaggaacagaattctgtacatatatatatttagaagatcacagggtgcttgatcagtggtgtatcaggatggacaaggtgacgaggttggcttctgaaaagggtgtggtgattttcacaaagagctcttgttgcctctgctatgcagtcaacattctgtttcaagaacttggtgtgaatcctgtggttcatgagattgatcatgaccctgaaggcagagaaatggagaaagctctattgaggcaaggctgcactgctccagttccagctgtattcataggagggaagctaatgggatccaccaatgaaatcatgtccctccacctaagtggttcactcactcagatgctgaaaccttaccaggctttgtcttgaaaagaagcacaagaaacagttcctgacacctgctggaagaataagctggcttgaattagtagagtagtgaccatagtattgatattctagtgtttttatgtctgaaattgctcctagcatttaattagctataatgtaatcacataaatattcttaatgaaagtttgatttatatacttgtactacagtgccagtgatctgattatgaatgatattgacaataacaaaaaaaagaagaaaaaagaaaaaaaaaaaaaaaaaaaaaaaaaaaaaaaaaaaaaaaaaaaaaaaaaaaaaaaaaaaaaaaagaaa

SEQ ID NO: 27154 - DNA, 423 bp, Glycine max
  Clone ID: PAT_MRT3847_124520C.1
gaaattgttagtaagatcctctgtgcaacgcttattcaaacgcctcagacgacgagaagaacaatcaaaacgacagaaagtatctctaacccaccaaaatcaccaaaacgacaccttcctttaccttctcttccttcattcgaccaccaaacgcaagctcccatgcccgaagatacatttccaaacgacactgcgcattgatgtgtcccacctcgctcctcttcctgatccgttcctgttccgtctccgttcacgctatctggtactcgtcacttcttcttttttttccttttttggtttttgtgtaatccaaattgaactggtttcttttttcttttttctggtcaattttgtacactcacattcaaattttgcggaatttactgggttcgattttgattagttttaataaagtttaaattt

SEQ ID NO: 27155 - DNA, 306 bp, Glycine max
  Clone ID: PAT_MRT3847_124521C.1
atggaaccaccaagccagattgtctcattgcggactaccacgactgatcccgatcatgtgaaagtcattcagtgggacgacttccagcacgatcttgcaaggttggcgagtctctcttctgcactccacgaagccaacgagaagaagcggaatcttcagcacaagctcgagtccctaatccagaatgtgagctcgagtggcgaatggaatcgcgttctgtgtttgattacgaaatttcttggcggaaggaaatggaattggggaggggagatgaatgtaactgcatttatcatgaaaatgaattag

SEQ ID NO: 27156 - DNA, 510 bp, Glycine max
  Clone ID: PAT_MRT3847_124522C.1
cggaattcccgggtcgactccttttgttctgaatttcttagtcagctctgatatttaacatggcctcatcatctccctctccctctccctctccaatgttcacagtgcgaaggttgcaacccgagttggtggctcctgccatccccactccccatgaacttaaaccattatccgacatagatgatcaagaaggtcttcgtttccacattcctatgatacaagtttatcgtaaccaaccatcaatggcagagaaagacccagttcaagtgattcggaaagcactggcaaaaacacttgtgttctattacccttttgcgggtaggcttagggagaggcctgaccacaagttaatggtggattgtactggagagggcgtcttgttcattgaggctgatgctgacgtaacacttgatcagcttggtgatgctctccaacctccattcccatgcttcgaacaactgctatataatgttccagactctgaagaaaatactgacactccccttttac

SEQ ID NO: 27157 - DNA, 779 bp, Glycine max
  Clone ID: PAT_MRT3847_124523C.1
acgagcggcagaaaattttcttaaagtaaagaaagtatctattcaaaaaacttgggaagttttctgacctcaatccttcgtcgcgtccttcttgttctcagaaccaaaacccggtcttcgtttgagtttctttggagaatccgttttcgatattcggagtctagggtttgtggattcgacggcggcggcgatggcgcaggcggcggggcggaacagggtggtgggagactacgtggtggggaagcaaatcggcgcggggtcgttctccgtggtgtggcacgggaggcacaaggtgcacggcaccgaggtggcgatcaaggagatcgccacgcttcgcctcaacaagaagttgcaggagagcctcatgtccgagattttcatcttgaagcggattaaccaccctaacattatctctttgcacgatatcataaatcaggttcctgggaagatacatcttgtgttagagtactgtaaaggaggagatctttccttgtacattcaacgccatggaagggtaccagaggcaactgcaaaacattttatgctgcagttggctgctggtctacaagttcttcgggacaataaccttattcatcgagacctgaaaccacagaaccttcttttctcccgaaatgatgagaagtcagtgctgaagattgctgactttggatttgcaagatctttgcaacctaggggccttgctgaaaccttgtgtggttcaccactctacatggctccaggattcatgcgactactgacatatgatgctcatgcagatc

SEQ ID NO: 27158 - DNA, 342 bp, Glycine max
  Clone ID: PAT_MRT3847_124524C.1
ggcaaaccccgagtatgtagacaagacctatctttctgtcaaaggtggtcttgcacgaggcgagttccgtcctgacgcctcagaggagaacttgagggcttccgtcaccaccatcaacgacaccctgggtggcaaaaagaagatggatctgtttgaaatggctcgagtggacaagtcgcggtctatcgaggaaacaatgaagaccttgctcaagttgcgggacgaggggcacttcaaagatatcgggttgagcgaggtgtctgcaaagaccatccgtgctgcagctgcagtggcacctattgctgctgttgaagtggaatactctccttggtcacttgatat

SEQ ID NO: 27159 - DNA, 400 bp, Glycine max
  Clone ID: PAT_MRT3847_124525C.1
cccacgcgtccgtacggctgcgagaagcgacagaaggggcttcaaagaaacacaaaaacggtgcggtttcgatcaggttggaaagatccttcctctctcgcacttctgtgatacaccatcacgatgtgcttgtcgtggttgtgaaacacgcacatgaacagtttgaaagcagtgaagatggatctcgttcccgtgatgcctaagtttgtagtgaatgatttagagagcttgtatggcaagtctgatacggtgtactgcctcgatggtttgtttcatttcccacaacatatatcctttgggatttttgcccacctttcattattgtccaacatcctattgattcttggttttgccccatagacgttttattatgatctgttaatgtgggttgttgagttgt

SEQ ID NO: 27160 - DNA, 315 bp, Glycine max
  Clone ID: PAT_MRT3847_124526C.1
tacggctccggggcgacgacagaatgggacatcacaggacaaaaacattgtcccaaagctgcctttagacaacacacacatcatggcgagctctgctattcaacagtcaacattcactggtcaaactgctctgaagcaactcaatcagttcgtccgcatcaccggtagcaccggtaaacgtcgcactaacatgcaccacatcgtcatgattgctcctcagaacatttggcacctcaacatcacccttcctactcgactatatcaacatactagttactgcatttaatataacactcgcatgtcaacataagcctg

SEQ ID NO: 27161 - DNA, 457 bp, Glycine max
  Clone ID: PAT_MRT3847_124527C.1
gtttcccgtgatcactgtatgacgtcctccttctttggggggggggggggggatagttcctaaatgctagggtaggaatgatatagacaaagacctaggaccgtagcgggcaacccaacagattggcgatagtaggggtgggttgaggcgtacaaggggatccgcgtacaagatttatccttatacagtaggtgaattgaacgcttgacggacataaataataatgctaccattgacaaatatagtcttatgtttaaataaatgaagacggcgtgtgaggatagtagtggtaggtgtgcgtgaagactggagtaataccaatgaacaatataaagtggagtacgtaacggatacaattggagtaatacggccgtaacagtacggttaatgagatgccaaggaatattagcgtaagtgcgtatagacaagctgcgtactagtacgaatgttgaaaaag

SEQ ID NO: 27162 - DNA, 194 bp, Glycine max
  Clone ID: PAT_MRT3847_124528C.1
gttgtttcccttcaccagatccatcttatttatttttattttaaaaaaccagaaaagggaattatttcatatcattctcaataaactaattaagagaaatacctgtttaatcaatgaattgagctccatatcggaaaggggcggaagcattttatttttcttttggcctacgaaagaattgcttaattattttt

SEQ ID NO: 27163 - DNA, 134 bp, Glycine max
  Clone ID: PAT_MRT3847_124529C.1
cacaaaaatgagggatttgatgaggtacttactgctcagcagagtcctgagaatcctaattggttccaaggtacttcacatgctgtcaggcagtcttagtaggctttatggagtgaacaatgttgtggaattct

SEQ ID NO: 27164 - DNA, 603 bp, Glycine max
  Clone ID: PAT_MRT3847_12452C.1
taaattttctattccccaaatctcctccttagactgccaacccaatatagccattggatcgaattcagtctgaattcggtctaatggtttgggagttctaattaagtctaaggatggacaaggtgacgaggttggcttctgaaaagggtgtggtgattttcacaaagagctcttgttgcctctgctatgcagtcaacattctgtttcaagaacttggtgtgaatcctgtggttcatgagattgatcatgaccctgaaggcagagaaatggagaaagctctattgaggcaaggctgcactgctccagttccagctgtattcataggagggaagctaatgggatccaccaatgaaatcatgtccctccacctaagtggttcactcactcagatgctgaaaccttaccaggctttgtcttgaaaagaagcacaagaaacagttcctgacacctgctggaagaataagctggcttgaattagtagagtagtgaccatagtattgatattctagtgtttttatgtctgaaattgctcctagcatttaattagctataatgtaatcacataaatattcttaatgaaagtttgatttatatacttgtact

SEQ ID NO: 27165 - DNA, 1503 bp, Glycine max
  Clone ID: PAT_MRT3847_124530C.1
cagagattctctccaccccattcaagtcaaagaagaaagaatagagggaatttttcttctttttttaaaaaagaaaagaaggaaaagttggtatggaatgggatgagagagaggaagaaccacagctcatggcatatattcccccaacataaccccacttatgtttcctgatatggagtgagatcatagaacaacacaaccaactccaagttataaagagaactatagctggcacatattgatgcatacatagctaaaaggatcaaaaggcacatctatgtttcagtcctttgccagcaagtaagtagtaactcatccaaatatagcaaatggatccacaaagcatgcattttgtgctgtccactgattccaaaccaaggctgaaatggactcctgagcttcaccgacggttcattgaggctaccaatcagcttggaggtgcagataaagcaactccaaagagtcttatgagggtgatgggaattccgggacttactttgtaccacctgaagagccatttacagaaatatagacttgggaaaagccaagaactagaaacctgctctgacaacaaacaagaagattacatagaaaccaagagcagcagtgatggccattgcagcagggaaatcagtattggggcccagaatcaacttacggaaaacatgcagatagctcaggcactccaaatgcaaatggaagtgcaaaggaaacttcatgaacaaattgaggtgcaaaaacatttgcagctcagaattgaagctcaagggaagtatttacaatcagtgctaaagaaggcacaagaagcacttgctggatacaattcttccccagtggggatagaacttacaaaagctgaactttctcagctagttaccatcatcaacaatgcttgtccaagttctcccatctcagaactgacagaaacaagagggttgagtttaagctgtggggagaggaaaagagacagaggcactatgtgttcactggaaagttccttgacatcttctgaaagctcggggagaaaggaagagaaacagccaatggaagagattgtggagttcaaaagttccattaatgtttcacttcaattgccattgatggaaattctcactgaggataaagcatccaatggaggctcaagcaatgaggctagtgggagaaagagaagtgcaacagcagcagaatctgatgatggtagctgtgttgttgagcaaccatgtgggaaaagatgtggcaacaagttgaggaaagccaagttgtcagaaatgcttgacttgaacagccagtgtcagagtgacatggactcaacaagctcaaaaacattagacctaaattgcagtttaaacttttgggaaccatgaagatggtttttatatacttcacttcctaattaattatatgaacgtatgaagcaaaatcattgtcataaaagaaatctgtttatatagtatgtatatttttattattataatggaaaaaagaaagaacaattgactgtaa

SEQ ID NO: 27166 - DNA, 431 bp, Glycine max
  Clone ID: PAT_MRT3847_124531C.1
ctacatatacgccttacgtatacgggtcttccccaacgcattccttaagccaccggaaattcaaatgcaattcgagctgaacctgagggtagtcctattgtcttgaccgatctcgaatttcggatacagtaaatgaaaatgcacgttaaataggctcagttatcgttgcgggatcggacacaggaatttcacagcctgtcagagaggttgaagaattcccgatcagggcccaatgggcccactagtaggggctcttcttacacatccgaggagcagcgatccagcgatcgcgaatcgattggagttcacttgaagggcctccaaaatcggctccaggactcaccttacgattgagaagctcgccatactcgccacattaacgaaaaggactttggctctttatgaccctactatggaaattcaaagcttac

SEQ ID NO: 27167 - DNA, 564 bp, Glycine max
  Clone ID: PAT_MRT3847_124532C.1
aaattgatcctcctacaacacttcctttccttctcttggctgctaaatttttatttggaaaatattaaaatgtctttgaaatcaaaattttagtttagaagttgattattcgtaaaaaaaatatcaacaacctaaaatatttgtttaaaaatggttatccataagtaattaagcttatgtttggaatagcccatttgaaatagtttttagtttttaattaagtatcaaaaccaaattttagtttgcaggattttctttttatttttaatttaaaaatttgttataagtatcttagaattttcctttaaaagattcactatataatttctcaataagtaaagaaaaaattcaagttttttttttacggattccttaaactaagcgtctaagcccatatccaatccaggaaagatagtgaaagtaaagcaaagacaatttatttgtgtaacggttttaaatgtgtttggataacatgaacataagtaatttcattttaaagcaataagggacttattttctgttttcttatcttgaaaagtgaaaaattccattgaacatgatatt

SEQ ID NO: 27168 - DNA, 565 bp, Glycine max
  Clone ID: PAT_MRT3847_124533C.1
gggaaaaaaaaaaaatcaatcccgtgggattttatatcgaacctgcctgctaattaaaaaaaagggcagcatgctggctttttcaaactttacttttatccttctaggccatggtccctatttttcacccctttttatcctaccttggacaaaaagagacatgggctgaaaccaaaatcccgccccaacccccctttctttgggggaaacaaaaattaagaaaagaacaatacgggggcaagaacatagcagcaatgttaccggggggaaaatgcttaaaaaatgaataaataccccaaaattagttcccgcccccgataaaattcattctatagcccgctgccctggcttctccagcattgaagttttattgaagaggggtagctgcccccctctgagatgttgggaaaactgatcttcgctcatttttcggaagcccaatttcttagtccaaattgactcagcatcccctgctggaggaagcccccacttttttacgtttagagaaaacagccacctctctatgcaagagaacccacttgaaaaaaccctggagccgaattcc

SEQ ID NO: 27169 - DNA, 560 bp, Glycine max
  Clone ID: PAT_MRT3847_124534C.1
gaaaaacaaccctgggggggggggggggttttaataaaaaaaaaacccccaaaaccccaaggagggttttttgagggggccccgggggcccaacaaaacccctataaaaaggaagggaaagcatagtccaaaaaacaaaaataaccccccctcctttacaaaaaattacatgttttgggcaaaatgtaaaccaaaggtttgggggggccgtttttcaaaacttttaacaaaacactgggtatgaccttatctagggaaagggccccatctaaaaccctttaacattggtttctacgtaaagggaccaatcgtatacagttggacattgctttttagggattagggaaaaggggcaatctcatcgggagcccccaaaaggggggggaggaaaaccactttttcccatcagggggttataattcccaggaggaaatcgactagggggggggggcatttgccccatacccatgggggcgttcacccctccatagtttcccatgcccaaacccataattgggtttgagggaggtttgaaagcacccacgccagcccggcccata

SEQ ID NO: 27170 - DNA, 107 bp, Glycine max
  Clone ID: PAT_MRT3847_124535C.1
tgccttgagacttgcgtcctgccctactagctgattcgtgagcgaagacacgagaagaacgaagtggaccgtttgaatcatggctgattaactcaggagcatcagac

SEQ ID NO: 27171 - DNA, 757 bp, Glycine max
  Clone ID: PAT_MRT3847_124536C.1
cactcataaacctaccaccaggtctggtggctctgtacaccgttaacccaaaactcattgagatttaatattcgtcagttattcccactggctattgttgccagatgctacatcaaatctggtgagcaagttttctcggtcagaattgaacacaacaacgacagcgcttcaacgtaaaaaaaaattgtaacgagaaaacaaccttaaccttggtcgctgtctctctctctggatagaacaaactagaagtggcaagagaagcttcaaatcacattcacataccctaccctcgtaaccgaatcccaaatattaaaccttttttttttttgttgatgtaaggaactaatttgaagggtggtggtgattaggttattagccttagggtttataaatgttgagtacctcttcttactgtgtcttcacccgttcctttctccccaatccaattaagggttttccccgaccagctacacttcgcccttttcctcggatattggaatctcatgccaagtctccaaagaacagattgagtattctgtgctttaggcacgaccatcattatccagaaacaccccaacctgaagttattgagcactatcttcatgaggaattggtgcaatctgaattcaatgactccagtgtcacgaaaagagaactggaatcagccattcagaaggctgcaaatgaagtatttaaggtaattggttatggatggggttgtgcccatggaatgcaatgactatattacaagttatgc

SEQ ID NO: 27172 - DNA, 1789 bp, Glycine max
  Clone ID: PAT_MRT3847_124537C.1
ggtggctctgtacaccgttaactcaacccattgtaatttaatattcgtcagttattcccattggctcattgttgttagatgctggtgaccaagtttcttcgtaattttttctcggtcagaattgaacaccacagcgacaaggcttcaacgttggggttataataaccttaaccttggtcgctgtctttctctctctgaggatggaacaaactagaagtggcaagagaagcttcaaatcacattcatctaccctaccttaaccataaccaaatcccaaatattaaccccccctttttttaatgttgatgtaaggaactaatttgaagggtggtggtgattaggttattagcccttagggtttataaatgttgagtacctcttcttattctgtcttcacccgttcctttctccccaatccaattaagggtatcccccgaccagctacacttcgaccttttcctgggatcttggaatctcatgccaagtctccaaagaacagattgagtattttgtgctttaggcacgaccatcattctccagaaacaccccaacctgaagttatcgagcactatcttcatgaggaattggtgcaatctgaattcaatgactccagtgtcaccaaaagagactggaaatcaaccattcagaaggctgcaaatgaagtctttaaagtaattggttatcgatgggttgtgccatggaatgcaatgactatattacaagttatgcttctttggacgacggcattttggtttataggatcttggatgatcccttttgctgcccatataactggcaagggcaaggcccagaccacattttaaggtcccaaagatttcagccttgttactgatgtaactgaaggacttgctggagttgcgattcttcttcgctgtctttctcgatttcgcccccttccacctgactggttcgagtttagcctgaaagggaattggcaattagatgtcataatgggatgtctcatgtttccgctcgtcaatcggctctcacagttcaacctggacctcctaccccttttgccctccacacccgtcaccctttcaagtgttgaacaatcaataagggcgagggatcctgtggcaatgcttttgtatgcaacagtagtgtcagtctgtgctccagtgtgggaggagatagttttccgtggctttctactcccatccctcaccaaatacatgccagtgtggtgtgcaatactggtaagttcaattgcctttgcacttgcacatttcaacatacagagtatgctgccccttatatttcttgggatggtgatgggtgtgatatatacacggtcaaggaatttactgccatcaatgctgttgcatagtctttggaatgggttcgtcttcttagatttgatgaaatagcttcttgaacgttgtggttctctagtaagcagagagtccaatgtgtaggtagaatttcaggcactagcatgcgggtttgtgctttggatcagcaattttcagaagtaaatgcatatgcatatagaacagtacctcgttaaggtacgctgatcaagtgtatgtgcaaggaaggagtaacatgagctgatgcaatcttataatgtacattataaaaaacagtgcccctcatttgtccatatatgctatgaatacgtagtataatttgagttactccccctcccttttttcctgtgaacattcattttgggtaacatgatgctaaaggacgtttgtattatatattccttatgggctcatcctttaaggctaatgtaaagttattgaagggattttccgga

SEQ ID NO: 27173 - DNA, 279 bp, Glycine max
  Clone ID: PAT_MRT3847_124538C.1
aattcggctcgagattttataagttgccaaaacggaaacaaaacaaactcaaaatggcagagcagttgttctgagttaaagtacacttaaccttctgtatcctgcgtgcattttaaggtgcagatagagggaactttggttatcgtcaaagtgtacatatttcttccttgacataggactctgtgagtgatatctcacgcagcaggctatccgctgtgcagcaatatacggaacatatggaactgacatgggacagggtgaacgagttttgatgatgcc

SEQ ID NO: 27174 - DNA, 321 bp, Glycine max
  Clone ID: PAT_MRT3847_124539C.1
gcttataacccaacggaatctaaataataacggggggttttgtcaaatactattctttaccctttacttttcacccaaaactatctttttaaatgagaccttgtccctttcttaagaagatcccatggactgaattccacctttgaaccctcaaaaccaatattcgccgacacattctccaattaataccctacaattacaatccgtttccttggattctcacctacataaacaacccttaataacataggatggtcagtcaccaccaccatgtatttccttccaagaatgctccaattcaccatttcgctctacaaaacc

SEQ ID NO: 27175 - DNA, 731 bp, Glycine max
  Clone ID: PAT_MRT3847_12453C.1
taattttctattccccaaatctcctccttagactgccaacccaatatagccattggatcgaattcagtttggattcggtctgatggtttgggagttctaataagtctaaggtaatctaaacacatatcttcaaaattagacttctaaattttctttcttgtttgtgttacatttatttattttttgttgtgtcaggaacagaaattctgtacatatatatttagaagatcacaggtgcttgatcagtggtgtatcaatatggacaaggtgatgaggttggcctctgaaaagggtgtggtgattttcacaaagagttcttgttgcctctgctatgcagttaacattctgtttcaagaacttggggtgaatcctgtggttcatgagattgatcatgaccctgaaggcagagaaatggagaaagctctattgaggctaggctgcactgctccagtcccagctgtgttcataggagggaagctaaggggatccaccaatgaaatcatgtccctccacctaagtggttcactcactcagatgctgaaaccttatcaggctttgtcttgaaaagaagcacaagaatagttcctgatacctgctggaagaataagctggtttgaattagtagagtagtgagcatagtattgatattctagtgttttatgtctgaagtgtctcctagcatttaattagctataatggtatcacataaatattcttaatgaaagtttaat

SEQ ID NO: 27176 - DNA, 1318 bp, Glycine max
  Clone ID: PAT_MRT3847_124540C.1
cggacgcttgggtttgcccactactattaacctttgtatccactactactccacgttcacatttgcttcctcgtttcattttgctgttatataaataccctcattaagtttacatggcatcacaaacacctacgttacgtaacaaacaccaaagttacaattgcaaccatgctctgctttaactctatctaactccaatctgcgttttcttttctgatatattcatatttttaatcttgactctgaattgattagccatttttctgtgtccctttgcctttatagaactcgattcgggttctcatttcatccttttgcctatcactatatgttaatgatatagaacttttagccaaaggttgggaattcacaatgtcttgttctaattatgctagaagctgtaccttcttttatctgtttcttgcagtgcttcttgcaaaaactagctcttgcttctctgccaaggtgtatgtagtgtacatgggaagcaaaactggggaggacccagatgatattctgaagcacaatcatcaaatgcttgcatctgttcacagtggaagtattgagcaagcccaagcttcccatgtttatagctacaaacatgcttttagaggttttgcagccaagttgactaatgaacaggcttaccaaatttccaaaatgccaggggtggtatctgtttttcccaatgctaaaagaaagcttcacaccactcattcatgggatttcataggacttttgggcaatgaatcaatggagattcatgggcactccaccaaaaaccaagaaaatataatcattggtttcattgatacgggaatttggcctgaatcctcaagttttagtgacaccgacatgcccccggtgccccggggatggaaaggccattgtcaattaggagaagcattcaatgcttcatcatgcaacaggtttctggaaagtgataggagcaagatactacatcagtggacatgaagcagaagaagggtcagacagagaagtctctttcatatctgccagagatagctcaggtcatggtagccacacagcttccacagccgtgggacgctacgtggcaaacatgaattacaagggtctaggagctggaggagcaaggggaggtgcccctaaggccaggattgcggtgtacaaagtatgttgggactcaggttgctatgatgtggacttgttagcagcatttgatgatgccataagggatggtgttcacattatatctttgtccctgggtcctgaatctccccaaggtgactatttcgatgatgctgtatctgtggcatcattccatgctgctaaacat

SEQ ID NO: 27177 - DNA, 507 bp, Glycine max
  Clone ID: PAT_MRT3847_124541C.1
ggttgaattgtgcaggtggtggtaaatttcaaaatgcctggaaaggttcatagggctgcaatgtccaatttgtcaacgtctcacatgcttattgctgctgccactgaggatgtccaagttcgcctttgtgatattgcttccggggcttttgctcacactttgtccggtcaccgtgatggagttatgactgttgaatggtctaattcaagtgaatgggtcttggttactgggggatgtgatggtgcaatacgattttgggacatcagacgcgctggctgtttccaagttttagatcaatctcggactcagcttggaagacgcccaaccatactcaatcgctccatgataactaaggattcaagtacaaaattgagtgctgcgcagaagaaacatgctaatggaagtggtagcagacaacaactaattggcagagttccatccaaaggaccaatgaagcagaaattacatccaggaatgttgtctactcaggatcgtgcgactgctcat

SEQ ID NO: 27178 - DNA, 240 bp, Glycine max
  Clone ID: PAT_MRT3847_124542C.1
aaaatataaaaatccattatcttttgtttatttataatcataataattatctattacaattgaatcaaaccttttttttctagagccataccactttttagatcttattctctcaaaaattcaaaatctaactctcaatttctcaaaatctcaccgctaaccgtataaccccctcctctttactatcgattaaataacgccatcactctccttaacaactacaacaaactctcttaccct

SEQ ID NO: 27179 - DNA, 718 bp, Glycine max
  unsure (1)..(718): unsure at all n locations
  Clone ID: PAT_MRT3847_124543C.1
ttgtgcgaacttacatctacaggtacagttataaacatcatgcaggatgcattcattactgtgggaagctatcatcacaaaaattgttgccaaaaggatgaaaagaagaaataaaaaaagaaacttgagaaagaaatactatgaggattggtcaagtatcccttcattgccgttgaaagcagtcaggagaagatttagtgtcaaatgtagaaaaaaaatacacagaagaaaaaaagaattgaaaaagaaaaactttgcagattggtctagtctccctcgaggtatacttgagatggttgctgaaagactgacctttatcgattgcttatcaatcagcaaagtttgtacaagttggaatagagttcttggtgaagaacttcctaggtggcaaaggcatggatttccttggctcttggtgtcagatcagcagaacaaagagattagaacttgtatcagtatattggagaatcgtgtttgggagttggagttatcagaggcatatggacgccaaattagtctccctttaatatggaacttttaccacaagatggtgcattcagggcttccctctgagaataactttatttgcatgcttctacacagccagtactgtgagctggctttttgggtccaggagcaaattcatggcgtaacataactaacgggtgagccatttgaggatgctgtattttgtaatggaagcttttactnctggctg

SEQ ID NO: 27180 - DNA, 202 bp, Glycine max
  Clone ID: PAT_MRT3847_124544C.1
taggcgtctcaattcttttatcgtcatctactagtacttgatggcagtctcaaatagaacgatgctatctatcctcacatataggcctcacaccatctaaacgctcttcttcttaattcttacatgactaacattcatcttcagttcgctaatcatgatcaatatcttctcacttatctaccttccttcactcatccaccca

SEQ ID NO: 27181 - DNA, 867 bp, Glycine max
  Clone ID: PAT_MRT3847_124545C.1
actatatattctaagacggtcgtagcacaaccgttttagaatgtagtgcattctaagtcggtcttgtgctacgaccatcttagaatgtagtacaatcttagttggtctttgagtctggaccatctaagaatgtatagtacattctaagatggtcgtgcttaaccgtcgtcgtagacccattagttttctaggacaagtgctacaacgacattacgtaatcgacatagtatgtttaaaataaccgatataaattgtgtttttttagtagtgtcaagagatgcagtggggtcttccacttacccgttctttgatttcaacagtaatatgcatgacaaatattttcactttgtacaattaaaaaaatcgaaatacaatatttccattttccttaattttttgaaaaaaaacatggatttttgtgcaatagtggaagctagctcttttatgaaaacaaaagattaagccaatttcttttgtactcttgtaaatacacgaggaactgcgggagtatggagaattttggcgctgaatgaggctggtggatggagtatggagaattttggcgttgaatgaggctggtggatggaaggataggaccacactggaagatatgaacttggtggtgcgagccagtttcaaaggatgaaaattcttattcttgtctgacttgaaggttggctttcttcaaactttgttattatatttcatttgatgatttgaattaaagtatcttgcaaacttactttcttactttataaaacatctttaagttagaagagctaactccttataataaaatattacgaaaacttcatggtggtgctaattagtataatgactataatttaatcagaaagaattatttta

SEQ ID NO: 27182 - DNA, 304 bp, Glycine max
  Clone ID: PAT_MRT3847_124546C.1
tcgagcaagaaaccccaaaccgagacagccacattgcaccatagcacaataaaatacacagcaggggggacacacatgggggcggggggcaaaacaaacaaacggacaggggagcaaacgcacaaaaaggactcggaagataaccctgatgggccaacacaagacaacctcaaggcagtcttgggccgtagggtaaccctgcagctcactaaagctaccaaggctgatgcacaaggaaaacgaaaagcagaaaaggaaaccgcctcggaagggactaatactgcagagaacaacaagggggagc

SEQ ID NO: 27183 - DNA, 734 bp, Glycine max
  unsure (1)..(734): unsure at all n locations
  Clone ID: PAT_MRT3847_124547C.1
tgggttaggatttttccccattgtaacactgggagttaaagccttttaaaatcctttttagatagagattgggaagttcatgtcagtgactttggacagntcgaatacttggccttcatctgcaggatggtagtaccctttcttcatctgcagctttgcaaggcacattgggctatatggcaccagaatttgcctacatgaggaaagtaaccactaaagcagatgtgttcagcttcggtgtcatagtaatggagtttctaacaaaaagaaggccgacaggactctaaaaagaggatggtttgccaatcactttgcgtgaagtagtgacaaaagcccttaaaaatggaataaaacaacttgccaatattgtagaccctttgtttacctgggatgttgaccatgacgaagtgttgccagagctcattaagttatcattgtgctgcaccctcccagatcctgaacatcgaccaaatatgaatgaggtgttatcttcccttgtgaagcttcaaacaacactgtcttgataattggtaaacacaaccgatcactccttggagctgctttttctaaagaagaaatatcaaatgcttcccaattgcctcattactattgtctttaacaacagcaaagccttattgtatccaatatccatgctagttttccaataaatgtacggaattatcagctttccttcacagccatttaatataaaattgattgtccattgttgcnna

SEQ ID NO: 27184 - DNA, 388 bp, Glycine max
  Clone ID: PAT_MRT3847_124548C.1
gtcggtggccgcccttaactattttttttgtttttttttgtttggcgtaaataacattaatctatagcgcgtggagtattgaaaaagtcttggcgtacctggctacattagagcgagagaagggatgaagagttatcttgcaacaatgggggttgatatacattttttcactgctttttttaccctaataaagaatgaaacacacgttaatacttcaataacacccgatcggcaaacaaatacaatactcaacacgatgtagcagtatagcttcttgcccctgccctcaaaccctagccaatcgttcctggcgccgagataccagctatcctgctcgagcgggcaaagatataggtcttctatgctgtagacttacatgcattcactg

SEQ ID NO: 27185 - DNA, 197 bp, Glycine max
  Clone ID: PAT_MRT3847_124549C.1
tacacacattcaccaaattaagattttaattttaacgaaccttacatctatccgcgcatatgcgtcattatctacagcacatacccaaaaggctatctatatctacaacaccatgctcctaatctaacttgaactctactatcattgcctaatcataataactcttgaatcaattgactgttagtatacacattata

SEQ ID NO: 27186 - DNA, 344 bp, Glycine max
  unsure (1)..(344): unsure at all n locations
  Clone ID: PAT_MRT3847_12454C.1
cccggcgcgacccacgcgaccgcgtttatcagcttccacgcgaccgaacacgcaaaacacgagggcggcggggaaaaaaagagcgggggggcaacaggaaccaccncaaaccacgcgagcaggcgacggcagaccccagcgagcaggccaccaaaaaccaaaaaacgggccgacgacgaacaacagcacgacggaaaaaaccaaggcgagacccaacacaaacgccaagcaacacaacaccacaaacgacagccggaaaaaaagcgaaaaggcccgcaccaaccgcccaacccaacagaagcgcaaacagaaaggcgagagagacacgccccgcaccagcgcaa

SEQ ID NO: 27187 - DNA, 287 bp, Glycine max
  unsure (1)..(287): unsure at all n locations
  Clone ID: PAT_MRT3847_124550C.1
gnaaatgaaatgagaanagtaaagnngttggaaaattantcaatnntagagttaggttttggtttggtttggcagaagaaagtataanggagagaggttgagtttgtttggtttttnttgcttcgtttggtgtcattgntatataatactaatactnnttnnattcnnntttnganacaacattgntntngggaggttcagatgatggngagtgagtngcaaaatgggtgtttcatggtcatgcanagacacnaaagaacatggcgttatcaagtntgggggggaaa

SEQ ID NO: 27188 - DNA, 466 bp, Glycine max
  Clone ID: PAT_MRT3847_124551C.1
gtaaagtctatcttattgattaccattatcaatgtacttttacaatgagagtgagagagtgagataatgcgattccaccatttaatatgactagaggaaaatcctaaatacacacactacaacatcatagttgagaaaagagaaatggatagacgaaagaacaaattataaggttttaattaagggtaagataaggtggcaatatggttatgagccacagttccaatccaaagcttcccttgctcctctctgacttcgctgaccagcttcatgacctcacccttttgatcttcctgaacttccaaaacctctcccttgtcgtccagaagtgaaatcacagggtacattttcatccccatcgctcttgctaacaagctcattcttatgggcaaacggaagtagatgttcctcaaccatggattatgactaagaacttcttgtgctggagtgcgacaacagtctattg

SEQ ID NO: 27189 - DNA, 485 bp, Glycine max
  Clone ID: PAT_MRT3847_124552C.1
tacggctgcgagagacgacagaagggagctgcctgcatactatcaaaacttgtacttttccagacaaagtcaacactgaaaccatggttaacatcaactggaaccccctgcaaataacaagggcaataagcacagggcacagatgaagagcttgaaggcacaacataagcatcacaaactaatgctaagttcacctgactagcacgaagctccagtgcaacctccccttgtgcagttagcttaatctgaaaatagaatataaagcatctaacacagcatataatgaaataatataaataaagtgctaacagaatagatcaataaaatcatacacattattccatataagttgcatgcatacactaaacaagtgaaccatgcaacaattacatatagcagtcaatagtgctttctttacatctaaaaatggagataatgggcaatgggcagatgatgaaagatgattggatctatgtatgacatac

SEQ ID NO: 27190 - DNA, 316 bp, Glycine max
  Clone ID: PAT_MRT3847_124553C.1
gggacctattaggaagcggctgcacgctgaagaccgtggccgcgccaaacgagtcgcgcatagggggcaggggaatcacacgggtgagtttagaaccacctgtgcagccgccatctacgtctaatgccacatcttagctgttgattgttccttatttatgattgttagcttagaccctacagccgatgagaggagaatatttgcctctaccttagtgagaagtatttgaggaagctctgcatcggcgccaatggatccgcattggtggagcttacactccaggctctacattaataagatatggggggtcctaaga

SEQ ID NO: 27191 - DNA, 946 bp, Glycine max
  Clone ID: PAT_MRT3847_124554C.1
tgacaaatcaaactttaccacacgatcaagctcacacccaacttctgaatccccagagagttgtccaaactaacaatattcaacaacagcaacaatcgtccattcaaaagcaacaactgcttagaagcttgtctcagaaccgagctcagaagcatcaacaaactacattgggtttgaatgaacggcaaattgtgtttcaatcccctatgcccgatcattttaatcaacaattacaaatgtctgacaatcaggttcggtttcagttgttacagaagcttcaacagcaacaacagacactcttggcacagcagtctgcattgcagcagcctgctctaattcaaatccaagaccagcagaggcagcttttagacgttgcaaacaactctagttccccaattcctggtcaagtactggaaaatcttcctacgcttcaaaactcactccctgaggctaattctatcacccatcagataacaatgccaagtagccagaaaaattttcattactctcatctatctcagcaacctgccttgctgtctgaaatgtctggccatgttggacttccccctacagttacaaccaatcttctttctgcttctggtggaagtatactgactggcgtggggcaatcggtaattactgatgatgttccatcttgttccacttcaccttccacaaataaccgtgccagtgtacttcctccggtggtaagttcccagatccataggagcacaacaataggggatgacatggctcagtctgctgtcacgatctcgggtgcaagtaccctagaaaccatgtcatctaatgcaaacattgtccagccgaagtatgaagtaaaggcttctttaaatatttcaaaaaatcagaatcaagggaatgttgcccctcagacatacttgaatggtgttgttcagacagactatttggattcatcatcttctac

SEQ ID NO: 27192 - DNA, 301 bp, Glycine max
  Clone ID: PAT_MRT3847_124555C.1
gcttcgaacctttgggctgatttatgtgcttgatgggagaagatgatagaaggggatagtcgacataagctactaagacgagctcgacgaataatagggatgcgtcaaaagcgtgcacgtcgtccaccccgtccgggggggccattgtcgttgccggaatcgatcccgaaaagtgactagtacaagcactagcgatagcactataatacgtcggatccgtacggttatgtcaacgtcatcacgttgcgtgaagacccagtcgaaccgacgttatctagaccgtaagagtcgcacgtgtata

SEQ ID NO: 27193 - DNA, 506 bp, Glycine max
  Clone ID: PAT_MRT3847_124556C.1
ccacgcgtccgcgaagcttttcctacaaactatccaaagcttcctcttcctttgttaaaatccataatcttgacgtgaaccctccttactcccaaaataaaacccccaaaacccgaaccctatttaccataactacacacattcactactatctagtggcacctttcacttatctcttcttaccacttttgcttctctttgccttaacacactcccgaagcacaccacactactgcaaaacgacactcctggacgtcgtttactacctgcaaaacgcacacaatgccgtgcgccttgagcccctcatcaccttagccaacaccaacgacaacgagaagccttgcttcatatacgagtcgctgggtatgtactcacattacggatccttaattgataaacccttgcatagaaactacaaattgctaaccttatctcgactcactcgctactcagtccgagtcaaatctttacaaactcggctagatctcggtctgaaacgcggctcg

SEQ ID NO: 27194 - DNA, 326 bp, Glycine max
  Clone ID: PAT_MRT3847_124557C.1
gctaccaacaaacccgtgaaggccaagcacccattagacacctttgcctaaccgactcactgccatggaagccgatctaaacgacgccgatttccccgaagaagatctcgacgacgacaacgacgatgaaactccataggacgaagaggactacgacgacaaaaccgaacccgcttccttcgtgctcgccgtaggagcatatacgccggccgatggcaccgtctgcgtaacactcgacaccacgttgatcccgatgcttcgtcggggccgattgctcactgaaaccactgcacccggagctgatcgatgagaaaaaagcgctggac

SEQ ID NO: 27195 - DNA, 646 bp, Glycine max
  unsure (1)..(646): unsure at all n locations
  Clone ID: PAT_MRT3847_124558C.1
atcaatcccaattaatgatatgaacaatttggcgtgatcctacagcataacctaagctttttaatagtaacatgtttggaaacatattgagaatagaagaataacgtttgagacatggaacctataacagttaacttttaaaaatcacttccgaatcatgaaatcaaacaccctataaatctaacgggcaagattggcggtactccatccagaggagtctgcaaaggttgctgcagtaacacttgattcttctgatggattcatttggctccttattctggcgctcctgagatcagtgactaatcctggttttgaaacactaaactctcccatgtcaacattgttggtcaacatgtccaaaacctctgacattcgtggcctaagcctcgccatttcttgcacgcaacgcagccccaccattaggaaccgtttcacttcttccacgggatagttcttattcagcacgggatccaccattctcagaagatcattagcctcatatgctgcccaagcccttctcaactatgaaacgctccccgttttgagacgaatctaccacgcgttggccactgacaatttctaaaagtagaactcnnnagctataaacatctnnttttcgtgtcaagtgtccagaactagcatagtc

SEQ ID NO: 27196 - DNA, 442 bp, Glycine max
  Clone ID: PAT_MRT3847_124559C.1
ttgttttgtgaaggggggaaaaaaagaaccttgtattaaagatttgggaggttatctaacaaataataaccggagatattttaacgcatttgcgcctattgatattactgccttcatacgggctgagaccatctaataggctgctatataaactgaacgcctgggtctaagataaaaatgccaaaaagaagcagctcctttggactcccaggggtctttggaaacattgccttatccttgggcttcttgaacttggggtgcgtgacatgaattcgggcctcacataaacatagaatgtccattccacaacatatacggttcatataacctacagagaactcatacttgggtatctcaaattcttctaagatgacatgatcggctcatgtcattctagaagtatggatccggaaaatgcgtcatcttgtgttgatatcaagga

SEQ ID NO: 27197 - DNA, 1002 bp, Glycine max
  unsure (1)..(1002): unsure at all n locations
  Clone ID: PAT_MRT3847_12455C.1
cgacgccgactggggagccggctcaccttcggctcaggcttccgggtggggcatggactgccatgtagcggcaggctccgccgggtcggggtgctccgcgttcttcgggccgcggctcggggtttccgcgccgtcgatcgaggtctacgttgccgggtgctgctccggcgtgccggtgattctgagcaagacgattcagttgagtccgaggaagagagtgccgcggcatgccacgctggatgctatacctgaagatgaggagatgatggtgttggagaagaaccgtgtcaacgggtttgttcccatccgcaagttacagataacagactcggaagttgatgattatgattctgatgggaagatggggaatggtttctactgtcaagagatgtatcctggtgaggatggacaactctcatggttcaatgctggtgttagagttggtgttggaatcggccttgggatgtgcgtagggcttgggattggtgttggactgctcatgcgatcgtaccaaacaacaactagaaacttcaggaggagatttttctaaactgctataaggaatttgctactctagtttaatgacaaaagcaagaaaatatattggagtttaatctaggtgggacacctctggaggaagaaccaaaattcaacaagtcaaatgcatgaagtgtaagttttgtagatgagtggaggttgtgcttcgtctccgttttgtagcttacttgcagatacgttcaagtagacttgcagatttgcattttgtgtaaattttatctgatcctccgacaacaatagatatcaataaaagagcaatacaatacaacagctttgaggatgtggtgtgccagcaggatctggtgttaagagaccagtataaggttgcgagaggttttgactatgagcatgttcctgagattttactgtttgtttgttggttggttggttggctggcttgtagatatattttatcatttaatccaanctttgagcagtttaaaa

SEQ ID NO: 27198 - DNA, 1127 bp, Glycine max
  Clone ID: PAT_MRT3847_124560C.1
gaatcaaactagcccttattctttatgattaaatacttaagaactctgaaaatcagcaaaccattttgttacagcaagtttacatatctgtaaagaaatgtacaccactggtccttggctcttgaacttgcatggagtactgcaaattccagagaatatcctctattgaagggcggttacttgaaaccttgctgagacaactgatggtgatctgaactgtagtcttcaatgattcatgcacacaagtatcccggagggaagaatcagacatgccctttagtatcggtgatgtaccctttagtgatggtgttgcaccctttagagatggtgatgaagcttctgctaaacctctctcaagatcattcttcagctcctctacttcactggaagatgtaattagtttgccagtgataacttcaagtagaataacaccaaactgatagatgtcttccttttctgcatcattaatgctgccaatttgattgagtgctctttgatcataaaatttttttctatgacttttcttggatggccatggaatgctgtatccgctaactgttgcattgaggcaatcatccaacagaatattctcaatctttatattgttgccaaatatgccaggatgaactctagtgtgtaagaactggattcctcttgcaatgcctatgctgattgccattctttgtggccatttcagcatttccctttttctcctatctgtgttacatggaatttccatgttacatcttttggtcatacaagtgttaatttgcctttgcaattaattctgtgttaatgtttttgtttacctgcaaggtaatccctcaaggacacgtttgagacatgttcgaatacaatgaatattgtgcttatcatttggggatggtcatgatgagtaatgacacagtgtcctagaacactcaccaaatgcctgtgccttaaatagggtaataccttcaagctctgaatactgtttttgtgcaaacttttctgctttagtttattgcgattgaccataaccattgaaccatctatgagccaacctttatatagctgtgcaaatgcaagcaagagtataggccattaccacttggtcttgtagagattatcattatgaaactattgaa

SEQ ID NO: 27199 - DNA, 347 bp, Glycine max
  unsure (1)..(347): unsure at all n locations
  Clone ID: PAT_MRT3847_124561C.1
tngggagnttatccatgaaatatatagaaatgaaaacccaaattaaaaaatttaaccgaggaaaccattattgaaccaaattcccccttatttacctaccttcttaaccgggcattagccttccacgttaccttaaactaaaaggggtgtttcccccttggttagggccaaaaaaattttgtttttttaacccccaacttccttttgggttttgggaaaaaggtttttttggccaaaaccccccccacccaaccaataaatcaatcattttttttttccccccaaattttttatacagggccattttaactcaaaaatttcacgggggaaacccccatttttttttt

SEQ ID NO: 27200 - DNA, 388 bp, Glycine max
  Clone ID: PAT_MRT3847_124562C.1
aattaaaacacttggggggaaaaccccttttattttttgaagccacaaagtgtaggggaaccaccgtgaacaccgggaaaaattaatgggtcatcccaagggttttttttaggggggagacaatgtaactcaaaattttaaaggattacaagcccatttgaacaagataaaatattgggttttatcaagggataccttctttttaaggggagaatgcttaggtcctcaggggggggataagcagggtccctcctcacttcttgcagaggggtcgaagtttgaggcatttggatcattacaacctttaggaacgggaattttctcttgcagggccgctttggcaaagaaaggccctcttttggaggcattctggttggcattaccaaaa

SEQ ID NO: 27201 - DNA, 339 bp, Glycine max
  Clone ID: PAT_MRT3847_124563C.1
tattgaggctagggattggggttaggactgtcagcctgaggattccttcaaccgcccttcgttctgtttgatctctgagggagacgttccgtgtttagtagcacggatcagttgaggcctggtgttgggaaacgcacggtgtcactttggagttgggaaaacaaataacaccgagagagggcacccacgaaccctcttgatctggagggtgacgacgctgaggacccgtttgaggtaatcgccgccaagcaagtaaaggcggcggctgctgctgcggctgccaccgacgctcccaagaaggcgccggatcagtagatcaagccgggtcaggtccctaac

SEQ ID NO: 27202 - DNA, 390 bp, Glycine max
  Clone ID: PAT_MRT3847_124564C.1
gtggattttttgtaacataatacagctttatattaatagacttcattacatatccagggagcacaacatgcacaggaagattgatcctccctcttcagcgaaaatggtataggcctgccgggcatacataaacgcaaacacacgcctactgtatcattacacaacacacacgagggattagagacggaactgaccctcgctacgccaatggctcgcacaactatatgagtagtcaacacacagaaaagggatgatgattatccatacccatgacaacggggatattgaaggagagcttcagttttagcgccactaatcttaccgggaaggttggcatcaaccccatcaaaacaacggtggagtctacacccaaggaggatggcgactaaa

SEQ ID NO: 27203 - DNA, 337 bp, Glycine max
  Clone ID: PAT_MRT3847_124565C.1
gacccacgcgttcgcgctgttgctgagtcggtcccataaattgaagaatgactcgcttacgactctgtacaagcgtgcttctgtgaggcgggccaaggataaagcggtgagtgcctaagcattaaagccgcttctcgaactttttgcggaggatgggagcggaatggctgataaatcgatggtggtgctgaacaacttgacgggcattgagaataggaaagatgccattgttgaataaagtgggattgatgcacttctggaagcaattgatgattgttctgtataaagaaatgaattcgattgtttgactatgtgcagctgtaggctcacaacattt

SEQ ID NO: 27204 - DNA, 414 bp, Glycine max
  Clone ID: PAT_MRT3847_124566C.1
ggtttggacttcatctgtcaattacatagtggttcaaataacataatgtttcttaaatactagttgagtgcagaccaaatgttatggttcaaaacatgtaattgattgacaaaaccaggaaatagaacaacacagcagcaaaaatccaaaggctaataacgttgaatcaaaacaaagataaggaatagaagatgaacacgagcaattaggtggttcggtcacaaaggacctacatccacaagaaagaagcgaaaccgatcttctatggtccaagagttacaaagatgtatgtgtataaataaaatcttgtttggtaatttcaatgttgagataacaatatcaaggatccccaagtttcaactttatctctctcacacacttcgatcttcctctcattgtgattacaagaatggg

SEQ ID NO: 27205 - DNA, 466 bp, Glycine max
  Clone ID: PAT_MRT3847_124567C.1
gcgtaccttcctgataaattgcgcaattttatttggggaaagttttagtcggaactcgtacttcaaatgctttttttgaaacagcagattttagcaattgattataatcattttgagtttaggttgtgttactcaaaatttgttggatttgattgcaattcagtttgaattatttaactatgttcccttattactttactcatttacgtattcagactgatgataattaagtaaattacttaaataaaatgaattgtaagttccaacataaatttcatttgcaaattagttcagatagtctttttttgaagaattccaaacacaatagtttgattactaaaaatcaaatctattttgtattttagcggttctgaggacagtgtatgtaatttgccctgaagaatatagcttaagcctcagaagaagtaatttgtctgaaaaatttattggtttttattcttatcgt

SEQ ID NO: 27206 - DNA, 289 bp, Glycine max
  Clone ID: PAT_MRT3847_124568C.1
tctgagccaggcccactttttttttctacactctggaatgtcgcctaggtttttatacgagctggagcttacgatcttaatagacttatgggagtcactatgcttgatgacgtttgagtcaatacgtgtgtggctgaagatctaggggtggagccaagggatgtggatgtgccacttgttgtgcgacatgcttgaatcacagtttcaccattatttttttacagtaacccgtctcgttcgtttacgctaaaggaaagtgcgtgcctgactggtctgatacaaaacagtt

SEQ ID NO: 27207 - DNA, 843 bp, Glycine max
  unsure (1)..(843): unsure at all n locations
  Clone ID: PAT_MRT3847_124569C.1
ttattgacttatttaatgtttattatcactaaaatatctttcatttgaggtgttagcttcaacgaatctttattaattcctgataccaatttctaatgaagcataagttggacaaaaatttactttttaattgaaactaatactaaactaactttcttagttagagtgaatcatttcttattttttatatgtaagatctaatatacactatataaagaaacttgagagattagtgggggcatttccccccagtgttaaacctgcatccgtccctgactcaggtaattgtttaaagcaagtattgttataggactttcaatatctccttgttccttctcatttagagcagatgaaatatacttgggttgtattgaactattgatcaattcatgcttcttaatgacaaaaccttaaggtattgtctagtgcattgtataaagtagatctttattgtaagaaaattccatttttactaggtgtttgcacctaagtagtcaaatctagccaaacattttgattccttacaatcactcttccaacacttgatatcacctaataagaaaaaaaccggcctccttccttgctctagtgtaagccccactgccaatgccactaccacttacacaactaattatcagatacaacatatcgataggagccttcaagaaataaggaacctgaagggctttttataatccaaacttaataaaaatcctaatcaatcaaacaaaaactcgcaaaatgaaatcttatanagacaagataaatacctcaattgcaaaagtagaaagacagntattccaaaaaggtacacataattaataaatattttatatcaccctc

SEQ ID NO: 27208 - DNA, 236 bp, Glycine max
  Clone ID: PAT_MRT3847_12456C.1
cttccacacttaataggaaaagaaaaaaaaaaaaaaaaagtaagcacagctttgttcggcttcaattccctaacaatggcgatggctttcaaaatggcgattacggggatgtgggttacggataagttcaaaaactccttcatggaaatgaagtggaaaaaggggcacaattacatagtcttcaagatcgttgagaattcaaggcttgtcaccgttgaaaaggtcggtggccccgg

SEQ ID NO: 27209 - DNA, 449 bp, Glycine max
  Clone ID: PAT_MRT3847_124571C.1
ggtcttgcttgatctgcttctacctacactccgaacggggaaatgctgcatccaccctatacatattgatgtatccaccaggtgccaaatgacaggtgcaaaggccacaagtccgaagaaagtgagaagtagcgtgcatgatgatagtgatagttgactggctgtggatgtaagagccacgaagataatatgaggctgtggtgtattataaaagcagaaccgttgaacttgaacaatctactttctcataccattcacttggcaagttcgtcactgaggagtcttgctgcggcaaccatgtctgtgagggctggcttcacttcactgcacttgcgggttttgagaccacagtcagggttgacccacaagatgttcttcttgagcactgcaagcatcccattgattctgtcagcgattttattagttggcggtattcttggcgagtggat

SEQ ID NO: 27210 - DNA, 306 bp, Glycine max
  Clone ID: PAT_MRT3847_124572C.1
agcaacacaacacactttgggggcggatatgaaacttgtgaaatgtcttaaatgcccttcctagctcgcatcagcatagcaactagaggagtccccaagtggctgggaatagctgtttgagcaaaagtggcgcatcaaagaagcaaaatggggatctaatcagtaatcacataccaatcatcacgaagtttttgtctcctaaatgtgacatgcatgtaacatatatagctaggcccaatgacataattcagtgaccaacttggaactgtctagtttgattggtttgatcaaaaaaaaaaaaaaaaa

SEQ ID NO: 27211 - DNA, 384 bp, Glycine max
  Clone ID: PAT_MRT3847_124573C.1
aataaaaaaaaaaaaaaaaaaaaaaaaaaaaaggaaagaaaaaaaaaaaaaaaaaaaaaaaaaaaaaaaaaaaaaaaaaaaaaaaaaaaataaaaaaaaaaaaaaaaaaaaaaaaaaaaaaaaaaaaaaataaggggggcccgccacatcttgggttggttcccccggaaattaattcgggccgggtccctgaggggtcccaacttttctttatttggggccttttaaaacctggggaatacaagggatatagtgttttcctggggaaaattgttttccgttcaaaattccacaaaaaaaacaccccggaggcttaagtggaaaagccgggggggcctaaggggggacctacctcactttaatggggtggccctccctgcccct

SEQ ID NO: 27212 - DNA, 1775 bp, Glycine max
  Clone ID: PAT_MRT3847_124574C.1
ggcttgatatcactcaaaaaaaacaaaaacagaaacaaaagatggttcatcagaggcaaaacaacatccatgttcttgttcttccataccctgcccaaggccacatcaacccccttgtccaattcgcaaaaagattagcttcaaagggtgtcaaagccacagttgccaccacccactacactgccaactccatcaatgcacccaacatcacggtcgaagccatctccgatggtttcgaccaagccggcttcgcccagaccaacaacaacgtgcaactcttccttgcctccttcagaacaaacggctccaggaccttgtctgagctcatcaaaaaacaccaacaaactccctcccccgtcacctgcattgtctatgactcatttttcccctgggttctcgacgtggcgaagcagcatggcatttacggagcccgcctttttcaccaactctgccgcggtctgcaacatattctgtcgcatacaccatggtttccttcagctccctgttaagatggaagacctacccctgcgtgttcctggacttgctcccttggattctcgtgcacctcccgcatttcgtcatgtacaccgaaagctaacttgattacatggccatgaaattgagccaattctcaaacctgaacaatgcggattggatgttcgtcaacaccttttaagcattggaaagcgaggtgttgaaaggcttaacggagctattgccggcaaagatgataggtcccctggtcccttttggttacttggatgggaggattaaaggggacaaagggtatgtgagcaagtctatggaagccgctaactgaagacttgaacagatttcttgaaaacaaagcctcatcgttccttagagtacatcaccgatgctagaatggttccattgacagcagaatagattgaagtggtagctaggggaatgaaagaaagtggggtgagtttcttgtgggttttaagagaatctgagcatggaaaattgccctgtgggtacagagagtcggtaaaagataagggtctaattgtgacatggtgtaaccaacttgaattgctggctcaccaagccactggctgctttgtgactcattgtggctggaattccaccctcgaaagtcttagcctcggcgttccggtggtgtgtttgccacagtgggctgaccagttgcctgatgctaaatttttggatgaaatctgggaggttggtgtgtggcctaaggaggatgagaaaggaattgtgaggaagcaagaatttgtccagagtttgaaggatgtgatggagggtcaaagaagccaagagattagaaggaatgccaataaatggaagaagttggctagggaagcagttggtgaaggaggcagctctgataagcacattaatcaatttgtggatcatttgatgaatgcagataaaaatggaagtttgaatgtatactgagtgcctatgctcatcataagttgttatttgttagtggaagcatgtattctgggtgcatttgtgttcattttttcaacatgaaaatttatgtgaatgtatgacatcctttttcagattcattattgctatcaaagtttgattttggctgcttcgttattcttggtttgctcgagattaatgaaggcataatagtatcacatcattaatatcagtatatcacatatggcagtccagagtaaagaaatctactcatacacataacttattactctcttacagtaaaagtaataataaaacttcaaagcaattcacttttcgtcatctcgcaccgt

SEQ ID NO: 27213 - DNA, 359 bp, Glycine max
  Clone ID: PAT_MRT3847_124575C.1
acaccacatatggtataaatattgcagagacattcctatttacctcagaagccgttaactaaagacaccgtgccaagctcttcaaccaaatcttcgatactgtccttgacgcttgcctctaacaaaacccatacagcaaagtttccttcgaaacatgcaccaaaaccaacttgctcattgacttctgaaaaatcacgaccaatgccaacgttgactactataatatagtgcgtgacaccttcaagaacatctacttcgtctcaaatgatgtgggacttgatgcctacaactgcaaagtcctactcaacattaaacatcataacccttatattgctcatggtgtacacagtcaccttacc

SEQ ID NO: 27214 - DNA, 582 bp, Glycine max
  Clone ID: PAT_MRT3847_124576C.1
attccagtctccactggactctacatgaaccctcccactcctggtagcccctctggatcagatgtgagtgagtccagcgtactggttgcatcctcctcacatgttttccgacccgtgcctagaacaggcgcggttctaccacccgtagaaacaacaacgactttgtcttccaatgaccctccaacctcactttccctatccctccccggtgttgactcatccgaagtttccaatcgaacaactgagccgattcatgccgcacctcctccgccgccacagccacagccacagccacagccgttgaatactatccctttgctcccaatgatgacggtgccctcggtttctccgacggggatggcgccgtttaattttagcgcagagtttctggcggtgatgcaggaaatgataaggaaggaggtgaggagttatatggagttgcacaatcagaagaatgggatgtgttttcaggctgcggtgaatgatgggtttagggacgcctcggtgaagcgtattgggaatagcaggggtgattcgtaaatattatcatcgaagaatggaacaacacaagtagagatgagg

SEQ ID NO: 27215 - DNA, 674 bp, Glycine max
  unsure (1)..(674): unsure at all n locations
  Clone ID: PAT_MRT3847_124577C.1
ctagatgcgccatcaagttgctgagaaagattgaagacagatcaattaggcctgatgtggtaatgtacagcacaatcattgatagcttatgcaaagataaacttgtaaacgaggcttatgatttttattctgaaatggatgctagaggaattttccctgatgttatcacttacactactctaatatgtggctnttgccttgccagtcagttaatgggagcattcagtttattaaatgaaatgatattgaagaacatcaacccggatgttcatacctttagtatattgattgatgcattatgtaaagaaggaaaggtgaaagaagccaaaaatttattagctgtgatgatgaaagaaggagtaaaacctaatgttgttacttataatactttaatggatggatattgtttagttggtgaagtgcagaatacaaaacagatattacacgccatggtccaaacgggagtaaatcctaatgttcgtagctacactantatgattaatggattatgntagagtaanaggatggatgaggccatgaatctcctaagagaaatgctgtataaagatatgattcctgatacagtgacatacagttctcttattgatgggttctgtagatcagggagaattacttctgccttgaatccttttgaagagatgcaccacagaggt

SEQ ID NO: 27216 - DNA, 276 bp, Glycine max
  Clone ID: PAT_MRT3847_124578C.1
aaaaaataaattaatataaaaaaaaaaattaaaaaaaaacatatataaaaaaaaactaacgacctgcaaaaacaaaactgtatacctataattaactatatctttcaatcaaatctataaacaaaaaaaaaaattcaaaccactataataataaaaactctgtgctccacttataccactaacccttattcacatcatgattacttctacagaataattatatcactccaaatttttaattctattcccagatttttcccaactgcaatctctaaa

SEQ ID NO: 27217 - DNA, 324 bp, Glycine max
  Clone ID: PAT_MRT3847_124579C.1
aaagagcggaattttcagtccctaacaggcacttgttgtgaagccagtgcacaggcaaatgatggggaagagcaagggaatgagaattgcgtgccaagccaccaacattcctgctgatagaagccctgacatgggctaaagaccgctgaatgatctgctttttcttggtgccaattgaatcccctctgctggaatgcttattgcctacacctacttttttgtgccttcacgttcaggctcttgatctggaggcactgatgccaaggatgctgtgggaaatgatgtaattgcagagaattggctgaaggcacatggacctgggga

SEQ ID NO: 27218 - DNA, 933 bp, Glycine max
  Clone ID: PAT_MRT3847_12457C.1
cggggcggcgggggcgtccgcccacgcgtccgtacggctgcgagaagacgacagaaggggacagcacaacttgtttatcggagcggggctataaacgttggtggtttcagataaacacgtgactcactatctatctatcaatcgatatctccgagttcagccgaaccaaactccgaagctatggcagagctccaaaccaagggtgaacctgttacggtcccggctccggtggatcccgagccaccgctagctgaggctccgccgctcgagaagaaagcggtggcggtgccaccgcctgttccggctgcggcagaggaaaccaaagctcttgttattgtggagaaggagaaggagaatgagaagataccagaacctgtaaaaaagaacgcctcaggtggatcccttgatagagacattgctcttgcagaaatagagaaagagaaacgattgtctaatgtgaaggcttgggaagaaagtgaaaaagaaagcagaatatggtgaaaaaaatgaaaaacaaaatagccttagttcacaagcaagcagaggagaagagagcaatggttgaagccaagcgtggtgaagaaattctcaaggcagaggaaatagctgcaaaacaccgtgcaactggaacctctccaaagaaggcctttggatgcttttaaatttttattcctttttttgttgttgtgcttttgtgcctgatgtcatagcaataatgaaatttttgtctataatattttcatgtttgttttttaaatgttgtttatgtgtgtacgaaatggaaagggggacactatgaagtttgtgacatacagaacagcatagaacacttcatcttaacaaaaagatctagaggctgttctgtatgttaagatgaagtgttctatgctgtttattcatttgttttttccataacagaatcattctattcac

SEQ ID NO: 27219 - DNA, 3490 bp, Glycine max
  Clone ID: PAT_MRT3847_124580C.1
cttgtgttccttttctctctctaatttcccgggtaaatttctcctattcttgctctctggtttcccggcgtccggcgagaaagcagaaagccataaagaagacatttctctgcttccaccgaaactcttcccttcacctctcacttccttacttttctttttccattttcagtaataattactttattcttcactttcaaatttcggggatttcccatgatccccttctatcctatcctctcttcccctattgactgaaaatggacaagcattctgggaattcttcatcagctcatgctgctgcaggtccatctgggatttccccacataatgttccaaaaaaagcgggaagcagtgcatggggaataccacgtgccagtgatgtgttccatgactcaagtgatgttagcttgttttctagttcactgcctgttcttccacatgaaaaattagatttgactgattcggaaaattatggtcaaccagttgatgataacttgctaacattagataaagttcacaaagaggatgagggacacgatccttttgatgactttgaaaccaatgcaattggaaacatgcttcctgatgatgaagaggaccttttagctggcattatggatgattttgacctcagtaaattgcccagtcaactggaggatttggatgaaaatgatctgtttgtcaatggagggggatttgagatggattttgaaccccaagagagcctcaatatcagtatgtccaagataggcatatcagatggaattgcttcaaatggtattggtcagtatgcaatcccaaatggtgtcggaacagtggctggggagcatccctatggagagcatccatcaaggacattatttgttcgaaacatcaacagtaatgttgaggactctgaattacgaacactatttgagcaatatggggatatcagaactttatacacagcatgcaagcataggggctttgtgatgatatcttactatgatattcgagctgctcgcactgccatgcgtgctttacaaaacaagcccttgagacgaagaaaacttgatattcatttttcaattcctaaggataacccctcagaaaaagatattaatcaaggaacccttgttgtgttcaatttagatccatcagtatgtcatgatgaccttcgtcaaatatttggggcttatggtgaggtcaaagagatcagggaaacaccacataagagacaccataaatttattgaattttatgatgttagagcagcagaggcagctcttaaagcattaaatcgaagtgatattgctgggaaacgcataaaacttgaacccagtcgccctggtggagcacgtagaaacttgatgcaacaactgagtcaagaactggaacaagatgaagctcgaacttttagacatcaagtagtttcacctgtggccaattctcctcctggtagctgggcacaatttggtagtccagttgaacaaaatccattagcttcttttagcaagtcccctggtttgggccctgccagtcccattaataccaaccatttgtctggattggctgcaattctttccccacatgcaacaacctctaccaagattgcaccgattggcaaggaccctggaagggctgcaaatcagatgttttctaactctggatcaacacaaggagcaacttttcagcattctatatcctttcctgagcaaaatgtaaaggcaagtcctaggtctatatctacttttggtgaatcaagttctagtgcatcaagtattggaacactgtccggtcctcaatttctttggggaagcccaactccttactctgagcattcaaacacttctgcctggtcttcatcttcggtggggcttccatttacatctagtgtccaaaggcagggtttcccatatactagtaatcacagtccttttcttggctcccactctcatcatcatgttggatctgctccatctggccttccacttgataggcattttagctacttccctgagtcacctgaagcttctctcatgagcccggttgcatttgggaatttaaatcacggtgatgggaattttatgatgaacaacattagtgctcgtgcatctgtaggagccggtgttggtctttctggaaatacccctgaaattagttcacccaatttcagaatgatgtctctgcctaggcatggttccttgttccatggaaatagtttgtattctggacctggagcaactaacattgagggattagctgaacgtggacgaagtagacgacctgaaaatggtgggaaccaaattgatagtaagaagctgtaccagcttgatcttgacaaaatcgtctgtggtgaagatacaaggactactttaatgattaaaaacattcctaacaagtatacgtcgaagatgctgcttgctgcaattgatgagaatcaccagggtacttatgacttcctctacttgccaattgacttcaagaataagtgtaatgtgggttatgcttttatcaatatggtgtctccttcacacatcatcgccttctacaaggcctttaatgggaaaaagtgggagaagttcaacagtgaaaaggttgcttcactggcatatgcacggatacaaggaaaggctgcgcttgtgatgcatttccagaattcaagcttaatgaatgaggacaaacggtgccggccaattctctttcattcagagggccaagatactggtgaccaggaacattttctatccagcaatttgaatatttgcattcgccaaccagatggatcctattcaagtgatttgttggagagcccaaagggcaatttggatcagaagctagagaaagattaaccatttattagacatattgttcctagcccacaataaatgggttctaggattgctaactatttgcataggtgatcctaaggtgtacaaagccaattcatgaaaaaaggaaaaaaaaaagttgtataaaaatgaagggagcaacccagttatcagcgggtggagactccaaatatgtcaataatcataaaagatgcagagagcagtttgttgatgtgtagagaaacaattgttttacaatcagtggaaaagaataacttggagtgtattgctggatggttggttcctaaagcagcatgcatgccagattgtgcaggattgactctgtctgggatttgttatttttttcttcctctgttgaggctgttgtggccatttgcggatatgaaactattgtgtatatggggaaaaaaaatcaatttatgggggaatggtttgtatagaatgggaacaaggaactatcctgttatttatcaatgttgtttatcatgtagccaaaaaatgtgaatgtctgtaaagatgtgaagttgtgaactggtttcttgccattgtagttgtgattttaaatattggatgcactgtaaagcactgttttatcaacccctatttataaatctgagtcttactcattaaaaaaaaaaaaaaaaaaaaaaaaaaaa

SEQ ID NO: 27220 - DNA, 611 bp, Glycine max
  Clone ID: PAT_MRT3847_124581C.1
ctcgagccgctcgagccgctcgagccgtcagtatgcaatcccaaatggtgtgggaacagtggctggggagcatccctatggcgagcatccatcaaggacattatttgttcgaaacatcaatagtaatgtcgaggactctgaattacgaacactatttgagctatatggggacattagaactttatacacagcatgcaagcataggggctttgtgatgatatcttactatgatattcgagctgctcgcactgccatgcgtgctttacaaaacaagcccttgagacgaagaaaacttgatattcatttttcaattcctaaggtttgttttttgtggcattattcagtgtttgactgattagcattgatgttgcgtttgtttcattcatctttcttctgcttgtcttaggataacccctcggaaaaagatattaatcaaggaacccttgtagtgttcaatttagatccatcagtatccaatgatgaccttcgtcaaatatttggggcttatggtgaggtcaaagagatcagggaaacaccacacaagagacaccataaatttattgaattttatgacgttagagcagcagaggcagctcttaaagcattaaatc

SEQ ID NO: 27221 - DNA, 493 bp, Glycine max
  Clone ID: PAT_MRT3847_124582C.1
cgcgcgagcagccgccagggcgaccgacacgtgcatactgccgccacactaccacacattgctaaagaatttctctcacaaagtagacgtttgggttataaggcgaatgtgccaaaacagatcgccgaccatagcatgtgcttattgaagctccactgagcgctgaatctacttggtctgcttgagagatcgatcgtgttaacacacatgtaactgcagtaaatcaagtggaataatgatatcacacatgctcagaatataaacctgaccagatttataaattttttagttcacacacactctaatatatccgaccttgagcctttctcctgatcttgatgtgcgaatatacaaaaagctgctaacaactcagtctaatattatggctctgaaagatgaggctaagtatagggtgcctgactctataggaccggtatcatgaatatcaggagcgcagaacccataaatgtagtttacaatagcatggcctata

SEQ ID NO: 27222 - DNA, 1218 bp, Glycine max
  Clone ID: PAT_MRT3847_124583C.1
tggggtgctggtttgtgctgctgggcaggagtttaggggggacgtggcgctttgtaccgtgccattgggggtgctaaagaagggggatattgagtttgtgcctgagcttcctcagaggaagaaggatgctattcataggttggggtttgggttgttgaacaaggttgcaatattgtttccttataatttctggggtggggacattgacacgtttggtcatttgactgaggatttgagtatgagaggggagttttttctgttctatagctactcctcggtgtctgggggcccgcttctggttgcgcttgttgctggggaggctgcgattaggtttgaaatgatgttgccggtggagtctgtgaagagggtgttggacattctgaaggatatttttaatccaaaggggattgttgttccggatccagttcaggcggtttgtactcggtgggggaaggatcactttgcatatggatcttactcttatgttgcggttggatcttcaggagatgattacgatattcttgcagagagtgttggagatgggagagtgttcttcgctggagaggcaactagcaaacagtatcctgcgactatgcacggcgcgttcctcagcggaatgagagaggctgcaaacattttgagagtggcaaagaggaggtcttcgatgactattgatacaacaaaaagtgtcaaccaggagaatgatgatttgaacaaattatttgtgaaacctgatctgacatttgggagcttctctgccttgtttgatctaaatttgaatgatcatgattccagttcattactgagggttaaaattggaggagttgtgttggactctggcagtctttatctttatgcctggctttcaaagaagcgggtcattgagttgagtcaggtggagggagatgagaacaggatgagaatgttaaaccgcaattttggggtgagtttggttgggaggaagggtttaagtagtgctgctgaatctcttattgctaacataaaactttctagacccaactttaatgaaacggaaaatggccttatggctgagaaggaaaattcttagtagcatcttatagagaatatacctccgtgctcagttaactgtattaaacacatttttctgttaaattcaattagtttctgaccattttttccccattgttagccatttttcccgatgatgttccataatgaacaaattgatttggctct

SEQ ID NO: 27223 - DNA, 344 bp, Glycine max
  Clone ID: PAT_MRT3847_124584C.1
ggggggaagctttgataaatttaagtttggcgttgcggtgctgagttctgatctgctttaaactgaagaactttaaggggttttctcgcaaatggaggtgctgtgggtcacaaggcatggacgaatgtttgaggggagggtgttagtgctcttggctttgttcttgtggattcccgcacaggtggtggtgggaaggacaagaactaccatcacaaactctactgcttcttcagcaccaagagttttaagaagtggagcactgtttactcttaattctataattggaagatcggcgaaacctgcacttatggctgctttcgaagatgttaatgctgattcgagtg

SEQ ID NO: 27224 - DNA, 265 bp, Glycine max
  Clone ID: PAT_MRT3847_124585C.1
cggcggccgcccttggttcattggaattaaaacaaacgcgggttaaaatattttttgacggcaaaacaaaaacagggggaacgtttgggataatttgatccggtatatatagaccaccaaaaagtctataaacacaaggggaagctaaattaaaccccaagaagaagaaaaacctagtaaaaaaaggcaaacaacggaaaacacctccaaacatggccacttaaacacaaattaaaaaatgaaaaggaaagaaaaaaaacaaaaa

SEQ ID NO: 27225 - DNA, 531 bp, Glycine max
  Clone ID: PAT_MRT3847_124586C.1
gcctagcaagcatgtctcaataaacggaggcaaacctagccatgccctcatgtgcttggcacgcgttacactctttctctgctctctaaccctattcggtgctcacggaagcaccaaggtctatgacatctagagaaagccgaaactaggggacaactatcttatgcactcggagaccaagttcttgggtttcatgcataattactggacgagctactacacaaaggatgagtatttgctccggtgggtgattttcacccagaacatggtcttagcggcggagcatgaggcgctggacccctccgccgtacacagcagtaacgctattctccaatctcaccgccgccgagtttgagtaagctctacactggcgttcaatggcggctccccgccatataataatgcctccagcggggttgcgcccccgtccgaggaggacggactgcctgagaatcttgatcgaagagagacaagacctgtcaccgactttaatttgcacggtagatggggatcaagctgcgctctcagcac

SEQ ID NO: 27226 - DNA, 619 bp, Glycine max
  Clone ID: PAT_MRT3847_124587C.1
cgatcagagaaagaggggagatggaagttgaagggtcatcgaagaagatgatagcgactcaggaggagatggtggaggccagggttcctctggcctacagggaccagtgcgcccacttgctcatccctctcaacaagtgcaggcaggccgagttctacctcccatggaagtgccaggaccagcgtcactcctacgaaaagtgccagtacgagctcgttatggagagaatgctccagatgcaaaagatccgcgagcaccaacaaaaccccaacgccaaacaaccccttatcgcgcttcccaaacccgccaatgcctgattcatattcactgtatgctcctctcttctttctttttatttcttcaattatctcgctttgtcactaatcgggacttagggttgctggattcgagggtgagcgattgatgctgttataccaattcaattagggtgctgtttctctattactaactagaattactctattttctgagatacatgtctttattttagttagttgattaataaatctgccactggtttcatggctgaaaaataacccttcatattggtgatggtttggggtatgtagtatatcgttaatcacaatgctggctgcag

SEQ ID NO: 27227 - DNA, 263 bp, Glycine max
  unsure (1)..(263): unsure at all n locations
  Clone ID: PAT_MRT3847_124588C.1
tggaaccctccgtgagcatatctacngcaccgataacccttctctttcatggaagcacaggcttcagatatgcataggtgcttcacgaggactgnattatntgcatacaggtgcgaanacatggatcattcaccntgacgtcaagagcaccaanatcttgttggatgaaaaatgggtagccaagggtttcagacttcgggttatcccgnatcgggncnattggntctgcggtnattcntgtagtaanncgggcnnaggnanct

SEQ ID NO: 27228 - DNA, 139 bp, Glycine max
  unsure (1)..(139): unsure at all n locations
  Clone ID: PAT_MRT3847_124589C.1
gcggagactcattgagtaacatttgatgattttaaggattcaanttagaatatcttcaactaacaaggactaattaaaagctcggtagtaaatgtatttattgtaacttataagtgataactgatatcagttgggagtt

SEQ ID NO: 27229 - DNA, 157 bp, Glycine max
  Clone ID: PAT_MRT3847_12458C.1
aaaacaaaattatacaattttagggtattcgagtttagcaaaacaaaaccctatacatccccaattttatggaactttttaaaggtgttattctcttttcaaaaggtttccacttcttattacaacctaaacctttttatagaaagtccttatttta

SEQ ID NO: 27230 - DNA, 815 bp, Glycine max
  Clone ID: PAT_MRT3847_124590C.1
ggctcgagcggctcgagcggctcgagaaacaaacaagcatgactcgagcctactctttcctcgtctctttggtgttcatcactatgaccccttcaacaccgcaggtggaagccttctcctaccacatcaactgcggtgcttccaccgactccaccgactccttcaacaccacctggctctccgaccgcttcttctccgccggctcctccgctctcgtctccgagcctctccatttccctctcccctccgagaaaaccctccgcttcttccctccctcctcctccggcaagagaaactgctacaccttcccttctctcccttccccctcccgctacctcctccgcacattcaccgtctacgacaactacgacgccaagtcccgccctccctccttcgacgtctctctctcctccaccgtcctcttcagctggcgctccccctggccggagtccaccgcccgcaatggcgcctactccgacctcttcgcctccctccccaacacctcctccctcgatctctgcttctacggcttcgccaccgattcccctctcgtctcctccattgaactcgtccaagtccaccccgccgcctacaccaactccaacaacctcattctcgttaactacggccgcatttcctgcggcgctgccgccaaaccctggggcgccggcttcaccaaccacaccgaccgcttctcccgctcctggcagccggactacgacttccgaacaataccggaagatcgcgacgaggtccgctctctctcgacggataactcaatctccggcgccgacgaggcgcctaattacttcccg

SEQ ID NO: 27231 - DNA, 193 bp, Glycine max
  Clone ID: PAT_MRT3847_124591C.1
actatatatcattttgaatcattaactgtccttcggttaaaaaaatactttacaattttatcagttttgattttataggtaagaaagatcttctcttcctcaatgagggacatttatgctatcattgagggacatttatgctttcatattgtagaattattttataggtaagaaagatcttctcttcctcaat

SEQ ID NO: 27232 - DNA, 410 bp, Glycine max
  Clone ID: PAT_MRT3847_124592C.1
cagcagtgctcagtcccacttttgcatggctaacctaatatcatggctgtcctgtctcatcacacgggaaactgtctgtaatgatactccccagtaccatcgcctacacgtataacgtctcatggtttccatattctccgactctgacctagcctctctattcagacgctatcttgccatactcgtgaaaggttccgcgctgcttcgcatgaggctacgattgtgccatatcttccattcttgcgcgatttactcactggtgcctctttgatgcccatcaacttctttagtgaggaccgttgactattgagcactcttatgctggctggctcactgactcactactctcactacatcagttgttactatccggatcatgtcactcttacgccgttatacaggtattctct

SEQ ID NO: 27233 - DNA, 380 bp, Glycine max
  Clone ID: PAT_MRT3847_124593C.1
gtatctgtgcttaatatattgctccttttcctacatcactgtaacctcatactccgattcccacgcacactcgttcccacatcactgtagcataacagcagtggctaagctagcaggatctcatcgagaaattgttgtattactttgggatatcatccatgctgtacatatattagatggccattgcacctttcgggtataccaacacttctcgaggggaattcatcccagaattgtgcgggatcgactgagctgggaaagattgcatcatacaggaacaatgctaacatgcatgattagcgattatggtggccccatgttcgagctatagttcgagaccatcgtagcatgcacgatctgtcataagcttaatgttaact

SEQ ID NO: 27234 - DNA, 219 bp, Glycine max
  Clone ID: PAT_MRT3847_124594C.1
actaaccctgctttttttttttttattgccttccaaagtaaaatacctagggggggtctttttaagccttagggccatgccccccactggcaaatttgcctgttacttcccttccagggcctgaacaacctgcagtaccaaaggcaccaattcctgaagagatatgaaataacgccaaaataatcctttgataccctatgatctatccagacactacta

SEQ ID NO: 27235 - DNA, 265 bp, Glycine max
  Clone ID: PAT_MRT3847_124595C.1
tttgtgtttggggttgtttgactgtgttttctgtcgcttattgagaaaggggaaagagagaggaaataagaaaaaaagaggataacaagacgaggttggcggcgactgggagaaactacggtggcgacacgtttgacttcggcgttggcacgttgattttcaaataattccgatagcggaggtcgtgggcgttccccctatggcggtagttaccggcgaaaggacaatgtcgagggggttgccaatgcaaatttagaaataaaaa

SEQ ID NO: 27236 - DNA, 1096 bp, Glycine max
  Clone ID: PAT_MRT3847_124596C.1
cgagtgaggattgcatttaaatgagaattcgtcattggctgagtccttctgaggcaggtggccctgccaaacgcagaagctccggcagaaattgccaccgcaaacacgtcgaagacgggtagtaatagcactcggtttcattctcccacattcccaattctgagcgttaagatgagtgagaaagagaaaggcaataatagtgagggacagtcgacgttgctgcacggcaagtacgagcttggtcgtgtgctggggcacggaacgttcgccaaggtgtaccacgcgcggaacctgaatacagggcagcacgtggccatgaaggtggtgggaaaagaaaaggtgataaaggtcggaatgatggagcaggtgaagagggagatctcggtgatgaagatggtgaagcaccaaaacatcgtcgaactccacgaagtcatggccagcaagtccaagatctatattgccatggaactcgtccgcggcggagagctcttcaacaaggtctctaaaggccgcttaaaggaggacgtggcaagactctaattccagcagttaatctccgccgtcgacttctgccacagccgcggcgtctaccaccgcgacctcaagccggaaaacctcctcctggacgaacacggcaacctcaaagtctccgacttcggactcaccgctttctccgaacacctcaaggaggacgggctgttacacaccccgtgcggcacgcctgcgtacgtgtcgcctgaagtgatagcgaaaaaaggctatgacggtgccaaggctgatatatggtcatgtggtgtaatcctctacgttctcctcgcaggctttttaccctttcaggatgataatttggttgccatgtataaaaaaatttacagaggggacttcaagtgtccaccctggttctctcttgatgccaggaagcttgtcaccaagcttctcgaccccaatcccaatacaaggattagtatttccaaagtgatggagtcttcttggtttaagaaaccggtgccgaggaagcttgctgccgaaaaggtggatttggaggaggagaagattgagacccagctggagaccatcaatgctttccacataattt

SEQ ID NO: 27237 - DNA, 273 bp, Glycine max
  unsure (1)..(273): unsure at all n locations
  Clone ID: PAT_MRT3847_124597C.1
gaacgcaggacacagttgaacatgatgcaaatntatcttctgagnaaactctctgatttgcatggtttgatgcatatnaaanttggcaaatgcttagacggaggaaaagaggtgcttcataatctcaataatttacaggaagagaataaaagggcccacaaaaagagaaagacatatcgtagggnaaaagtggacatgatacctttggttaacagggacgagcaanagggcacagaagangccggcactgaggtctatgatgatgcaaatgtc

SEQ ID NO: 27238 - DNA, 332 bp, Glycine max
  Clone ID: PAT_MRT3847_124598C.1
cgtcagagacgacagaagggggagggaggggagaagagacagagggacggagacatttatgggaagctcattcccatcccctaaatcccgcacactcattccatgttttacctttcgctcgtcgctcgcaaacgtcaacttcttaagaacaaggttttagccatggcatcgacgcggatcttgaaggaactcaaggatgtccagaaggatgctcttaattcatgcagtgctggtcctgttgctgaagacatgtttcactggctagcaatagttgtgggtcttccatagattccttatgctggaggtgtgttcttagtaactatgcatttgtg

SEQ ID NO: 27239 - DNA, 981 bp, Glycine max
  Clone ID: PAT_MRT3847_124599C.1
aagtaattaggtcaacatggaagtcctcagcagccacagtccctcttcgaacgaccccttcgatttcaatcgtgcaaggatttccccctatctcagcgctccttcttctcccaagcgttttggccaattttattacctaagcgccccctcaagcccttctaaagattttgatcttgcggctcacgatgatgatgccttcgcctttttcgttactggggaatccaagagccctcgatccgcggcagagcttttcgacggcggcaaaatcaagccgctgagcgaggatgattcctcggagtctgctaaaagcccacttctccctgccaaacgatcttccatagcccaaggcaagaaggccattcgcgaagccttctcgacgagaaagaagaaagaagagggagatttaagtgaagaagaacaagagacacgagggagagataggactgcgagttctagtagggtcacgcgttctctctctccttgtaacagaatatctcactacacgtgggacgaggaacgcaaccaatcgcagagcaacaaagccgactcgctttctaagacttccaggagatggaggctcactgactttttgctgttccgcagcgcctccgaaggaagaggttccagcaaggaccccttgagaaagttccccactttctacaagaagcccgaagacccaaaagcttccaacccaggcccaaagactaggagaaaggaacccctctccgcgcatgaattgcactacgccagaaagaaagcggaaacagaggatttgaagaagagaacctttttgccatacaaacaggggatcttgggaaggttggctggcttcggatcaaaatgattcatcatcacgtgcttttgcaaccaccgctatcaatccaattccttttttctttgcgtcagcaaattgtattcttttctttaaattttaatatactaccatcttttcttcttctttttctcaaaaaagtattttca

SEQ ID NO: 27240 - DNA, 3248 bp, Glycine max
  Clone ID: PAT_MRT3847_12459C.1
attatgcttaagtcggtggtattactcattttacaaatcaaaattacccctataagttttttttttttttttggttgaatacctctataaggttttcgaagggtatatatacttttttgttaaattaaattttcatgtcacaagttttaaattgatttaactgataaaatacatatttaaccactgagttggaatcgattaacatgaattattcaaatttactagtgataacaagtttaagtataaccatcttacatattagtatttgaagatatattttattaggcagctcaaacactttccgtgtgatttgtaccaaaaacttaacattacttaatttgttgatcaagtaatgcaaaatcattacagtttaacggctggaggttttgagtttgagtgaaaaatattaggttaaattaacaattaaaactatagtcaaagatatcatttaattgtatgtattattatatactaatactaacataagtttcacttactaatttgattatgtatcatatactaatatgagcgatgatgttaattacatgtatgatggcacagtaatttcactatttatccgtttgattttcgcgacactttaaaatcaaagccactttgtgttgaagggccaactccaaaagaagcatcatcttgtcatcacgtgtccgacagcacaacttgtttatcggaacgttgctataaacgttgttgttttcagataaacacgtgactcactatctatctatcaatcgatatctccgagttcaaccgaaccaaactccgaagctatggcagagctccaaaccaaggttgaacctgttacggtcccggctccggctccggtggatcccgagccaccgctagctgaggctccgccgctcgagaagaaagcggtggcggtgccaccacctgttccggctgcggcagaggaaaccaaagctcttgttgttgtggagaaggagaatgagaagataccagaacctgtaaaaaagaacgcctcaggtggatcccttgatagagacattgctcttgcagaaatagagaaagagaaacgattgtctaatgtgaaggcttgggaagaaagtgaaaaatccaaagcagagaataaagcccaaaagcagctctctgctgttgctgcttgggaaaacagcaagaaagcagctcttgaagctcagctgagaaaaattgaggaacaactagagaaaaagaaagcagaatatggtgaaaaaatgaaaaacaaaatagccttagttcacaagcaagcagaggagaagagagcaatggttgaagccaagcgtggtgaagaaattctcaaggcagaggaaatagctgcaaaacaccgtgcaactggaacctctccaaagaaggcctttggatgcttttaaatttttattcctttttttgttgttgtgcttttgtgcctgatgtcatagcaataatgaaatttttgtctataatattttcatgtttgttttttaaatgttgtttatgtgtgtacgaaatggaaagggggacactatgaagtttgtgacatacagaacagcctctagatctttttgttaagatgaagtgttctatgctgtttattcatttgttttttccataacagaatcattctattcactgggaagaaagtgaaaaatccaaagcagagaataaagcccaaaagcagctctctgctgttgctgcttgggaaaacagcaagatagcagctcttgaagctcagctgagaaaaattgaggtattatttgttgctcagttattggttgatacaatgacatagttttttctattattcatgatgcatgtttggcctagttctgaacattataatcaagataagaaagacaaaataatgtaagaatttatgttgtcctgtgttagatggaataatatacatgattctgttaacacaaaaaatatctagattttttatccaataaattcttttttcctcacccttgtcacattcttacaagacatgtggaacctttatccaattactctcttgcttttgtcaaaatggtatcaaatacctatggagtccctaattgagtccatttactaaaagaattatgcttttattaatgaaatgaacagctacagtctggaacgtactaaagttgatacttctttaataaatagattttgtccatatccatttaacaggtgagctatctctttctatcataagaatacaaaatagtgttattttaactccaattttgacagcagaagttaaacatggcttctcctcggagggacccccttttctccttcctttccgttcaaaaggataaggaacaaattctttaacacaacttttttagtttaattttgtcacagtcaatataaatatttttacattattaatcaattaaaatccattctaaatatcactcaagtaattattataaatattgctctagttattattacaaaagttatgatgataattgcatgctagtgtatgttgtttttattttttaatcaagagtgcactctaattaaatttatttatgatattcaaataatggaactcaacattgaataccacataaaaacatacaagcacttaaagagtattgcattcatctttttaatactctcgagtctaagcaggaacaactagagaaaaagaaagcagaatatggtgaaaaaatgaaaaacaaaatagccttagttcacaagcaagcagaggagaagagagcaatggttgaagccaagcgtggtgaagaaattctcaaggcagaggaaataaatgcaaaacaccgtgcaactggaacctctccaaagaaggcctttggatgcttttaaatttttattcctttttttgttgttgtgcttttgtgcctgatgtcatagcaataatgaaatttttgtctataatattttcatgtttgttttttaaatgttgtttatgtgtgtacgaaatggaaagggggacactatgaagtttgtgacatacagaacagcctctagatctttttgttaagatgaagtgttctatgctgtttattcatttgttttttccataacagaatcattctattcaccaagcaatagattttctctctcttcaaaaaaaaaaaaaaaaaaaaaaaaaaaaaaaaaaaaaaaaaaaaaaaaaaaaaaaaaaaaaaaaaaaaaaaaaaaaaaaaaaaaaaaaaaaaaaaaaaaaaaaggggggggccgttttaaaggatccaagtttacttacgcgtgcttgcaacgtaatagcttttttt

SEQ ID NO: 27241 - DNA, 1509 bp, Glycine max
  Clone ID: PAT_MRT3847_1245C.1
ctcttttcttttcttttccgctcccgtaggaatcgaagatttataattccaatcatatatagtaatcgtaacatcgtagtataatctgattcatcaacagcgcttgtcggaaacagagtcggtttagtttgttagttagttgtttaatgaacgcaattcggtcccgttggttgacgagaatggcagaagacattgggaaaagcaacctcgaatcctcttctgcttcaacaacttcccgaggcttctggccttctgtcttacgttggatcccctcttccaccgatcacatcatcaatgctgaaaaacgccttctctctcttgtcaagactccgtatgctcaagaacaggtcaatataggttccggtccacctgattccaaagttagatggttccgttcatctagcaatgaaccacggtttattaacacggttacatttgacagtaaggatgattctcctacgctggtgatggttcatggatatgcagcatcgcagggtttcttctttcgcaattttgatgcccttgcctcccgtttcagagtgattgctattgatcaacttggttggggtggatctagcaggcctgactttacatgcagaagcactgaagaaactgaggcatggttcattgattcttttgaggaatggagaaaggccaaaaacctgagcaattttatactacttggacattcttttggtggttatgttgcttccaagtacgcactttagcaccctgagcatgtcaatcacttgattctggtgggacctgctggattttcatcagaatcagaaagaattacaaagttcttatcaacatggaaaggatcaatcctgaaccaaatatgggaatctaattttacacctcagaaaatcatcagaggtttaggtccttggggtcctgatatggtcctcaagtataccagtgccaggtttgttacatatacaactggggaaacgctgacagaatctgaatcgagattactgacagattatgtttaccatactttagcagccaaagctagtggcgagctgtgcttaaaatatatattttcatttggaggactcccgaggtcacctcttcttcacagtgcttcagagtggaaggtgcctaccaccttcatatatggttttcaggactggatgaattatgaaggagcccaagaagcacgcaaacaaatgaaggttccatgtgaaatccttagggttccccaggccgggcactttgtgttcattgacaacccaagtggcttccattcagcagtgttttatgcttgtagaaggtttcttaggcctgatccagacagtgaatcccttcctgaagggctaacctctgcatagagtataatcttgtgtaatgctgtctatgattatatatttcttttacaaattaaactcctttatttattcaagccatgtcctattcatgcttaaatggaatttgcaattgtaacttgtaatggcaattcaaaaaataatgacgtctaatataaatttcattactgaaaaaaaa

SEQ ID NO: 27242 - DNA, 1671 bp, Glycine max
  Clone ID: PAT_MRT3847_124600C.1
gaaaggagtgggtttcattaggtgaaagaaaaacaagttgaccttaaagttaaagtcttaaagtatgataaacgagatatagaaattgtccggcgtgaggaggattttgctggttttatacgcgccgaatgtgtgagagagaagggagagctggatacagctaaatggctatggttagaaagttgccatctttccccttcctaccccaccttctccaaatgtttaaaccctagttatcccaaaacaacctcctaataacccattaaaccccccctctcatacactctctaatccaaagagaacaccaccctttttcctcattctcttcctcactaaaacatcacactttttttcatttcaccaaacaaaacagtaacaccacacagccatgacagacagggtgtacccatcggccaagcccgccgcggttaacggcgccgccgccaacccatctttcccggcgactaaggctcaactttacggcgccacacgccccacctaccgccctcagccccaccaccggcgccggagcaagcgccggtgctgctgcaccttcttcttctggctgatcctcaccgttctgatcctcctcctcctgatcggcgtcggcggcacggtgttctacctcctctaccgcccccaccaccccaccttcaccgtgacgtcgctgaaactctcttacctgaacctcacctcctcctccaacacccttaactcccgcttcgacatcaccgtctccgccacgaaccccaacaagaagatcctcttcgcctacgaccccacctccatcaccatcctctccgccgacatcgacctcggcgacggcaccgtccccggcttccagcacccgaagaagaacaccacgctgatcaaaggctccatcctcagctccggccaggcgctccaaagcgacgaagcctcacgcttgaagtccagcatgaagacgcagaacgggctgccactcaaagtgaatttggaaacaaaagtgaaggccaagatgggaaatttgaaaaccccaaaagtgggaatcagagtctcctgcgacggaatcagagtcactcttccctccggcaagaaaccggcaacggcgtccacttccaacgctaagtgcgacgtcgatgttcggttcaagatctggaagtggaccatttgatccacgtaataatgtacaccatacaacacagaggtgtgtaatgtgttaattgcttgtttgttttctttttcttgcctttcctttcagcttcttttattttggtatagttttcgagaatttgtccatattcataattaattaccttaactgaatgcgtctaaatgccaaccagggctgccggggcttcagtcggtgacagttgttagcatgttgaatgcatactagtctatttttttgctaatgtacaccaccatacaacaacagcacagaggtgtgtactgtgttaatggtcttattaatttgttttcttcttcttgcctttggtttttgtttttactttttccttttagcttctttttattttggtatttgtccatattcataattaattacttgaattgaatgcgtgtaaatggcaacgagggttgccgggggattcagtcggtgacagttgttagcattttcaatgtatactagtctatttttttctacatagttttgtatttttctattaaaaa

SEQ ID NO: 27243 - DNA, 2005 bp, Glycine max
  Clone ID: PAT_MRT3847_124601C.1
tcctaatcgtaatagaagaaaaatgatgggcattgaatcgacggggagtaaatggcttgggttggtggcggcggtgtggatacaagcaatctccggcaacaactacactttctcgaattactcggacgctctgaaatccctcatgagcctaacccaaatcgagctcaacaatctgtccgtggccaaggatgttggcaaggcttttgggcttctggctgggctggcctcagacaaattcccgacttgggccattctcctcattgggtccctccaaggccttatcggctatggcgtccagtggctcgtcgtcagccagagaatccaacccctcccatactggcagatgtgcgtattcctctgcattggtggcaacagcactacctggatgaacaccgccgttctagtcacatgcatccgcaacttccgccgcaacagaggccccgtttccggcattctcaaaggctttgtcggtttgagcaccgccatattcaccgacctctgttccgctctcttcgccgacgaccctgcttcctttctcctcatgctcgccctcatccctttcgccgtttgcctctccggaatgtttttcctccgtgagattcctcccgccgccaccaacgaccaggaagagtctacttatttcgcggttttcaacgcggttgccgtggtcgtcgccgtttacctcttggctttcgggttcgtgccgaaccctagcgctctggtgtctcgggcattcgccgtggttttgctacttctgttggtggcgccgatgggaatcccggtccactcttacttgaaggcacgaaggcaggacgagcggttcaaaccgaatttggaggagcgggttgacgaaccgttgattcgcggaaaagagaaggggagtgaaagtgaggtggagagagggaatgtattagcggaagaggcggcggcggagggaatgagtggaccggcggtgggggaggagcacacgatatgggaggctctgaaaacggtggatttttggattttgtttgtttcgtttctctgtggggttggaacgggtttggcggttatgaataatatgggtcaaatcggtttggcgctgggttattcggatgtgtctctctttgtatccttgactagtatttggggcttcttcggtcggatcgtctcgggttcggtttcggagcacttcatcaagaaagctgcaactcctagaccactttggaatgcagcctctcaaattctgatggcggtgggatacatactcctggcaatggctatgccaggttccctttacatagggtccgttgtggttggcatatgctacggggtgaggcttgccattactgtgccaactgcctcggagttattcggcctcaaatattatggtcttatatacaacattctcattcttaaccttccccttggctctttcctcttttctggtcttcttgctggcattctgtatgatatggaggcgactaccaccgtaggaggaggcaacacttgtattggagctcattgctacagactagtattcatcatcatggctgtagcttgtgttgttggcttcttcttagacattttattgtcattcagaactaagaaggtttacaacaagatctcctccagcaaaaactccaacaaaaactctctgaattcaagtaggcgatgatccaaaatggcccatataaagagggtatgacacttgcgttgaccagcattttgcacaatggtatcctaatttccattggtatggtatggttatcactaacctttttccttttggtaataaaggctggctaatttgtttgtacatccattttgagtgctctgtagcaatagttgtcaaaatgttatagtagcaatttgttgaagaaaatgttgtcaaagattttccatggatggaaatattttgcaatttcttctgtgttgatatattgttctgctattttagccaggtgtcaaaagtattgcatagactttactcaaatttcatcgcaaatatttacttgtttttata

SEQ ID NO: 27244 - DNA, 293 bp, Glycine max
  Clone ID: PAT_MRT3847_124602C.1
gaatttagctttgccttagatgcatgtcagctttttcttgcttccatagttcagggcgtgtgttcaagtcagtatagttcctctctttgcattgggtcttgcacaaattgacttctcaccatgccaaatggtgcagggtagagtcctctgcgttgactgcactcacaattatgacttatctgcatagtaaggtttcagtcaggtgtgacggtgtgaaaacagtgtgctttggcatgtagagaataagaatgcgccttcatggttgatcatcccttatactacgcttccgcttc

SEQ ID NO: 27245 - DNA, 541 bp, Glycine max
  unsure (1)..(541): unsure at all n locations
  Clone ID: PAT_MRT3847_124603C.1
acttgatgccttttaattgcanncaagtttcaacctccatttgtgcagtatgacaatgcttttaatccgttcagtcagatatcacaaaatcaagcttcacttggctatggacctcctccaagccctatgatgaatccttttggtgtcacggggtcaaatcaggtgtctagggatggtgcttatgtacagtggccaagtgctgcaatgatgtatgcacattcatatgaccaatttagacatgctgttttccaggctccgattgctcaacgcccattgagtttcgattattcccagaattactagatgacgtttagagggaagttttccatttggctgcagatgttattttacctattaaggatttcagagtaagatacaatttttctgtactgttataatagacccttgttttctattctggtttttaagttttgatggtggtagtaagcattcggtatttcctagtgaaatttttatactggactgtagtgaaagtactggatttgaagtctatgaagagttatatgtggttcccttgtcc

SEQ ID NO: 27246 - DNA, 132 bp, Glycine max
  Clone ID: PAT_MRT3847_124604C.1
tacggctgtgagaacacaacagaagggatatttcaaggtgatactacatgaaagcaaactagctctagcagggtgatattgggtccattctacaccaaagatgcaaagagtaagagacagtcgattttctta

SEQ ID NO: 27247 - DNA, 234 bp, Glycine max
  unsure (1)..(234): unsure at all n locations
  Clone ID: PAT_MRT3847_124605C.1
gagcgcggaaccctgcccccggccgccatggagatgaccgctgcggagcggctgttcttcttcgagatggcctgcaacaactccgaggtcgcgtatcagnggaaccccaacgacgccgacaacttgacgcgatggggcggacgctgctggagctatcgccactgcgtaacggccccgacagcctcaagctcctccaagatgcggaagccaagctggaggaggcactgcaaattg

SEQ ID NO: 27248 - DNA, 272 bp, Glycine max
  Clone ID: PAT_MRT3847_124606C.1
atgctaagaaggagaatgacatgattggttagagggggcatcgaacagacagacctgcttgaagtactccaaggggatgttccaaagccggtttatcttacgtaaggcataatatgcctaatcggcgcataatgctttttaaaaaactttttgctggctggaaaataaaacctaaaagggtgtgctgcaggaaacttcccttcaaaaagccccccctaattttttaatcaaaagggccgggggagggtgataatccttccatcggttttttc

SEQ ID NO: 27249 - DNA, 427 bp, Glycine max
  Clone ID: PAT_MRT3847_124607C.1
cagatcctatttataacttgaacagaaaaccggactgctacaagctaataataccagagcaaacgccctcctgcggacaaattggaggcaccccacaaaaaggtcatcagacccaggtatcccagaaggggggggggacaggaccccgcaaaaccaggaagagacccgcgagggggatccctcatggcccccgcttaaatatacccgatgaatgaatgctgccgatctatggacccatctatacaggggagcgaacgagaaacagcccctcaaagggagacaccggggccgaaacaatacgggctgatttttaaacaagggccgcaccacttctgggaggggaacaagcaccttgaagcggatcaaaacccggtctcatggttgcgccaaagctttggaggaaaacaggacccccatggtgcatcca

SEQ ID NO: 27250 - DNA, 581 bp, Glycine max
  Clone ID: PAT_MRT3847_124608C.1
tcggttgcggcagctgcagctgcagctgctgctgttgttgcatcttctatggtagttgctgtaacgaagtcaaatgctgactcgaatcttgagattcctgtagcagcagctgctactgctactgctgcagctgttgtagcaaccactgctgctgtaagtaagcagtacgagcagggcagtcggagtgatggtgatgcagagggtgctggttgtgaatcgaagggtagtggtgatggagagcataatgctttaggagaaaactcagaaggcgagagaaaatctgatagatcagtaagtaatgacagcacaaaatctgattcagcgctagatgatgttgctgagtatgatattccatgggaggaaattgcagtgggagagcgtattggacttggtattaactgtatattgttctatgtttattgttactcatacatctttctatttgacagtgctactgtgtataggagcacttttttttttttgtctggtgttccatagaaaaactcaattgcaactgtgtggctggtatttggcatgcaggatcatatgggggaagtttaccgtggtgaatggcatggaac

SEQ ID NO: 27251 - DNA, 192 bp, Glycine max
  Clone ID: PAT_MRT3847_124609C.1
ctgatttctctcccactggagcaaggaagaatgctgctccgtcacttgcagagctgtctgccatggattttactaccatcccacacccatctctcatcaatcaccaacaattccaggaggcatatgccctgccacttcagctggatcatatcttcagcattacgcacgcgttgtcttagagtgcacggtgaa

SEQ ID NO: 27252 - DNA, 515 bp, Glycine max
  unsure (1)..(515): unsure at all n locations
  Clone ID: PAT_MRT3847_12460C.1
gctgaagcaagtttaacatgcaatcagactacattaagtttagcttcttcacctctcagtttttacttttaggacccatttgttggtgcttatttttttaaaagcgtttttttaataaaataactagttttatgctttttcaatgtatttatctaaactgtttttctttttattttaaaaaaacagttttatgcttctttaagaagcaaatcctatctgtttattaaaaaattacttttttaaaaagaaatttttttaaataactttttttaagtttgaacaaactggcccttaatcttcaggtgaaaattggtaatattttttatacttacatagattatacagcgcactctactgtttttgcccccattaaataatgtttagtataaataaacaaataaatattaaataaatacatatgaagcatctaacagtttatgaatgtcgttacaactgttttatatctttgcaggttgggataataccttggctgatagtgtctaccanggttagca

SEQ ID NO: 27253 - DNA, 510 bp, Glycine max
  unsure (1)..(510): unsure at all n locations
  Clone ID: PAT_MRT3847_124610C.1
nnnnnnnntntntnnntttttggctataaaatgttaggacttaagcacaagaggagagcctaacccaaaagattagctcattaggtgggagagcctcatggcttaattaccaaatcaagtcttttattctacttaatttaggtaggactcttaacattgtcaccacctttaaaaaccaacatccacaggggctttcactccatagacattgacctgaaggcagccttttgtcctttgactgcttcactcacctatcagtatccaatttactccttaatccaacctataggcagccttttctgaatctacacactcaagaacacaaattgttaggacttaagcacaagaggagagtccaacccgaaagaatagttcattaggtggaagagcctcatggcttaagtaccacatcaagtcttttattctactcaatgtgggactcctaacataaaacattaataatgctatacgggaagcatttacacccattaatcacagcaggtacagaca

SEQ ID NO: 27254 - DNA, 478 bp, Glycine max
  unsure (1)..(478): unsure at all n locations
  Clone ID: PAT_MRT3847_124611C.1
ggataacgcggcagctacccccactcactaccaccagcgacgcctccgatactcttctcttttatcaattcggatatgtcttctgatagtgcaaaggaaaatgcatcagtagttgattcatcagtcactgaatggaggaatgacattggaaattcagatgatccagtgtgtccagatgatcatgacttcagcaatgatagtggagcaaggaatagggtgttgatcacatactcaaaaacatttcatagatgcatgtacatctctattaacataaatatatgcatgttacaagtttaaagaaaacattaatccaactagggcagataaagggggacattctcatggtcagatagggcatccagcaggaattggagtggaaaaatgtcacaatacaaaatactttgtcatcaagagtttgaaccatcaaaacatccatttgtcgattgagaaaggaatntgggctactcanatcatgaat

SEQ ID NO: 27255 - DNA, 424 bp, Glycine max
  Clone ID: PAT_MRT3847_124612C.1
attccaaatctcttcctctttagtctttataccgaaatggaatgcgttgaatcacgattcattaccttctcgactgttgctaggttatgttaactgttaccttttattcttcgtttacttcacactgcgcgttacttcatcaccaatcgtgccacacttagaactccggggtcaattcggatatgtcttctgatagtgcaaaggaaaatgcatcagtagttgattcatcagtcactgaagggaggaatgacattggaaattcagatgatccaggttttgataatatttctcttgtcacatgcatatcatgtgaattaaggagcttaaattgtgggggcaagaaatggaattagaaaagttataaaggcagaattacagaacatttcatataaaataaagttgttggaaaattaaagtaaagtca

SEQ ID NO: 27256 - DNA, 435 bp, Glycine max
  Clone ID: PAT_MRT3847_124613C.1
tggtcgcgtgggcggacgcgcgggtttagcgagagatatggataacgcgggagctacccccactcactaccaccagcgacgcctccgatactctgctcttttatcaattcggatatgtcttctgatcgtgctacggaaaatgcatcagtagttgattcatcagtcactgaatggaggaatgacattggaaattcagatgatccagagagctcaggttacaagttgaaagaaaacattcatccaactagggcagataaagggggacattctcatggtcagatagggcatccagcacgaattggagtggacaaatgtgacaatacaaaatactttgtcatcaagagtttgaaccatcaaaacatccatctgtcgattgagaaaggaatttgggcctctcaaatcatgaatgaaccgcttctacaagaagctttatat

SEQ ID NO: 27257 - DNA, 1901 bp, Glycine max
  Clone ID: PAT_MRT3847_124614C.1
acgagagtacacctccggagggcagtaatgacaggattccaaatctcttcctctttagtctttctaccgaaatggaatgcgttgaatcacgattcattaccctctcgtctgttgctaggttatgttaactgttaccttttattcttcgtttacttcacactgcgcgttacttcatcaccaatcgtgccacacttagaactccggggtcaattcggatatgtcttctgatagtgcaaaggaaaatgcatcagtagttgattcatcagtcactgaagggaggaatgacattggaaattcagatgatccagagagctcaggttacaagtttaatgaaaacattaatacaactagggcagataaagggggacattctcatggtcagatagggcatcctacaggaattggagtggaaaaatggcacaatataaaatactttatcattaagagtttgaaccatcaaaacatccatttgtcaattgagaaaggaatttgggctactcaaatcatgaatgaaccgattctagaagaagcttttcataattcaggcagtgtaatccttatatttagtgtcaacatgagtggttccttccaagggtatgcacaaatgatgtcctccattggaagggggagagacaatgtttggagtgagggaactggtaaaagtaatccttggggtcgcaatttttaaggtcaaaatggatgtgtttgaatgatttgcctttccacaagacactgcatctcaagaatcggttgaatgactaggcgcctgtcaaatttagcagagattgccaggagttatctccagacatgggtctagctctttgtgaacttcttgatggtaagaattatacagattgcctgccgaccaggcaggcgttgtcgccggacattggtctggctcctgccgcacttcgttgatggtaggaatatacagattgcctgccgaccagtttatcaagggatgaattttctttgaaagggctttatgcgaatactccaagttcaatgggagatgaagactgtaactttcctccactgcatacatcgtggtcaatgcccttgccttattctgccttgttttaccaaaatcaaccagaagtaaataactatcattcaacaaaccagagaatcagtgggacaatgttcactgaaatattgccaaccacttctgagtcatcacaagtgtcagggattaaacgttctaaggatgtggcttctcaatctgatttttggggtctatcttctgaaagccctttagctagtaccctaactgaggatgattttcttgacatgtcctatgaagaatacctggaggtccatagcagatgcaagaaacagttacgcaccagtgcaactaaaccatcttggaaacaactggaattgttgagaagtaattcccatgatgatgataggaatacagaagatggggttgatagagacaggagcaactctcatgggaggatacatcagtcatctttgccatggatataactgctcctccaatatgtgaacatgttaacttttcgtcagctaaactttgcacttgccttgtggtgtcatcatctgcaaggaggcccttttcctgttttcgtatagcaaagacgaagtggaagttaattgtaattgtctaaaatcagtacttgatattgaacctcatattaatgcgattcaattgcagttaatttgaggcttgtttaccaattgtacaaaatttagatttagattggggttagattgaccaaaacatacttgtggtgtgtatataatatgccccctatccctatgctaaactagcatttttcccctctggaaaattgtcggcaaagatgctgatattggtaatgagagtaagaatttcaaatgtcttcaattttattaatgttttaagattgttggggcct

SEQ ID NO: 27258 - DNA, 352 bp, Glycine max
  Clone ID: PAT_MRT3847_124615C.1
ttccctctgtatgccctgcgtccttgttattgtggccccctcattccgaggtggaggcccttctatgctctgcgccggtgcttttatgactgccacgttccgttctgcactcgttttcttacccggcctggctccggcccatttatctgatactcgtccccgcacctcattctctactggtcctccatacgacccctcttccagcgtgctccctctgtcctctcactcttctggctctccgactcgccattctgccccccctgacttctgtcctcctcacgcgtgggtgacttcctcccaggccctggcctcctctcgcgacggagcctcctccctcagtgggtgcgtctct

SEQ ID NO: 27259 - DNA, 294 bp, Glycine max
  Clone ID: PAT_MRT3847_124616C.1
tctttattaaattttttaattctttattatttttcaatggttttgcagatttttaaacccacaccatcacgggagaccagcgctttattttacccctgataaaaaccccccccagataacaaaagccgggggtcttttaaaagtcaaaaaaagggggcttatggggactcaaaaaggggggcccaccaaacgcgggggggggggtgattacacccgtcctaatgaccccccaaacagaacaggggggggggctcatgaaaaaaatttttcttccaaaaaaaaaaaaattccttt

SEQ ID NO: 27260 - DNA, 312 bp, Glycine max
  Clone ID: PAT_MRT3847_124617C.1
agattcccaacctgtcatatatatatatggatatatacccaatcaagctattaatacaatctaggtcccaaaaaagagattgaattctatatctcgtaactcatcacacactaggggaaaccccaaatagggacgaatcctaagtaaaaaaaacataaataagaccacaatcacaacccacaacaatggccctctctgctctacgagtgtactatatgatatatgataatgataatatacctccaatatgagcaacaacaaattaatgtggcatgttaactcctacaatcatatgctgagagctccacaact

SEQ ID NO: 27261 - DNA, 178 bp, Glycine max
  Clone ID: PAT_MRT3847_124618C.1
ggaagaacatctcactccattggttgtaacccatctccttccacacactctccaaagtttgtgcatccatgacaattcctcatgggtctccgctgtattctggaggatcttgcctacaaactaccctactcccgagtggaaaagaccaagggcttctgatagatcaagtggaaacaga

SEQ ID NO: 27262 - DNA, 398 bp, Glycine max
  Clone ID: PAT_MRT3847_124619C.1
ggcacgaggtaccatgttgacaattgcggcgtgtgcaaaaaagctgttataatggttaatgattgtgatgtctggaaatgcagcaatcaaagtgagtgattgcgccacactggtacaagtcattttaacatgcagcaacagtacagagcattttgatgcatgtaaatggacacaatcggtcccagattcctgggaattgatcgtcccacatagagggacgtggtcccaataatggttttgaaacgtggagttctgagtgggcagatcaaacttcatggcatttgagtttccttagtgacaatcccagacagtcgacagtttttgatatgctcatgggaatttctcaggattttgaaattgctggtaatactcttatgcgagctttttctgttccacaa

SEQ ID NO: 27263 - DNA, 496 bp, Glycine max
  unsure (1)..(496): unsure at all n locations
  Clone ID: PAT_MRT3847_12461C.1
tacggctgcgagaagacgacagaagggtacggctgcgagaagacgacagaagggtacattaccttaccttttgatacacttcttattgccaatcaatatgaggtaggggaagttgccttgactgcattggaggcatagcnttcntatgtctttttctatttatgaagtttataatatggttctcatatgaacctagtttctctatttatgaagattataatatggttctcatatgaacctagtttctccatgaaattgggtgagatgttgctcttagaaacctgaaggaatgctataatacgttccagcattttaaatacattcatcttttcaagttgatctaactttggttgtgttggaagggaattgtgctgataaaggaaagatacagggttaaacatagtaaaaataatttacgaggaaaaaacatcaataaaggactccctttgaggaaaggtgatgacctgatatagggcttagaacatgctacaatctc

SEQ ID NO: 27264 - DNA, 825 bp, Glycine max
  Clone ID: PAT_MRT3847_124620C.1
aatataattcactctaattatatataagaatttcttccaaatagttgttgaaagacataaagccatctgatatttcttcaaaatagttagagagaaagaaagccaactggatgcttgatcctttgaggaaaacagaatgagtagttttaagagcatccaaaatgataaactctaacatcttggcattcattttatacgaaataccaaatactagttgccatgatagcctttatttgttttcagctttctcttcaaatgttgtggcggcttatgctactttacataatttttcaccaaacattgacgtcaactagcaagatttgttgtcactagtcaagcacaaaatggtcacattatagaaggcaacaaatacctcagaactgcttagttttcaacaagccaagcttagcaaaagtaattgtgattggagcataggtatatttataaatcttatgttgaattgcatacaagaaaacagacggaatttgattcttgtgattaaccctgcttcccaagaacacagccgtaaatccaggtgagcagtttattttcttcacaatgacatcggcaaaacaacgatgttaattggagggagaggcttgctcgataagcttcttgtcccttcgctccatcgccacatcccacatatcgtttccgatgtgcttaggtctgccatgtgcagctctgtgaatgtaatactgagcgtttcccatgacgcagagcattccagctatgattcccagcggcaacaccgcttccatccatctcaagttcatctttttttcttcttcttcttcttcttcttccaactctttaccccggaca

SEQ ID NO: 27265 - DNA, 262 bp, Glycine max
  Clone ID: PAT_MRT3847_124621C.1
aatgggaaggggctgcacggcttttcgtaaggctaaatcgtctaacgagggttaccatcggcccgtgcctcatgggggccatagtcaagaaaaggatgaaacccaaactccagatgcatggcaccagacttgtaacagctaccatctcccaaatgatactttcgaccatcacttgatttgttgtgtctaaacattagctggtctagataccaatacaaacgttcaggtcgatactctattcatttatctccaagttgataaa

SEQ ID NO: 27266 - DNA, 413 bp, Glycine max
  Clone ID: PAT_MRT3847_124622C.1
caacaataacacacactttgcacatcattactacaaaaacaaaacgtgtgtgaatattcaaatcaactgagcattcatcaacaggagggacatgtctaaattcctatattgaattaaacatacgaacaaacgaaagacagcacacatgctatatcaagcatgggattcacttattatcaaaagatctcggagatgacctgcggaacatgaaaagttggcataggaatttatccagcatgttcaaaagcttgtcaatttacccagagaatatcaaaaactgcttactgactgggaatgccactaatgaaactcatgtgccaagaagcaagatttgcccactcatagactcccagtgccaacaccttcattaagaccacttgcctttattgggaagatcaatacccaggaacgtg

SEQ ID NO: 27267 - DNA, 405 bp, Glycine max
  Clone ID: PAT_MRT3847_124623C.1
caaaacaaaatggcataacataaactttccaggtaacataatcataacattggaggggggttataactcgaaaacagccaacattgccttttttttaggtttcccccacaaaaccccaattttttggagcatgtggccttttttttggggcggaaaattattatcataaagcttttaacaaaagggggagtccttgtccattataaagtaatagggggggcccaaaaacatggatctctcactaagttccccattggcccctgctgaaagcattgcaaaagctgcctttgaagcctttttccatggaacaaacggtttcttcaacctttttagttcaccttttattattgaattggctgctggagatgctcccaggtggtgggcccccctcgccgcctttggggg

SEQ ID NO: 27268 - DNA, 504 bp, Glycine max
  Clone ID: PAT_MRT3847_124624C.1
tatcattatttttttgtttttgcagagaataaggggctaccgaattccggcatgacagggtgtgctaaaaactcaacataggtgtatgcagaacaacatttaatactagggcctgatcaaaacttggaaggactaaagcttaagccggtttacagggaagaaataatgccttataaaccaatgataggcgctagtggaatgcgaaattgggctccttcattagcggcatcagattcagtgggttcgggctcagtctttttacccaattgaaactcatagtgggaagggggcggactgctccccgaaaattaaaaagcaccccactggcgcttggaccgtgaaaaagtccccaaccctcgcctaaatttttgtcttgggcccttaaatctggccactagcagggaaagatggggcaaccccccaattagacggaacaacgtgttggaaaaccctaggtacaccattggtgtttgtgaccgtgggagacaaacattgaccattcaa

SEQ ID NO: 27269 - DNA, 459 bp, Glycine max
  Clone ID: PAT_MRT3847_124625C.1
gtagcaacagtaggtatactaatacattagtgcactccgtcacctaacatcttaaaaattgatgcatgtcacacaacacaacacaatacataataataacataattacttacataaatcacccccaaaccctctctcactaacactattgtccgttttggctgttgcaattttcaacattgcagccaccctctatatacgtaatgttcccaaccttgtcactattttcactataagttacaaggccattgtacattttctgtgatgctttggagaactctgtcaatgattcaaacactagagaaaacccagactgcaatccatgtaaggtgatcctctgtgtttcttgcatgctactgtggtgcttctccttctccacctccagttttcttctcagtgtctgcaaatgatcactcttgtgcatcatgcactcctcctcctgttgatcattggccacctg

SEQ ID NO: 27270 - DNA, 499 bp, Glycine max
  Clone ID: PAT_MRT3847_124626C.1
caaaatgatgacatacaggatatgaagtggatacccatagaccggtatgccctttacttttcatccacagtatctgactgtttttgttgtttcaacatgatgaataaattgttatggagttttggaaatgaacagaaatgattgtcctccttgaattttttcatttatatttccaagaaaggacaatgtttgggggtttaagagatctttgtgcagttcgattatcagcttgagctgttatgtgaattccaacccttcatttcttgatgatggaccattccaagtcaattaagggaatttggattcggttaaagatggaccatgctaagttgctatattttatggccagatggtttagtggggatatacctttattggtctcttgacacttacacccactgataggcatagctttcacttgtatgatttatttgcatgtgcatgtgccatgttcttgagccttagtctgtctggacccagtcataaaacaaacagaaga

SEQ ID NO: 27271 - DNA, 461 bp, Glycine max
  Clone ID: PAT_MRT3847_124627C.1
ctttgatgttgtcaaagacagggttgattgcagaccccatatccgtgctgtcgagcccacagaatggaaggcgggctcctctcgtcaatgcctattctcgcacggccgatattctggctccgtgatatgggggttacaacacttattggtcattttctgttactggacacatatgcttgcctctggacttaactaaaccacctatagctaccagaattttgtttggcgctattgatgcacgtttactgagaagaaccagctgattggcaagatgtgcactgttgatcaactgcctgagaaccgcatagcatttgttcgacacttaaaggattgcttaccaactctggtaagtgtacttattactcctcctgaacttagtcgagcatagtgccctggcttactctagagccgaacatgttgataacgctaccatactacctgaaagatcaaatgaaccgact

SEQ ID NO: 27272 - DNA, 293 bp, Glycine max
  unsure (1)..(293): unsure at all n locations
  Clone ID: PAT_MRT3847_124628C.1
aggattatgtgtttttcacttcttgtttttttttatacagtctgagaataactatttcaaccactggttatatgtcctttgaagcatgacactgtcatatcagcctcaaaacaagagctctttttggttgaaagccgagcttcccacagggcacgtncattattcagaggcatgtatagttctctaaacacgctctctggttgcgtgatttagacctgcaactgcaagggaagcactgcttgcctgggttgtcttggtcggtctttccctgcggcggggttccttggcggggg

SEQ ID NO: 27273 - DNA, 255 bp, Glycine max
  Clone ID: PAT_MRT3847_124629C.1
actttccaacttactttcaacaataccatccaagtatcacttctatacaaaagcttattcaattcactattcaatcttataacctatcctcattttttttccaatcactatttaatctacaacattcttcaaaaccaataatatcatctctatctaattcaaacacccttcttttctaaactcaaaacttacatttctattctaactcttaacaccaattaccccaaaaagcattttactctctattttctaaac

SEQ ID NO: 27274 - DNA, 670 bp, Glycine max
  Clone ID: PAT_MRT3847_12462C.1
tcgacccagcgtccgcccacgcttccgtacggctgcgagaagacgacagaaggggatagtggcagctaccatggtgaacaatctgtggtgataatagacatagatagattgaggcataaaacattggtacgcgacagatagggtgactcacgttggtgttggttgtaagcacatcactagcatacacactatttcctttccacacaagctgtgttattgttatctatctatcaatcacaagaacaaacagcattagcaatggcgaccacagcggcgttgtgtggcactatgttgaacacctccttcctgaggaggcaggcttcagtgaacatcacaagcctcaaggctaacgctaacactgtgtttggtgtaaagggaggacgtggaggcgtgtgactgccatggcaagttacaaggtgaagctgataaccccagagggagagcaagaatttgaatgcccagatgatgtatgcattcttgaccaggcagaggagaaaggccttgagcttccctactcatgcagggctggttcttgttctgtctgtgctggcaaagtggaacagtcagatggtaacttccttgatgatgatcaaattgttgcaggatttgttctcacccgtgttgcttaccctacctcagacgttgtcgttgagactcactgggaggagga

SEQ ID NO: 27275 - DNA, 314 bp, Glycine max
  unsure (1)..(314): unsure at all n locations
  Clone ID: PAT_MRT3847_124630C.1
aaggaccaccttgcaaggctaaatactcttttgtgtcttatagtgaagtantaccgagaggggttggctagcattcctcaaacaaacaaaccctaaggctaaagactaactctttctgtggtcgttaccgaattcaaagtcgagctcctcgccctcgtaatcatctagcagggccatgttcctgtcgggcttgtcactgagagataagaacgatgagtcgtttccttgatcatcaccgttcaaatactaatcttctgcttcttccaattcaagctccaatttctctttgctttcccataactggttctgtttgt

SEQ ID NO: 27276 - DNA, 654 bp, Glycine max
  Clone ID: PAT_MRT3847_124631C.1
ggttgtataaaatattcctagctgtcaatcttaaatgttatgtagtttgaatggttcttgtgacataaatatgatctattttttcttctagcagttccacgggtacaataacactaattacaacatcatgctaataattacaatgatattcgaccatactcgggcctgttaatataaactagggcagtgcacgatgaacaagcaagattagaaaaacaggctaaaagcatgctgtccattcctgttacactggagagccaactcaattaatcatgccaagcatcaaatgtgagtatcctcagctttgttaattacatactgcctcagccggtgctgggatgatagattcccttggcctgctcctgtatgatgctccttgcttcgacaagttgagcttcaagctcaagttccctctcagtagcctcagaagtaacttctgcttccttttgagcatcttgcaattgaaccatgcgctcctttatagaagccattttgttacgaagactttcttctatttgatctctggccatgtgaaaaggaaggtcaaatacgtccattttcccaaccaatggagattgtgaaggatcactttcaactctttcattgccagtgagagattgctttggtagtccattaggagcatttaagaaatca

SEQ ID NO: 27277 - DNA, 1567 bp, Glycine max
  Clone ID: PAT_MRT3847_124632C.1
tcttccgcttgaatatctcaaagtttagatctaagaacgaacactattactaattcggctcgcacgcagagcccagaaaagaagctctttctctctaacaacaatgcctcccactgacggagacttggatcttaggccaccttctcaatcttccttcacagccggcgactacacgttcgccgatgcggacaatttggagcattgcgctaagtatctcaaccaatcgctcgtcacgtttggtttcccggcttcgctcgatctcttcgcaaatgaccccgtttcaattgcgaggacttgcaattgcatttacgtcttgctgcagcagagacagcgcgacgtggagtttagagagtctgctaatgatcaaagacaacgactgttgtctgacatttcgagattggaggccaaagtggagaggcttgaaggtcaactacaagtcaaagacagggagatagcgactattactagaacggaagctaaaaacactgcagctctgaaggcccaaattgagaagctgcaacaggagagggatgaattccagagaatggttattggtaatcagcaagtaaagactcaacaaatgcatgagatgaagaagaaggaaaaagaatacataaagttgcaggagaggctaaaccaagtgttgatggagaagaagaaagagtctaggtcaggcatggagataatgaatttgcttcagaaggaagggaggcaacgtggaacatggaatgggaagaaagctgacaatgatttttataaaaagattgtggatgcttatgagtcaaaaaatcaagaactgatggcagagaatgctgatttaagagcattattgagatcaatgcaggtggatatgcgtgatttcttaaatgctcctaatggactaccaaagcaatctttcactggcaatgaaagagttgaaagtgatccttcacaatctccattggttgggaaaatggatgtatttgaccttccttttcacatggccagagatcaaatagaagaaagtcttcgcaacaaaatggcttctataaaggagcgtatggttcaattgcaagatgctcaaaaagaagcagaagttacttcagaggctactgagagggaacttgagcttgaagctcaacttgtcgaagcaaggagcatcatacaggagcaggcatcaataatgtctaaacatcttgcaaaatctgacaggccaagggaatctatcatcccagcaccggctgaggcagtatgcaattaacaaagctgaggatactcacatttgatgcctggcatgattaattgagttggctctgcagtgtaacaggaacggacagcatgcttttagcctgtgtttctaatcttgcttgttcatcttgcactgccctagtttatgataagaggcccgagtatggtcgaatatcattgtaattattagcatggtgttgtaattagtgttattgtacccttggaactgctagaagaaaaaatagatcatatttatgtcacaagaaccattcaaactacatactaacatttaagattgacagctagaaatattttataatatcactttgggctcttcctt

SEQ ID NO: 27278 - DNA, 176 bp, Glycine max
  unsure (1)..(176): unsure at all n locations
  Clone ID: PAT_MRT3847_124633C.1
gccagctcngntattcagcaancagcattcgcaggtcanactagncngaagcagntccaatganttngttcnggaagtccggtngacagcggcnaaggtcgcaccannattgcgcgntaccgtcaagagtggtcctccagannatttggtatggcccctgagcnnctnagagtnct

SEQ ID NO: 27279 - DNA, 418 bp, Glycine max
  Clone ID: PAT_MRT3847_124634C.1
tctgagttccgtgccactctattgatccaggcgctcgggtagatctgacatcgattctcataccaacttccgaattcataatcactctcacattattctcctatcattttctccttcatctccatcaggtgaaagttcagtgaccatcaaaagccacatggacggaagcaactatatcatcggacgcaatgccgtctaactcgacgttagcatcgactccagtgtatgcaccaaccaggatttctgcaaggttattacaccttctagagttgaagttattgaaaatgatgagattctggttttggagttcccaaaagaattacctattggattaagggtctaggacattcggttagtaagaatctcgaatgatagaatgaattgcttatacccgagtacctgatagcacaatggtgag

SEQ ID NO: 27280 - DNA, 338 bp, Glycine max
  Clone ID: PAT_MRT3847_124635C.1
atgagataaactgtatcaattatgagccagatgaattgagcatgttgcctgaacgaggagctgaaagtgcatcaatgagttatgaccctgctttagactatgaaatgcaggcccaggctggtggtactttacaaaataagaacaaagaggtattgactgacaccaaaccaggatctaaggggttggataaggaggcaaaatcaaaacttaccccaaataattctgataaaagaaagactggtgggccgataaggagagggaagacttctaaacctaatgctttggatgaagcacgagcacgtgctgagagcttacggaactacaaagcggatctccag

SEQ ID NO: 27281 - DNA, 349 bp, Glycine max
  Clone ID: PAT_MRT3847_124636C.1
gatgagtaagtgtctcctactttgcagtatataggtcttctaaagtttgctgacatttttgttcttgccctgtttgcatcatttataatttgggatttaataatatgtagtacgtagaatattcaatacataaaatatttacttagaatcataaccaacctataatttctaataatttgagggccttgctttttctctgaaatgtagtcatggggttcttgttacaatttgcttatatagtactatattcttttgtaaagttgattctttagatctctgaactggactgaataatcaaacattttgctaagaatttttaagttaaaaccataaaagattcatactattc

SEQ ID NO: 27282 - DNA, 495 bp, Glycine max
  Clone ID: PAT_MRT3847_124637C.1
aaaaggtaaaacctgccccaaaccccaaaaaaaacaaacaaaaaaacccccccccaaacccacgggggggaaaggcaggaccggccccaaaaaaaaagggggaacaaaaaatggggggggggcccccagggggaaacaaagggaaaaacaaattttggttttaaaaaaaaaaaaaaaaaaacttcccccccaaaggggggggggggccaaaaaattccaaaaaaaaggaaagggccttttaacaaaacaaccctaggaaaaggggtccccccggaacaaaacaaagggccccggtttggggagggttggaattggcccccggggggacggcaaaccccagaagaacacccccccccccccaccaaaaaaaaaaaagggggccccccgggtggagggaacccaaaattcccccccccccccggggggggggggggaaaacggggcattgggcaacgcccctggcaaaaggcccaaaaaaaaaaacaaagggggggg

SEQ ID NO: 27283 - DNA, 290 bp, Glycine max
  unsure (1)..(290): unsure at all n locations
  Clone ID: PAT_MRT3847_124638C.1
aaatttaaatttctcatattcacgtaaaattttttttttttgcgggaaattgcattttttcttgattttacacggggcccatttactcgggcccatgcgttcacatacgcacatgaactgctttaaaaattcatatccggaggagggttggttctgactctcatttgaaagaatctcaaccatcgtgctgttgttgctcaatttttgagggggaaaatnctggtggagcctttgaatgatattttccccccgcatttaagaatagaatgccattttactgggcaaaaaca

SEQ ID NO: 27284 - DNA, 515 bp, Glycine max
  Clone ID: PAT_MRT3847_124639C.1
tgacccacgcgtccgctaaagtctcattttttttcgacaattacttatgcaggaaataagaaatctgtatcacgagtagtcttgattgttgtccctgttgttgtatcgataattctcttgttatgtgtctgctatttcatattgaaaagatcaaggaagaaatacaacactcttctaagggaaaattttggggaagaaagtgccactttagagtcgttacaatttggtttggtcacaattgaagctgccacaaacaagttttcctatgaaaagagaataggtgaaggtggatttggagtggtttataagggtgttctccctgatggacgagaaatagctgttaagaaactctcaaaaagttcgggacaaggtgcaaatgaattcaagaatgaaattctattgatagccaaacttcaacatagaaatctggtgacattattaggattttgtttggaagaacacgagaaaatgcttatttatgaatttgtgtccaataaaagtcttgactactttct

SEQ ID NO: 27285 - DNA, 373 bp, Glycine max
  Clone ID: PAT_MRT3847_12463C.1
ggggaaaaaaactaaaggggtttccttttttcaaaaaggcaaaatttccccccattccaattataagcctaactcccactgccctgcccctgaggctggctaatggccccattttttgtaacccttacaatcacaacttggcaaggccaaaaaaggaagccccgggtttcccaattatcacccggggcgttcggggccccaaaacccacttgggctgggcattttttctccattgcctcttttctcttttaatgctttatcctcctcgatttgtccgtagccagtggctttaaaaaaatccaacccctttaaaaagaaccccgcttattttatttttactatccttcgggtaaggcaggcccttttctttcac

SEQ ID NO: 27286 - DNA, 183 bp, Glycine max
  Clone ID: PAT_MRT3847_124640C.1
aaggcacctaggtatcgtaaggacgacattggctgcaactcaaagataacaaagcacatggctctgagcactttagttctctagacccattaactatagacaaaacactatctcatttgccagtaccaggcaccactgcgccaccaccaagtgctaacgcagagccatgtcaacaatgttctg

SEQ ID NO: 27287 - DNA, 1565 bp, Glycine max
  Clone ID: PAT_MRT3847_124641C.1
gatgttaccgtgtcttaatgaacatgttgtcaaatcgagttcttttgtgctatttctccgcctgcgagcattatctcctttctgtctccttttttcttttctcactctcttcttttcatatttatatgtataactctttctgtctctcttcaattctcttcttcttcttccattccttccttcattcctctctcaaattccccattctaaaaccgtcgcctcgtgaacgagtttccactcacaacccccaacaaagagaacaacaacaaccctatactctctcgacctcgtattctcctccgtgtctccctcctcattttttttcttttccgttcacgaaatcgatggattttctggtgggtcccactttcaccatcgacgtcgcctcctccccgcctccgtacgacgccgacctccccggtgtcgccaccgccgccgaccgaccgtacggactcttctccggccactcctccgacagcgagtcctcgatcggaacccctgacgacagcgatgacgacgaaaacgatgtcgtttcgtccaaaagaaaccaaagcgacgaagatgaagacaaagaagaagaagaagaagaagaagttcactccaagttgaagggtttggcctctcttgattccttagaagactctctccccatcaagaggggtttatcgaaccacttcatgggaaaatcgaagtcattcacggatctatcacaagtgaacacactcaacacagtgaaggaacttcaaaagcaagagaaccctttcaacaagagaagaagggttcaaatagccacgaagttgacaagaaaatcttctttttacgcttggtccaacccaaaatcgatgccccttttgcctgttcatgaagatgaagacaattttttggaagaggaagagaagcccaaaaaagtgtcaccatcttcttcttcttcttattcatcagaagaaaataaacaagatcatgttttggttcctaagtcttatgttgatcacatgagagcaagatttgggagcttcaagtctaggagcctctcggatctgaaagaacatgatgaggaacaagaacaagaagatgatgatgatgatgcgtgatgttttggattatttaataatgtggtttcggtgtaaataaactaaatattatagtgcccatttttaatttagctagcttaatggattttgtataaaggaaaaaaaaaaactattttggtgctgcttacacagataattgatctcaacttggattggcctctcttgattccttagaagactctctccccatcaagttagtccttcaatttcaaccccttcatttttctcaatttttttcgttaatttttactttccattttaattctctctatttttcaattagacaaatttgtgtataattttaagtccttatatcaatgtttatccaccagaattgaaggttaatttatataatctttttaatactaatttttattacatgcaagattatcaaaagcaaaacattgtatccaagttttttttatcattaattttactttaaaggtctcatatactcaaagtggtaccatactt

SEQ ID NO: 27288 - DNA, 651 bp, Glycine max
  Clone ID: PAT_MRT3847_124642C.1
accgtgttcctatacatgtttgtaatagggatgtggaaatggaggttccgcccgagataccctcctcacatggatgctagtctctcttgtgcatatgtaaccagccctgaggactttgatgaggaaatggacacttttccaaccacaaagagctttgatatcgttcgttggaggtatgataggttgagaagtctggcagggaaggttcagagtgttgttggacagatagcaactcaaggagaaagaatccatgctcttataaattggagggatccacgtgccacttcgatattcatggtgttttgccttgtgactgctatagttttgtatgttacaccaccaaagatgttgtttattctatctggattttacctaatgaggcaccctatgcttcggggcaagacaccaggagcaccggtcaatttcttccgtaggttgccttctctcacagatagcatgctgtaaaatgtatatattgaaccttgcttgttttggaagctttttgtgctgccaatacttgaatctggtttaagcctctttggcagtgcttgtacaagtcttttgttcctttagtcatgattgttgatacacaagtgtacacatgcttttgaaaattcacaagtgtattttatttacattggtttttggttc

SEQ ID NO: 27289 - DNA, 1360 bp, Glycine max
  Clone ID: PAT_MRT3847_124643C.1
cgttctccctcttttctctcaccatcagaaagcgcttttttttttttttttttcttctacctccgtttctccgtctccacatttctccttcacgaactcccgatttttcttcctcttcaatctcgtccctctctgtctctccatccttaaatatacacaacatcttctaaggagaaaggggttccgaaagttacgataaaataaaaatggatccaaacgcggtgaagtccactctctccaatctggcgtttggaaacgtaatggcggcagctgcccgtgattatcagaaggaattgcatgctcaagagaagacacatgcatcaagttcagtacatcaggaggttgaccttgacgagttaatggatgatcctgagttggaaaaattgcatgcagataggattgcagctcttaagaaagaagcagagaaacgggaggaatggaagaagaaaggtcatggagaatttagggaagtaaccgagggtgatttcttaggcgaagtcactggaagtgaaaaagtgatttgtcacttctaccatagggagttctatagatgcaagataatggataagcatttaaagtctcttgcaccaatgcatattgatacgaagttcatcaagcttgatgcagagaatgcaccattctttgttacaaaactggctatcaagactttgccttgtgtcttgttgttcagacaaggagtagcagtagatagattggtaggatttcaagatgtgggaggtaaagatgattttaccacaagaacgctggaagctcttctgataaagaaaggtataattgaggagaagaaagctgaggatgatgaagatgatgaatatatagacagtacacgtagagtcgttagatcctccacaattgctggttctgattctgattctgaataaaattaatcagttggtggcattaaaagaaaaatctgctgtttatcttcatttccttttggattttgggcttgtataatctttgttgcacttttggtttgtttgcttttgggaagtggtttgaatccattgcaatcatacagaagctatgctgcgctacaactgttgtatcatgtgtgaacctgttgtccctgtaggaaattgctaacgtttctcacatccaagggtgtcaaaagttagaacttccaatttgtaacgtaagagattgatataaattatctggatttaagtattgttcattgtgagtgcattagaagccactaaaattgggccaggacttgaatggtactaaactgtgagtgcattagagaaagggagtatgcatgaaatcgtagtagcataccaaacttcattatcatattttttcattgttacatcaaaatatatgattatacaatttt

SEQ ID NO: 27290 - DNA, 370 bp, Glycine max
  Clone ID: PAT_MRT3847_124644C.1
caagggcatgtcattattatggtgcttgcgtctactatggtaggtcaacttgggttcaccttcactaaagctatcgcagattccaacgccctgagtgcgttttgagcattacacgtggtgggttctacgaggcaattaatctcaactgctgagggcatacgctctgaagatcacacctatcacgtgattcatccatgcaacggatattccttcattgccagcacttgatgccctagatacagtcatccccgttattgcttggctctaatgtgatcttgccaaatacacgaccgtagtgagcccactgctcatagggatcgacgtgggactgacccatggcttcctaatgatgggcccattcttgagggct

SEQ ID NO: 27291 - DNA, 1514 bp, Glycine max
  Clone ID: PAT_MRT3847_124645C.1
gggctgtgggatggactgtccgtcatccttgcctgcctgcttctctcaggccatgcgggtgcccatgcgtccctgcatctctggttacccctctgagtccttcttcttctgctcctcttgcatcatctgcctctgagaacagcattaaccagatgtctcaatgcattggacggtgaaattgctccggcagctcctgttcctataactgccctgggcaacacggcaggtgaaattgtacaaagagatggatgggtgactgttgtgcgtgaaaatcaggttttaaaggtggatatggataggatgagttctagagttggagaacttgaagaagagtttggtaaaataaagcaagaaatgaaaagtgcgacaaaatctcacagttcccgaagctcacctcggttggttgccaggaaaattgggtgtaagctggttccgcgaccgtcggacgcgccaccagcatcccccacccgcaccgctccctccccgcgtgcgcccatgcttcccgccctgcctgcccacccctccgggctctccttcaggtgctcttctgtgtccagctgcctgtgtgccccgctcttgctggctggctcactgcttgcggtggtgtgtgggctccggcagctcctgtgcctataactgcccggggcgacacagcaggtgaaattgtacaaagggatggatgggtgactgttgtgcgtgaaaaccaggttttgaaggtggatatggataggatgagttctagagttggagaacttgaagaagagttcagtaaaataaagcaagaaatgaaaagtgtgacaaaatctcacagttcacgaagctcgcctcggttggttgccaggaaaatcgggtgtaagcttgttccacgaccatcagatgctcaaccagaatccctcaaccgcaccggatccacaccaagagcatccattgaatgggcacggcgttcccataagtccaaacactcagaaagttttacttgagtatcaagaaaccagagctcccctttcttttattcatgtatacatatagcagtgttgtgtggttttaaattttttgtacgagggaaagggaaggaaaatgtttcttaatccattatgcctttttatttcaccagtttgcatatctgaacattttccatttctttccctcgtgtaaagtttgttgtacacttatgtaggcaatttcacatattgtcctgtttgtttggggaatagcttctgtatttattatccgtatagctttattcttaatttggagatattgacaatggaagatgttgttttagaccccatgtgtgaggaacattattgtcgtcgaagaaagaatcatataagttccccctagtgcagatgcaaagctgatgcacaaaggtcccagctaacaaacgaatgtaactgacaatgttgtgcttctagcatagcttctttcatagatgacaaaatatagtatagttgtgatacgagtgtaatttctttataaatgacaaaaacaaatattttatggtctttgtcatt

SEQ ID NO: 27292 - DNA, 120 bp, Glycine max
  Clone ID: PAT_MRT3847_124646C.1
caggacggtggcttagtggataattcaggtgatcgaaacataaatgggttaagctaatgtagacatttttgcctgaccaaatcagtgaaatatccaatatgtgcttgaagcaaaagctcc

SEQ ID NO: 27293 - DNA, 473 bp, Glycine max
  Clone ID: PAT_MRT3847_124647C.1
cggtcggtgtaggaccagtagattcagcttacaaggctatcaatctcatcgtgaaggaaactgtaaaagtacttgagtactcactaagtacagttacagaaggcactgatgcaattgcaactacacgtgttgtaattcgtagagagaataagcaatcaccaactcctgctttgaatggaaacgtaatttatccaacatttagtggaaccggagaaggggtggatgttgttacttcaagtgtagaggcttatcttactgcactaaacaaaatgctcgatttaaaggaatgatttatatttgatgaaagaattctagcacctaaatgttagaattaacacttcaagttatatattgttctagaatgttacctttgtcaagtctccatataatgtacgagaaatggacttaataatgtcttcttaaaatatgtgaatttcaaatatcaatttcatcttcaattttttggggtttta

SEQ ID NO: 27294 - DNA, 1261 bp, Glycine max
  Clone ID: PAT_MRT3847_124648C.1
cggacggctgcgagaagacgacagaaggggattgtgattggttgtagtgttatgttactgttactaaaggaaagaagaaaaagggaggaagtggatgacgagtgcacacgtgggagccatgtctagttctacatgcttcccttcacttcctcgacttcttcgaccttctttcaccaaaaccaaatcatcacctaagttcagcatgagcatgagcaaggatccggttcgtgagtggattctttctgatgggaaagctatggagataaccaaaattagccctgttggtgggggttgtatcaatcttgctagtcgctacgacaccgatgctggttcattctttgttaaaacaaacaggagtattggaccatccatgtttgaagctgaggctcttggtttaggagctatgtatgaaaccgggactatccgtgtacctaagccctataaggttggaccgctacctactggtggttctttcatcattatggaattcatacaatttggtgcatctagaggctatcagtctgatctagggaggaagcttgctgaaatgcataaagctggaaaatctagtaaaggctttggtttcgatgttgataacaccattggcagcactccacaagtaaacacctggtcatcagattgggttcaattttatggagagcatagattgggttaccagttgaagttggcattagaccagtatggtgacagaactatttatgacaaaggacagagactggtgaaaagcatgacacccttgtttgccaatgtagtgatagaaccatgcttactacacggagacctctggagtggaaacatcagttctgacaaaaatggagagcctgtcatattggaccctgcatgttattatggacacagtgaagcagaatttggaatgtcttggtgtgctggctttggaggatcattctataattcttattttgaggtgatgcctaagcaaccaggctttgaggagaggagagacctttatatgctgtatcactatttaaatcattacaatctctttggttctggataccgatcttccgccatgtctataatcgatgattatcttgcaattttaaaagcttaggattgcgtgctttatcgtcaagcttgtacatgcatgaggttcttttcctgtacattgaactacttatatttccctaatcagctcattcaatgaaatggaggtgttattgatacaaaagcacaagttatttagattcctcggcgggccgtgtagcgtccgctctccagg

SEQ ID NO: 27295 - DNA, 1477 bp, Glycine max
  Clone ID: PAT_MRT3847_124649C.1
ggctcgagcaacattattgttttgaaaattcatatattcgatctcattctgtgcccttttctctgtgtttaccaaaggccaagtctcttcccttagtaaaaaaatatccttctttcttcttctgaatatcaatcttgcattaatccatggcagccaaaacatccaccaacggcacccatcattctctacccgagtacattccaaaccgcattcctgacccacattatgtccgcatcctggacaccacgcttcgcgatggcgagcaagcccctggagctgccatgacgtccgatcagaagctccaaattgctcgccagctcgcaaagcttggtgtggatgtcatcgaagggggcttcccttcagcgtcacaggaagacttcaacgctgtcaagatgatagcgcaagaagttggcaacaactgtgacgctgatggttatgttcctgtcattgcggccctatgtaggtgcaatgagagggacataacgagagcctgggaggctctcaagtatgccaagaggccaaggcttatgcctttcatagcagtgagtccgattcacatggagtatcggctgcgagaagacgacagaagggcaggctggattgttaaagcatagaggtacatatgaaatattgtctcccgaagatattggccatgaaaagtccaatggagttaatatggtactagggaagctaagtggacgccaagctttgaaaagtcgactcaaagagcttggctatgaacttagggatgaagaagttgaaagtgtgtttaggaacttcaaagcaatagctgagaaaaagaagagagttaccgacgttgatctcaaagcattggtatcagatcaagcttctcatgctgagcctatttggaagcttggtggtttgcaggtgacttgtggaactatgggttcttcaacagcaactatcaaacttgttactagtgatggtagcacacatgttgcttgttctgttggtgtaggaccagtagattcagcttacaaggctattaatctcatagtgaaggaaaccgtaaaagtacttgaatactcaccaagtacagttacaggaggcaccgatgcaattgctactacacgtgttgtaattcgtagagagaataagcagtcacctactcctgctttgaatggaaacgttatttatccaacatttagtggtaccggagaaggagtggatattgttacttcaagtgtagaggcttatattactgcactaaacaaaatgctcgattcaaaggaatgatttgtatttgtcgaaagaattctagcacctaaatgttagaattcacacttcaagttataaattcagcttgctatttgtgatttctttgttatctttttaagtatggaacatattattggagaatgttacctttgtaagtctccacatgggactaatatatgagaaatgaacttgttatttgcttgatgatcaaggagaataaaagaaggaatagttcccc

SEQ ID NO: 27296 - DNA, 350 bp, Glycine max
  Clone ID: PAT_MRT3847_12464C.1
aaagggcatgaggatgagccaaaaaagaaggggcaaaggttcccttgatgagggacaacccaaaccccaaggatttgtgaactccattcatgccactgtgcgataaaaatgcacttttttcccttttaatcttctgtaggggggggcaccgtaggctccgggttctcaatattttcaacggaatcctcaccgctgatctgatcggggacaatcacaaatcccatggcaaaagccgaattaaaaccaggcttatcccaaagggagaacaccttcttcccaaacaccacgcttgtggggggggccacttttccacttatctcacccaccgccttcttggtgccattttaaac

SEQ ID NO: 27297 - DNA, 473 bp, Glycine max
  Clone ID: PAT_MRT3847_124650C.1
tcgatccaattttgttctttcacccaccaacactcctgctgcgacaccgaccactccgccggctgccataccgacatccttggctccctccaagagctcctgcataccggaatccaactcgactggtacgaaactcgggagccttatttcaccaactgctcctcctgccgttcacccaacaacggcttatgtggctacaatttttgctacccaaactacccttttcagtgcttacatttacacacagaatccacacatatatcatccctgggtgcgcacctttagacccagcgcaatctaacatgttcaggcaccatcatcaccttaagctccctaatgcttatgataatcataaccaccgccatgctccgcatatcaaaagctccatcaggggcacaccaggaccctaataccctgttactccacaaccaccgttccggaagactactacgtaccgctgtcatctacgaaga

SEQ ID NO: 27298 - DNA, 415 bp, Glycine max
  Clone ID: PAT_MRT3847_124651C.1
ggcccgcgcttaaaatataaaattaatttcagacttctaccaagaaaacaaaaatagcaaggtttgcatttgcacgccccactgatctaaacaaaataggaagagccggataccccgttgatcatgcctttggcttggcgaaactcaaaactcttcctaacgtctgccatttaaaataaacaggcaggtggctcgtatggaaaacttgcccccaaaacctctgaaaagcttttaggattgcaagaaaagcgattagatatccgcatgaggcttgcccgttattcacaagtcaaaagcgagccaggaccattatgaatcttattcataccatctcccaatgttgcaaagttagattggggtttttacaagtttctccatacaccttgataaaccttcatgactttttcagatattt

SEQ ID NO: 27299 - DNA, 833 bp, Glycine max
  Clone ID: PAT_MRT3847_124652C.1
ctagcttgcatgcctgcagtttgagtttaatatgtatcttctttttaatgcttttggttggacattaaagccatatttgtttggattttgtgccatatactatcaatccaattttattaagaactaagacctactagtttttcaaacaaggtcagcaatactcaaaaataaattgccaagttggaccctgtagttttgtaaatgtatcccaacaattataattaaaaagtagttgtactgtataatatctagcaaattcaaaattctaaagtcaattttttactgtctaatccaaatggacgctaagatactagactattgatactcacagaacattatctgtagttaacatgaaaaatgtagtttgtggttttgatgcttccttttttattttatttaagtgacttagtttgtagattttactttgcagggagactatcatgttgacagtgaattttgtggtacggacagtgtacagctgaaaggatctgagattactgctgaacttaagtatctcttaaacttgttgacattgtgttggcacttttcgaagaagccctttcccttgtttttagaagaaactggctacagtgaagaaaacgttctccttcgagaagccaaagcaggagtaagtcttgtttgaattttaggaaaaaatgataataattcaatatctgtactgtgttgactaagtcattgatagttattaacacacattctcttttgaggaaggatggaaggctgaaaagcaacagaggatgttgttttatttagactgataaaatatgggataaaaaattgatgatagatgccttctttttgcttcactttta

SEQ ID NO: 27300 - DNA, 150 bp, Glycine max
  unsure (1)..(150): unsure at all n locations
  Clone ID: PAT_MRT3847_124653C.1
tttttctcttttttttgaaaaaantcgtttcccaaatccattttaaaacttctaaatagtttaccatagcatatttctgaataatatggttcacaactctttcacatannaagcttccaaaagtaccccggaacataggcacacgttcca

SEQ ID NO: 27301 - DNA, 451 bp, Glycine max
  Clone ID: PAT_MRT3847_124654C.1
gagagaagacgacagaagggcatggattctagatgagtattccgaatttcatggccactctcctgcagtagtgactgggaaacctgtagaactcggtggatctctaggcagagatgcagctactggacgaggagtcctctttgcaacggaggctttgcttaaggagcatgggatgagtgtatccggacagcggtttatcatacagggatttggaaatgtggggtcttgggctgcccaattgatcagtgagaaaggtggaaaagttgttgcagtgagtgacataactggggccataaagaataccaatggccttgacataccaagcttgctcaaacattctagagaacacaggggagtcaaaggattccatggtggtgatgcaattgaccccaactcaatattggttgaagactgtgatgttcttgtcccagcagctctttggggagtcatc

SEQ ID NO: 27302 - DNA, 385 bp, Glycine max
  Clone ID: PAT_MRT3847_124655C.1
actagccctatctctttcttcgacaggagtttgcaaagttcggtgaacttgttcatgcgagggcggtcactgatcgactctgaggttactctaacgggtctggttatgctcaatatgctacagtaaacgatgctgcagagggcattgaaagcatggatagcaacttttagaacggttgggttatatttgcagagtatgcgagaccaagaccacccccatgccaccctctatataccaacacttcttactatggccggcattgatgcctgtgatttatctaaaacattcttatgcccattgaactggttgactcaattaacatttgcaattcataaattattatttattatggcatgcatgctcagatgatctttaattatctata

SEQ ID NO: 27303 - DNA, 793 bp, Glycine max
  Clone ID: PAT_MRT3847_124656C.1
ccacgcgtccgaaacctaacaacgccatagcattctctaacccaccctccctcgacctccacacaaccccaacactaacaagcaccgtcttccatacccatgtcggaaacagacacctatgcgccaccgcctctgttcctgctccagcgcccgccgcttctgctgtcggaagcaccgatgccattgtggacttactcaacaccggcatggatgtgaccgcaatcgcaacagcggaatctatcatgccgctcacaattagggttgggaacctccacacgatgaagcttctggaagccttcgattgcaaaatcgatggattgtttctgcacgaggccacgacgatggtccgaatcgacgcgatggagtttctgttggcgcgctatgatgacgagctagaggtggatgtggtagactccgaggggaggaaaacgatccacgtggcggcgagggaggggcacgcgagggttatccagttctgcgtcgcgatggaggaaaccctaatcgagtggattcgaaggggtggaccccactccactacgcggcgtggaaagggcacgtgaaggccgcagagtgtttgttggaatgctccaacgtgaagtgcgcgagggacagggaggggagaacggcgttttctgttgcagcggagagtgagcacgaacaatctcacgcgcgcacgcgcctggtcgatttgctgggttggggcgacgcgctgctgcgtgcggtgagagttgacgatgttcacggcgtgaagaaatgtttgggggaaggggttagtgtgaacgggagggaccag

SEQ ID NO: 27304 - DNA, 460 bp, Glycine max
  Clone ID: PAT_MRT3847_124657C.1
tcccggaactcatctgattatgtttgttggctggcaagcggatttccgtgattggaaaagaagagaatgggaaaacactatttggtgcaaactgtgtttttttaaagtaaaaacgaaaccctcactgtttcgcttcgttgcgttttgcaatttcagtgcggaatggcgcgcgaacaacacacgccgacacgtccatggatccaggatgcagtgcctttgttagtggttcttctaatagcagctcatgtcctcgccatgatatattggatttatagactagccatccagaaacaggtgcagcataggacgaaggctcattgaataagaagaaggttcgtgattggcgaaccctaatttacttcctacgaaatacaatgtcctcaatcttggttttataggcgctgttcgataatcattgacattttgaattagtggaaatggactaaattcataccgcagc

SEQ ID NO: 27305 - DNA, 240 bp, Glycine max
  Clone ID: PAT_MRT3847_124658C.1
aattcggctcgagagcaaatacggattcaaagagacagtgcggtaggcatcatactttatgtttattactatgatgcctaccgcactgtcttgaataatgcgtgggttggggttcaaatatacctataactttttttgtgtattatgagaaccaccttataactttactttttctttctcatgttgtacacctaatgctcttgttttttcaatcccttctcatttcattcacttgaaatt

SEQ ID NO: 27306 - DNA, 321 bp, Glycine max
  Clone ID: PAT_MRT3847_124659C.1
cgagtgactcggtgttcacttgctctaatcgtgatctttcaacgtcatttgccgacgatgccgttcagaaacatcggcgacggaaggcctgaataggcgactcaccccgacacgttgaaggccgctttgcctgagctcatctcaaccttcatcgagagagttcgccggctcacgctccggcatagtctacaacaagctcgccgatcacagcgctgccacccctgccaaactaatcttcgtctgcatagaccatgcattcgccctttttgtcgtcaaatacgtcggcgccaacatctcctgcggccactttaaccccctcgt

SEQ ID NO: 27307 - DNA, 1030 bp, Glycine max
  Clone ID: PAT_MRT3847_12465C.1
aaatatacatcattattgattaacaacttattaaaatgcatagaacacataacatatagctcagagtgattctaaagatattccctattggggctacaccaccccaaacatgtgtatgcatgtgaatagtgattttggggcaaataaaaattacatgtctttggcgtaacatcacaatgtgcaattacaagaaggacactacaaaaatcacaaaccagtgtcatagttcaaacaagccacgtgatgacagagaatgcaatgcatcgagattttctcctcgaaatttccctcttttcgaacacactccattcactgccaccagcaaggattctgatttcccagagaattgcccatagctgatcataattcacaaagcggtatagagaataaaaggaatgaacttgaaagtattagattactaatgaagaaaattaaattaaaacccatccacatgataaacaaagtagtaataatagtaataaacagtaataacatcatagtactaatgtgtataatagaccaagttaaagccctcgaatggtttttctttttcttctttgctccttgtgttcttctcagttctcagcctctgacagcaagcaaggaaggtatagcagataaatttggcgtggcattcttatcactggcacctctaataatatcccttcggttactctctttagaagaaggtttaccgctgaaagccctcatgggactcgcaaaagcccaaccccaactcctacctttgttatgagagagtgccacagtggccgatttgccattcacagcagcagcagcagcagcatcatcagcagaagaagaaacccaatacgaggaagaagacgaggatgaagaagacgaagtcatcatgaacccactaaacaaccctccacaccggaccctttctttcatgcaatggtggtggtgttgttcgccggcacggctcacggcggtggaggtgccaccaccagtccccttcggcttaccttcacgctgagactccactctcctgagagtgcaatcttcaaag

SEQ ID NO: 27308 - DNA, 556 bp, Glycine max
  unsure (1)..(556): unsure at all n locations
  Clone ID: PAT_MRT3847_124660C.1
ggctcgaggttggttgcaaattgcttgttctctctaaccaaaaccttagttcaaatattccaaggagttcaaaatcttaccttgagagatttcatctttttgttcaggaaggagctgatcaaaacacacccctattcacgttggttccattgaaggatggattctactcagtcgaattcagttcagaaattaatcatntacgagcattcttcatgtctgtggcagttttaagcagccataacttgccaagttccttggaaatcaataacatgcaagaagcaatcaataaagaattcagtcccaagagcaacaatgaacttcaggggaaagcacctttatattataatccaattcctccatactcccctgctgacagagtttaatatcagaaagggaaggctttttcaccatcaatccatcatagatatctgttatatattaccatgaagctaaggaatttcaagttattgcactgccaataattctccatttactcctttattggttgatactatagcaataccacagtccttcccaccagaataccctgttgtgc

SEQ ID NO: 27309 - DNA, 517 bp, Glycine max
  Clone ID: PAT_MRT3847_124661C.1
gtccaatgcatgtgacagtggaatctctaataaacttctttgggtcacattaaatgcaataataattcctcaatattctcgtttgagagaagccaaccaatgaagaacacccattcagtaatgacccatgttgaaaccaatcatcccacctcttttttagatgggggagatcatactgaacattcttcatttgttcttaatatagctccatgaattggacctccaggagaaacaatagctttaatgatactgccactaccatgtagtcattcattgatgagtcatacccaatgccatataaatctggatcataatcattatcgacaacacaacgataatatgtttttggagtgtgatgtatgcggattctttaagagtacaaatcctctgcatgaacctacaaccacaacacctacccagaattcatacttgaaagtgggtgatgcatttggaatgttaaactttacgtccgttgaatcatcatctatgtccacagaattagcttcgaaataggaat

SEQ ID NO: 27310 - DNA, 344 bp, Glycine max
  Clone ID: PAT_MRT3847_124662C.1
tctttccggcttatggtacgacggcggatacaaagtctggactaatcacgtgactaatctcgctttgacagcccaggaaaagatggaagtgattagaaatagaggctttcctgctgatgttcttgctaagcgagctcatgaatccgaaacacatgctgctcatgaaagcctcaaggctcaaatttctgctgttgacaaggcgtattctcctaaggttaataagtttgctgaaattatgaaccttaaacaacgcgttgagggtgatctcaaactgcttcctgatgggaagccgcatgacggtgagcatattgctgaatctaatactaatgcaggggaaaagcatg

SEQ ID NO: 27311 - DNA, 349 bp, Glycine max
  Clone ID: PAT_MRT3847_124663C.1
caaaagtgcatgtatattctcgttacttttgtacaaaggaccaacttaagtaagaaaagagagaataaagataacataacacccaatctagtttagtctagttcgttagtttcttacttaagttggtcctttgtacaaaagtgcatgtatattctcgttactttttttggctcttacatccgtgtttatttttcattatttagggatgtatatatcaggtgatttcctgaggttgagtttatagttctcttctgtttgtagctttgaagtataaaaccgaaagtttagatatcttacttgaatggatacccaaaaatcttacttgaatggatacccaaaattttctgtc

SEQ ID NO: 27312 - DNA, 427 bp, Glycine max
  Clone ID: PAT_MRT3847_124664C.1
ccttgtgagcttcagttccgagctttggagcaagttaatctgtctccaagaagtggatcccgctctaaatcatcctttgctcctagaagcaccactttgttgagctctagtctttcaaatgtagcaagtctatgtgggaacttaacaattgaaccacttcacatgcctcaaagaggtgagtccaatagttcaggatcaaaatgctcccctttgatcagaggatcatcagtgataccagttattcacagttcatgagtgaataggattctccattgttttattcttttttgtgtcaataggtaaccaattaatatatgtatttttgatattctttccattgatgcacacaggcattcttttttcactcatgtatagtattataggatcaaaactcacaagtgcaaaattatgttgggatttatttatc

SEQ ID NO: 27313 - DNA, 409 bp, Glycine max
  unsure (1)..(409): unsure at all n locations
  Clone ID: PAT_MRT3847_124665C.1
atttgactcgataaaaaattaatatccggcgctgggggtcaactgtataccacgtttcatcctttgcacaggcatatcgcattgtctccaaccacgaacattttatcggtgaaatttctgggatnnctaacccacaacaggccatgctccatatagaggcaattctggtccactaaatctttaattcatcctctgttgcagctgatgcacatatagagaacctctttgtttaatgcaaaaatagaagcgtacagcatcgaattatgatgctcctaccaacttgttcaaggctgatgtgtctaaacctgcgaagtcctttacagctgcaagcacagcaagtccaagcttcacagcatcgtcattactaggtgcctcaatgttaaggggaagtacaggatcatggagtgat

SEQ ID NO: 27314 - DNA, 1597 bp, Glycine max
  Clone ID: PAT_MRT3847_124666C.1
atatttttaacatccggaatccgccacgcgtccgtttcattgcattgcattgaacgcagcacaaacacaaacacatggcttcctccttcttctttctaacattgcttctcctctccattatctccgccgccaccccctgcccgccgtcagaacgggcagcactactggccttcaaagctgccctgaccgaaccctacttgggcatcttcaacacatggtcgggcaacgactgttgccggagctggtacggcgttgcctgcgaccccaccaccggccacgtcaccgacgtcaacctccgcggcgagtcccaagacccaatgttccagaagcttggccgctccggctacatgaccgggaaaatatcgccggagatttgcaaccttagcaacctcacaaccctcatcgtcgccgactggaaggccgtctccggcgagatccccgcttgcgttgcctcactctacactctccaaatccttgacctttccggaaatcgcatttccggcaagattccgacggacatcgggaacctctggagtctcaccctattgagtctgggtgacaacgagatctctggcgagatcccaatgtcagttgtaaaccttgccagactcaagcatctagacctcagcaacaaccgactcactggcgaaattccctatgatttcgggaaactcgccatgctgagtcgggcgttgctgagtgaaaaccaattaaccggttcgatccctaagtccgtgtccagaataaacaggctcgcggacttagatgtctcatcgaaccggttaagcggttccatcccggtagagttgggaaaaatgaaggttctctctactttgaaattggatggtaactctatgacgggtccagtaccctccactttattgagtaatacgggtatgggtattttgaaccttagccgaaacgggttttcgggtaccatacccgatgtttttgggtcgggttcttattttatggtacttgatttgtcgtttaataacttttcgggtcggatacctggttcgttatccgcatccaagttcatggggcatttggatctgagctacaaccacttatgtggaaccatccctattgggtctccgtttgaacaccttgatgcggcttcgtttagtaacaatgattgtttgtgtggaaaccccttgaaggcttgttgatgggtgacccgaataagtattgggttgttgttggtgaatattaatcgttccaagatatagtgatttggttgtagtgaaggagcccaagtgtgattttcatttgatgtgatagtattttgtcatgtgaattgtgatgtaatataatatatttagggcaagtgttgaaatggacaaaaagttatgagggtgctcctggtggcatgtgcatataagtgagcataggtcaagagagttctgaatatgctagtgttgcatgtgggtttcggagttgcatgtgagtttaagagctggataacgtgaaagatttggatcatgattccatttcctgtttatgtgttttgattatccaaccaaagtcccccatattttggaaaaaaaattataatgcgatcatcccaatgctacaagacttttttttcccccac

SEQ ID NO: 27315 - DNA, 1082 bp, Glycine max
  Clone ID: PAT_MRT3847_124667C.1
caaaaataaaatctaaaggattgagtatctgtatcaccaatccaacaaaaaaaatgtctgtggcatcttcattcccatgcatcaaaatcccagcttgttcctcctctccatcatgcacatcttcatcaacttcatcatttagattttcttcttccaagccttatgctgctgtttctataaggaactctcagactgaagggcctctgagaagaccagtggctcctcctgtgagagaaccatcaagtagtgtccctcagccactgaagccttcacctccttctcaggttccgccccagaaggcttctcctgttgctggggatgataataatgtcattacattagagtttcagaggcagaaggctaaggagcttcaggagtatttcaaacagaagaagcttgaagatgcaaatcagggtcctttctttggattcattggcaaaaatgagattagcaatggaagatgggcaatgtttggttttgctgttggattgctaacagagtatgcaacgggatcagattttgttgatcaagtaaagatccttctctcgaattttggaatagtagatttggaatgaataccataagattatatactgtcaatagtttcatgtaactactcctagcgtaaacaacgtttcatcttcatatatagcaaccaagcttgcatctttgtcttcacattaatgaagtaacaataatatcatgattttccttgtcctaacttttcctagcgtaaacatcgttcatcaatttgtttcatcctcatatatagcaagcaagaaagcttgcttctttgtcttcacatttatgaaataacaataatatcatgattttccttgtcctttatgctcaaagtcttgctataaatatggttcagcaccaatatggttaatcataccttatgtatgtgatctgaagttcgaccctccagagcgaaggtatgaaaatattaggttagatcaatcacttaaatgattctcattcacaatacatcgggtataataataataataaatcattgcattgtatttagcatcagatatcaaatgaaatgagtaatattgtcagtcaaaaaaggatac

SEQ ID NO: 27316 - DNA, 257 bp, Glycine max
  Clone ID: PAT_MRT3847_124668C.1
ataacctactccaccaccacttataccatcttacacatttccttcatttctcatcaacctgacaaaatccaacccatcaaaactttcccacctttttcttcttatcctcataattctcataaccaccttccctacccttacatttcaaatttctaccatcaaactttatacccttcaatcaacacttgtaattctctcctacctatctcctatcctctcacatccccatacctttttcacacctaaataccaccata

SEQ ID NO: 27317 - DNA, 314 bp, Glycine max
  Clone ID: PAT_MRT3847_124669C.1
tcgattgtattttgaatctaccatgcatagcttttgtgagatatttagggggccttgttggtggaggaattctagtgggcaaaactggagatcgtgtcacacttacacaaaatgggtccatttagtagcgttgttcaaagttggtgcttggaagaaaggttgctctatggttaagattgtgatgtctgggaatgcatcattaaataggagtgatcgggccttattggaacaagtgttttttaacaaacagcatcagtacagagcatttttgatgcatgtctcttgacaaaatctttctccacacccccgggaat

SEQ ID NO: 27318 - DNA, 396 bp, Glycine max
  Clone ID: PAT_MRT3847_12466C.1
ccttcattgtgatccagatgaaccgggatcaccggttgccgtgcctcaaaaccggggaccaatgcatgcgacgcttgagtgaacgactctttggatactttcctacttcttgggggacgattgcttaggggacagaaaatcactctctgtgctggccacagactcagtgaatcattttctttggcactcttagtttattggctgaacactctgctatttgatataggacttcgtgcaaggagccaactttgtcagttgcttggtcagatggctgcttaatttcaagttcaagctggtgaaatgttggatctgtgctcccagtctgctatctggtgtgggactctgtgggtagactctgatagtctgaccttcttatacatcgttatgtaactgatc

SEQ ID NO: 27319 - DNA, 696 bp, Glycine max
  Clone ID: PAT_MRT3847_124670C.1
ccacgcgtccggtcagatattgccatgctctacctttgatgatgttttctatgttttagaatgtaagagtaactgtttctggtatattgtgttctttgctgtgaaacaggcagcaagcaagccttgatatcattgtcagacaagaagggtcttgcatttgttgggaatgggctccaggaattagggtaagttattacaattaatgagtgcctttttttaacatgttagaatactgttgttttcatattcatgctttattttaagaaaaataaaaattgttcatacttgtttttatgatgtggtttatgacatttcaagcagcttcagttgctatagtcaattaatggcagtaactctattaaattgtagatactctattgtttcaactggaggaacagcttctgcattagagagtgctggagtagctgttactaaagttgaacagcttactaagttccctgaaatggtatgtgtttgtagcttgagttctccttccaaaatctcatgaacaattcttgggttggaatatctgatgatttgcctatgaattattatgggtttgagccctatttgggtaaactttcccataagaacttttagagtgttgggtagagtgggtcccacaccttcttcactcttctttaattcaaatatttctcttctatttccatcttctcaaccaaacacactcttacg

SEQ ID NO: 27320 - DNA, 333 bp, Glycine max
  Clone ID: PAT_MRT3847_124671C.1
ggggtaacttaaaacgagggaatgggattgatgatcgttgttttctccagtgttaccaaccggaaaccttgccatggccggcctggcggtttgttccaccggcctaaaatccatggttggtttcccaaccggtaagacgaaaaatgcctttacttgaatggttggtaacgagggaaacagcaattgcgggttgggggggctcccaatggggaggatgaagtctccgattgtttccttcttggcggaccttgttgatgcccattgggaaaaggaggtccaataccttttatggaagggatggatccttggtttgaattccagggggaaattggg

SEQ ID NO: 27321 - DNA, 246 bp, Glycine max
  Clone ID: PAT_MRT3847_124672C.1
acgcgtgcatatgcaacataaaagcaagctatattcgcaaatgggaccatatcctctatacccgcttgcattggaaaccctcctatcaacgcagaacttccctgaatcccactgctgggaattacacccacgctgttaggactagtttcggtgaaccgacccaacactatactggaccgtttcgctacgaccggttttcaaaaacgacgtggtcgatcaccttgtttgagactgggcggagcgaat

SEQ ID NO: 27322 - DNA, 389 bp, Glycine max
  unsure (1)..(389): unsure at all n locations
  Clone ID: PAT_MRT3847_124673C.1
ttctcttcacccttctcatgtttcttggcggggaagttttcacttccatgctcgaccttctatttgctggttataaattacaaaacaaagttagcatcaatccttttccacccacaaatcatgcaaatcaaatagagcttggtttagtactttctattcctcactcggattcagaaaacaacaatccatgtgacagtaatattattaacgttgcatcatgcgatagactcaagtataactgtcttagttatttgacatatgcagttntaggttaccttgtgatggttcaatttgttggctttagttttgtgtctttgtatatgactttggtaccgagtgcaagacaagtactgaaaaacaaaggcatcaagattgtaacattttctttg

SEQ ID NO: 27323 - DNA, 1332 bp, Glycine max
  Clone ID: PAT_MRT3847_124674C.1
acgagggcacttaaattttgcaaatttcaccccaaacgtaactgtcaatgcacaatttggctaccggtttttctttctattacggctgcgagaagacgacagaaggggacatgttccatagttcttgctctgggtgggtaaagatggaaggtgctagtagagtcttatgcttgtttctggcggcatttttgtggtttaatgctcaacatgcttttgtaagttgtgctttgacatttgagttgcaaagcaaaattgctaaagccaaccaagagggaccttacctaggtttaatcataccaaattcttttgaactagaccctcttcttcagaatcctggctacacagctagtgacaccatcatagacttcgctggaaggagatttcgctttggagccattggtgacaagcctgttatactggtcatgacaggattgagcgtgataaatgcagctataacgactcagcttctgttgagtttattcacggtagaaggagtggtgcattacggcattgctggaaatgcaaacccgtccttgcatattggagatgtagctattccccaatactgggctcatctagcactatggagctggcagaggtatgggctagggcctgatgacacattacccttggaagacaatggagactacaccagggaattagggcacttaaattttgcaaatttcacctcaaacgtaactgctgatagtccatttgataaccaactcaacaatatatggtaccaaccagaggagatttttcccattgatggcgttccggaagtaaggcagcatgtcttctgggttccggttgattccaagtactaccacattgccaaaaagttgaaggacttggagctagagtcgtgcataaactcgaccacatgcttaacaacgacaccgaaggtggagcttgtgaatagaggtattagccaaagcatctacctagacaatgcagcatacaggtctttcatctacaacaaatttgaagtgagcccagtggacatggaaagtgcatcggtggctcttatatgccatcaacaaagggtacccttcattgctattagggctctctccgacttggccggtggcggctccgccgagtccaatgaggccgataccttcttatcaatcgctgccaccaattctgtcactgtggtcattgagttcgtgaagctcttgtcactccactctaagtggtggtccatgtaatattccgtgtatggtgcacatgtagacaacttcatcgtacgttgtttcagagtaataagaatctgtgcattgatctatataaatggcgacaacaacttttccctgaccataaaaaaaaaaa

SEQ ID NO: 27324 - DNA, 240 bp, Glycine max
  Clone ID: PAT_MRT3847_124675C.1
cccacaggtcaccagatactttatacatttataataaaacgtaggcagcaccacccaatgtatacaaagataattgcactctcgctggcccgcaaactatgccctaaaaaagagaagcttgtcgcactattttttttatgtatgaatgaccggcaaatatataaccaattttaaaaatacacttagaggaggagggtccgaattctccatggaccattttaattaagagaacaatttctt

SEQ ID NO: 27325 - DNA, 177 bp, Glycine max
  Clone ID: PAT_MRT3847_124676C.1
cgggaagaggagtggggcacaatcagatcgagattgaagtctgcacttctcgcaactgcaaatactatgactctttctctcactgtgatggatccttcatcagacgaacaagcaaacatacaaacacacataagatgaatttcctgatgcgctccaccacacacgtctactccgaca

SEQ ID NO: 27326 - DNA, 256 bp, Glycine max
  Clone ID: PAT_MRT3847_124677C.1
gtgtttttttattgtggctcagaacatacacaaaattcataaactctcctacagatgaataataatatacattagaaaaaaaattgagcctaagatcttcatcctaacccaactcctaaaaactgtattttgtggcatttctgcttatgaagttccttttctaattgtgtccagtctctaaaagtatgtgacatacttattcacatgcaatgcctattggttctggttctgactatttttcctttttattaataag

SEQ ID NO: 27327 - DNA, 199 bp, Glycine max
  unsure (1)..(199): unsure at all n locations
  Clone ID: PAT_MRT3847_124678C.1
ctcactcgaatacataccctttcgtttatactaaaacaaccatcatcaacatcatccgaacgacatttatcactggcgcggggctcctnctcaaaccacctgatggagcctccacctataccaatcttggatttccagcaatggctaatgcagaaaaagctagtttctccattgatgaaaagccttcaagcaattcaaa

SEQ ID NO: 27328 - DNA, 160 bp, Glycine max
  Clone ID: PAT_MRT3847_124679C.1
aattcccgtctgcgccggcgtcttccccttgttttccaggaatttaaaattggaactttaccagttaccatgttttaattgccacacggttaatttttctctttatgaagaaccatggacaaaattcccggttctttaccaacctgcctagtaacctgct

SEQ ID NO: 27329 - DNA, 437 bp, Glycine max
  Clone ID: PAT_MRT3847_12467C.1
ttttaccatccttatcatagttttagaaaaaaaacaccataagtatatttttttttttgcccaggtccagtgcttcgaaaactatactttaatagttaccattgaaaaaaaaaaaatggggggttgaatttgacaactggggtaaacagctagggaagcctaaagatttaacaattcattgtgctagtgaaaacttttgggagcacaccaggtgcgcaatttttaagtatgttcaaaggctgtaaattgaggaacactgaggtctataggccggaggtttctaacgatcattgatcttgtaggaaaatgcaaatgatccttctcctatctatgataggacctgaatgaccaacccgctagagataggacttggggacctccgttttattaaaacccggagcgggccccatgccaaatcaaaactttctttgaacccc

SEQ ID NO: 27330 - DNA, 217 bp, Glycine max
  Clone ID: PAT_MRT3847_124680C.1
ctattataatttttaaccaaacctaaaccaaaaaggggtccttgggaaatactaaagcccaaaaccccccaccacaaacaccgtctcttccatcaccacactgacaaggataataaatcaaaaaaaaccgatactgactactacaacacatcatattccaagcctactgattactataactctcatattaacaagcacatcatatgattcttcctcc

SEQ ID NO: 27331 - DNA, 152 bp, Glycine max
  Clone ID: PAT_MRT3847_124681C.1
ctcattggaaggaagataactggaggagactctttctctcagtctcatccacgtaaacaactgattggttttgaccaatagactacacatgatcctgcatttcactgctctatgtttcttgggttactacaggctttgtttgttgtttgaga

SEQ ID NO: 27332 - DNA, 351 bp, Glycine max
  unsure (1)..(351): unsure at all n locations
  Clone ID: PAT_MRT3847_124682C.1
tacgcctgcggatccggtgcggaatgtcccggggcgacgccacgcgtccgctgacatgtaacatagtgacatattctgtgggctctggtgggggttattagaatccttttcaggagcctttaccgttttgaggggttctcatctcactgtctaagtgacactatagtgactttagcacaacttacacgaaacacatatgtaaaaggattgggtgagtaatatggggatatancacagaagaggagcgagatnagatcaaagaggaggcaacatggcttatcacttatgatctccataggggtgaagagttgagatggggacagaatttctgcattggtctatcttagatat

SEQ ID NO: 27333 - DNA, 102 bp, Glycine max
  Clone ID: PAT_MRT3847_124683C.1
cctagactgggtttgagctgtttagaattaaggagagggatatcccaattgaggtccttgaactcgagaataagaacgacaagatcattgcattggcatggg

SEQ ID NO: 27334 - DNA, 253 bp, Glycine max
  Clone ID: PAT_MRT3847_124684C.1
tcactctaactttgccgaccctgccagctagcacgatttcatcggcgtgcagttctcccccctatggcgtggttactgttagaagcttggtcctgagtctgataaagctgattatatcttgactcttcttgatcctactatcgctttggctttaatagatgccaatgaggataacaacacagaccttgcattactatatgatgttaaaggattccccacaattagtattctgatacatgcgggaaatactgtt

SEQ ID NO: 27335 - DNA, 261 bp, Glycine max
  Clone ID: PAT_MRT3847_124685C.1
gaaaagggaacccaaaccaaaaccctaaccctaacggaaagatggcggaccacttgtcatgcatattcgggacggagaaggacagggtgaactgtccgctctactacaagatcgacacgctcattcacgtctaccagttctttctttaaaatcgatgcctacgactttcccaacatctgctcctatccactctttaaagtacaacaaccctgcatatctcacgtactcactaaacttatgtctctcatgtttttccatcta

SEQ ID NO: 27336 - DNA, 404 bp, Glycine max
  Clone ID: PAT_MRT3847_124686C.1
ggtaacaagaatgaatcgattattttcttgaacgattggtacactagaagcaaccccaacccgaaatgtatgggaaatatgtacaacaggtgctgggaatcactaaccatcacaagaatgacggatatatctatcaaccaacactacctaatcaaaaaacaacctctaacaagaaagttagaaagaaaataaaaacaaactagagaatataacttgctccttcaagccctaagacgcaagcgaagcgaatcaactcagtccagaataaaatgactctaataccccttgctctctggctctgccctgtgaatgagaattccaatcacctcatggacatcaatgtgcgaacgcgcttttccctctctgctttcttcgcactcggagttctcttcacggacgcgtgg

SEQ ID NO: 27337 - DNA, 446 bp, Glycine max
  Clone ID: PAT_MRT3847_124687C.1
gttcaaactggacaaagccaaggccacctgcaagtcatctattgctctctacgtctgcctaacctgctttttggtgctacttaccatagcacactcttacccataccgtaacttctaccttgaacaagtacagcccaattcaaccacacattatgctgcaaaaagacgctagtatttcatgctctggggagttacaactcacacaaaggtggtagcacacggcgggcccacctttggatcagtcagacgagccctttactctgccccaatacaaatttgtgaccgcgaaaccggctagggagacggttggactaccccctttagatggaccatctacggaccctaccaagtgcactgatatgacggactagtctgcttggtggcacccggcccttgtaatgcccaatcctataatggaatttgaggtcttgccaacagacccttaa

SEQ ID NO: 27338 - DNA, 281 bp, Glycine max
  Clone ID: PAT_MRT3847_124688C.1
gcctaccatggccttctatgtgcttatccaacttggttctactggtggtaaacgtccttgtttagctcctgctcaaagcattgcggttgacaaacacctaatattaatgattaaagtcaagttctaatagacaagggattgcaccactgctatgtacaatgccaattgactgaaagactctctagggttagctgtaggagtctcttctctcttcactggttcggtggatgcaaatggagctgttttgtccccagtggagaagcctaaactgggtgatgaca

SEQ ID NO: 27339 - DNA, 139 bp, Glycine max
  Clone ID: PAT_MRT3847_124689C.1
gtttctttgttacgaatatcccgtcgtttggagcggccggagtgatactctgtatacatgctccatctcctagacctacttacaggtgatgagcttctctctttcttcttacgtgacacggctaatgaggatggagtgt

SEQ ID NO: 27340 - DNA, 350 bp, Glycine max
  Clone ID: PAT_MRT3847_12468C.1
gggtggaaattattatgcaaaaagtccaaagggaaacctgtgtagtgttttgaaaggtggaatagatctctgattactgaaatcttgcccgagaggaacaattatctggggcaaaaattgccatccaaaaacattaccggctagagcggtaaaaaagccctctctaaagcgccaatacagtgtggtcacacccttgaaagaaattaaactggggccaggcacattatttttaaaatactcctgaaagagactatcatgtgtgaaccttcacgactggagccttattggggcaacaaataaaccctccatacagcttggtttgtgctctcatggatacaaaactgtttaaa

SEQ ID NO: 27341 - DNA, 223 bp, Glycine max
  unsure (1)..(223): unsure at all n locations
  Clone ID: PAT_MRT3847_124690C.1
gttctagatcgcgagccgccgcccttttttagttttttttttatgtttatttgtttttttttataacgtacgccgggggttcgaaaaaagttgtagaaggggcagaatcggcaaggagggaagcacctgcaaggggaaatcgcttgggggagaatttaaacaattccacgcaatataagatacanagaggggggtggaaagaacaagcacgaatttggttgcc

SEQ ID NO: 27342 - DNA, 189 bp, Glycine max
  Clone ID: PAT_MRT3847_124691C.1
cggactcttgggttgacgtaccaattgtccaggaggggtcagccaagcatacaggaatggcatgtaatacacgatctggggcctgggcaggactgaggcagctatgaagcgccctcttatggtgaatgaaagtgggagtgccattacgctatttgatgcctgctcatagattcctacatattttagcct

SEQ ID NO: 27343 - DNA, 107 bp, Glycine max
  Clone ID: PAT_MRT3847_124692C.1
ttcactcggattgcgcattcacaaataagggctgaagagggccctgccgcgaagaagataaataccgtcatttcatttgccggagaatgtctgtttttctttccata

SEQ ID NO: 27344 - DNA, 429 bp, Glycine max
  Clone ID: PAT_MRT3847_124693C.1
gctcgttttcggctcgagcaagctgtcgcctttgaacttgaggctacaaaacttgtaaatgatgcagagattgccctacagcgagcagataagtctaattctaattcaaatgctgataccatagaatctacacaagcacaagatgttgttgtggctgttcctgaagaggagaaagtggttcaaggtttttctggtgatgttgaaagagacagagatttggcaattgacgacgaatctgtgcttgccaatttatcacctgaaacactatctgataaaaccagccaagttttggaagacaaaacacagtctgattatttaagtgataatgagaatgctgtgcaaacaaaaaagcaggaaatacagaaagatttgaccagagatagttcactagctcccaaggcattattgaaaaagtcttctcgattcttt

SEQ ID NO: 27345 - DNA, 176 bp, Glycine max
  Clone ID: PAT_MRT3847_124694C.1
aattagaatcaaccaggggccaattttaatctaggcaaacaaaaccccactcattccgccgagcatcccacatgaagggggccgttatccatttaacacagggggaaaaatgggggccatgccgggcccaaaccacccctgcaaaacccaaccaagccaggcttacacgcgcaaaa

SEQ ID NO: 27346 - DNA, 122 bp, Glycine max
  Clone ID: PAT_MRT3847_124695C.1
aagataagacattgacctgaaaaccggcaaaccagatgatctattctcattcggactcatgagcggctacacatagcctaaagacggtcctggtaccgactagggtacgtcaacaaactaag

SEQ ID NO: 27347 - DNA, 402 bp, Glycine max
  Clone ID: PAT_MRT3847_124696C.1
gaagaaagagacctgaaagtgtcgcactttcagatcgtgagctcgtaaaacctcacacaccagggggcgtcactggggcgtacatgcacctccatgaactacttatgtgaaatcactgatgctctatggttcattactgacggtttacctgccaacggcaccttatacctgggtgcaaaacccttcgacctgcacggaactgtggtgatcggtgcttttcactgtatcccagaatgctacatcatctgtcttcctgtagtcataaagttcgtcataatcatggctacatgctgctcgttttccccgatggggcctactcggttcgcctcgggaactaggccttcattaagcacatgatcaaggtgatcaaagtcatgtactacttcattaccttcatggtgg

SEQ ID NO: 27348 - DNA, 152 bp, Glycine max
  Clone ID: PAT_MRT3847_124697C.1
tttaaggacacgggcgttggacatccttagggtggaccagctattgcctttggtatcagagagcagctttatgagattgccattcaaagtgggggttccgccagagaaagcagaatgagccagaacggtcctcgaggggctgaatatacttc

SEQ ID NO: 27349 - DNA, 125 bp, Glycine max
  unsure (1)..(125): unsure at all n locations
  Clone ID: PAT_MRT3847_124698C.1
gcggtnggtgagtgacgntcggagagcanggctactacgggctacggctnncggcgtcgtggggaggaactgacgctgaaagttganaatnngatcggcaacgagtaacaccgtcagagtctgcg

SEQ ID NO: 27350 - DNA, 344 bp, Glycine max
  Clone ID: PAT_MRT3847_124699C.1
acaagcctgaactaccttgtcaacccaagcgaccctgctgcaactctaacatgccactaggaccttttacccactcttgcgaagatcctgcactgggacggctccgtatagcgctatgtgatacgctagccagagtggcaatgtacggcgagaacgcaagcatcaaagagatccagtacatgaacgaaatagccagcatgtacgattacaaggctcaggcgaagaaacagctctgcaacatgcctctacaacgtgatgcttcaatcccaatgttacaccgagatatgcactatgagcatagacactcttaactataacactaacaacatcgttctacgcttcaa

SEQ ID NO: 27351 - DNA, 1161 bp, Glycine max
  Clone ID: PAT_MRT3847_12469C.1
gccaatagctttagcttatattatagacgtaccacacttattgtatcaagacaccaacggctcgagccatggactggttctcctggctatccaggaccagcctagagccatccctcatctacgaatacggcctcgccttcgcgcgcaacgagctccagctggaggatgccatctacttcaaccacgagtttctccagagcatgggagtttccatagcaaaacacaggctggaaatcatcaagctcgcaaagaaagaagttggtggcggtggggcggtgatgatgatgaggagcagcagcagcatcaagttttctatcaagaagtgcctgaggaagtgcttcagcaagctcgtttcgcgtgaagatcaccacgaagcgatgatggcgacaacagcgatgatggcgaccgagccgaattggtaccaagggaagtggaggagggcaaggcacaatgggaacaatgaggatctcaagggagataataataataataacaataagggagttcaaagaagtagaactattgcattatcagggcctttggatgggaatggaagaataattcacgagaagatgatgaacaacaacaaggtgatgaaactatctggtcctcttgatgggaaaatgaatggtggtaacaatgagagagtgaatatgtatgcaagtgcaaatagaagtccattgatgagtgctaatacccctactaggcctcttgatggtaggttcatgggctcagtaaagagccctaggctttctgggccacttgatgcaagaccaaccatggttaatagtagaagcccaaggttaactaggcctttagatgataggactgagagcccaatgggttatagtccctacaataaggtcagagctgatgctgctgattatgatgatgattatgcaatgtggcctacattgtttgaggatcttaaaccaacttagattattattattattattattattattttgtatttgttttctcatggcttattattatattattacaccttgatggcgagtgacagcaacgttttttggtacaataatgattagtagcttgtgaaaatgaaatgtgatgtttactgcaactttttgtttgtttcttttataaccttgtccacttgagtgttctgtgtttgaagtttcaacaccctttcgc

SEQ ID NO: 27352 - DNA, 422 bp, Glycine max
  Clone ID: PAT_MRT3847_1246C.1
gctctctccatgagattcccaatgctcataattttgttgaaatctagatttcaataaatcaccaatcacttcgtctcttgtcttatagtaaatagcgttgcatctacaacatggacacctaattgtgtttttattcttggaataggaaaaagaaaattctaagaaatcattaatgccctttaaatactctatggaagcttgaatattaagttttatccaccctttattttgcttgttcattataacaattcctataatttgaaaaaatgaaacttaatatggtcaatttgtaaaaattaaaaaaacaggaaagtatacttaatatgttcattaattccatctttattatttaattaacaaacttatttcccaatctgtgataattatgtcatcacataaatagaaaattttgttgtaaaaaa

SEQ ID NO: 27353 - DNA, 460 bp, Glycine max
  unsure (1)..(460): unsure at all n locations
  Clone ID: PAT_MRT3847_124700C.1
gaatcgagttgagcaagcaacaacaacaacaaccacccccaccgagaggaggagaaggttttcggcggatacgagcgaaaccacggcgttttggggaagaggatgtgcaatcagtgtggggtaagagaatcgatagtgctgttgttgccatgtaggcatctgtgtttgtgcacaatgtgtgggtccaccgtacacaattgccctctttgtcaatctggcattaatgccagtgttcatgttaattactcttaggaggagtttttttcttcttcttcttttcttttcttaacgttttccatatactactactccattttacaccaccggaaaaaaatagttacagtttactttcttttttgtccgaaggacagtgtaaggaggacaaagaaatagtagaatgtagaattcttttgttgatacaaaaattaaaaaaaaaaaaaaaaaaaaanaaagggcggcc

SEQ ID NO: 27354 - DNA, 336 bp, Glycine max
  Clone ID: PAT_MRT3847_124701C.1
ggctcgagctaaaccctaataaagaggggcggacctgcacagctcacatacctctatcacattgtggggtggcgtcgtactgtctaatgatcatgaccgtgtcgcttagtgcgctccctgcatgtagcacgctctagggttgggacctgagactctctctctctaaaccgaacgttacagagtctattttgaaccatcaatgctgattcgctaggcggcagcatattggggccaaagtagatgactaatcgcataacgtggcgtctatccgctcctactgagacgggtagagggcgaatcataatacaaacgggctggcagtactggatgggattg

SEQ ID NO: 27355 - DNA, 334 bp, Glycine max
  Clone ID: PAT_MRT3847_124702C.1
tcactacgaccgtgctcgcccgtggccgccctttttttttttattttttttccaactggaaaattagctattttgtgcctggctaataggcatgtataaccaaatcctgcccaactcaaaaaagaactccggttgacattccttgcctgtattttcggctacccagaagacattggcttttaaaaacctgggtcaacaaaaatctattcattagagagccgctacgaatttataaattcatccaaaaaaagtttactaatacccctgccttcgggagccaaggacacatagctctggtggaatctatagctcccgaggttgaatgttttatcaa

SEQ ID NO: 27356 - DNA, 1669 bp, Glycine max
  Clone ID: PAT_MRT3847_124703C.1
ccacgcgtccggagagagggttcatgtgggaatactaataatgctgttgggaggtggctggtggctttgcaagatggggatgggaaggggaggggtattgagcttgtgatggaggaggagatggaggtcagtgggagagagaggagtaatagtcagaggaggcatgtgtttgaggacattgatgttgatttggtggtgggagaggaggaacagaagaagcatgaggaggtagtgggtggagaggaggaagagaaagctagagttagcatatgtattcctcccaagaatgctcttttgttgatgagatgcagatctgatccggttaagatggctgctttggctaaccggttttgggaatctcctgttcacaaagacagatgtcaagaagaacaagatgaagaagaacaaaacatcaaaacaaaagaagatgaacaactagaggaagtacaggaagaacaagttgaaagagaagccatagaagatagcatttgtgagagagaaacagaaactgctgttgtggccactgaagatgaagaacaagaagggaaagaaagctatgaaattgaaagcagagaaaacctggaaagcaaagaatttggtgaagtagtaaaagaggaagaaaaggttgatgaagaagaagcagcaaatggaggaaatgccattgaagaaggtgaaactttaactcacccagaagcttattcagatctagagaaccttaaaaccgaagaaaaagaggctaatctcgaagagggtaaagaagagagagaaaacaacgatagctcggaactttcttccaccccagaaaccttcgcagcttcagaaaaagaaaacgacggagcagaaccagaaacagacacgaattccgatccggaggaggaagaagagaaagagagcgaaccgaaggaacaacctcagcaaccagacacgaattcggatccggagtcaaaggagcgagaaaacgggtcaaagtgccaagagagagaaagagaagggttgccggagtgcttgctgctgatgatgtgcgagccgaagctgtcgatggaggtgtctaaagaaacgtgggtgtgcagcaccgactttatacggtggctgccggagagacccgccgccggcggcggcagcaagagggtcgccggagaaacgtttacaaagtccaagccgaagccgaagccacctcagccgatgatgcagctgccaaggtcatcgtgctcgttaccggcggcgggaggcagtgccggagtgtcgatggcggcgatgatcgagcagaagctggtggggtccaaatcgggtaacgggtacgagccgtttgtgctcacgcgctgcaagtcggagccgatgcggtcctcggctaagctcgcgccggaggcttgtttctggaacaacaggaagctcgagccgcaccccccggcggctcagcttggagtcggtgcgccggctggtgttgggttctgattttgattgtctttccttttccccaaaatcttaaattttccttctttttttttaattgacagaataatcaattgttgttgttattatgtgtagattattgctaaactttgggcagctcttggtaagttaggattattcagtatactattttgctgtttttagaatgtaatcctttgtataaatagttttagtgatgctatttgtttttgggtccatt

SEQ ID NO: 27357 - DNA, 996 bp, Glycine max
  Clone ID: PAT_MRT3847_124704C.1
cgaagagggtaaagaagagagagaaaacaacgatagctcggaactttcttccaccccagaaaccttcgcagcttcagaaaaagaaaacgacggagcagaggcagaaacagaaccagtaacggtggaaacttcagaagggtcaacggaggaggaagaagagaaagtgatcgaaccgaaggaacaacctcagcaaccaggcccgacccgagaaccaaactcggatccggagtcaatggagcgagaaaacgggtcaaagcgcgaagagagagacagagaagcgttgccggagtgttagttgctgatgatgtgcgagccgaagctgtcgatggaggtgtctaaggaaacgtgggtgtgcagcaccgacttcatacggtggctgccggagagaaccgccgcaggcggcggcaacacagggtcgccgcagaaacgcttgcaaagtccaagccaaaaccgaagccgatgatgcagccaccgcggtcgtcgtgctcgttcccggcggcgagaggcggcgccggggtgtcgatggcggcgatgattgagcagaagctgatggggtccaaatcgggtaacgggtacgagccgtttgtgctcacgcgctgcaagtcggagccgatgcggtcctcggctaagctcgcgccggaggcttgtttctggaacaacaggaagctcgagccgcacccacccgcggcacagcttggagtcggcgcgccggctggtattgggttctgattttgattttttttctttccttttctcgaaatctcaaattttccttattttctttaattaattgacagaataatcaattgttgttatgtattatgtgtagattattatcgctaaactttgggcagctttggtaagttaggattattgagtatactattttgctgtttttagaatgtaatcctttgtataaatagttttagtgatgctatttgttttgggctccattattactcgttagtgaatttataataagagtttaatttctgc

SEQ ID NO: 27358 - DNA, 818 bp, Glycine max
  Clone ID: PAT_MRT3847_124705C.1
ctagttctagatcgcgagcggccgcccgcgatctagatcaagctaggccgcagatctgtagctcatagtggattgctgcctcgggccggtatagcccgccggcgaactccccgaccaaccccttggtatgcgcctctggctcaagcccccgccgccccggccgcagacatcctaccccccgtctgtgggtcctcatcgagcggggccccacgcgtcctgcagcgcttggcctgaaggtgctgcccgcagggatatagctggaacaaaaccagatccaagcctggggaaggcttcccaaatgaaatcccccacaagccagcaaggaagacactatattacaaaagataccgatcacatattctgcaggtttctacataaggggtgaatgtaccagaggagctgagtgcccttatagacatgagatgccatttactggggaattgtctcaacaaaatattaaagatcgttactatggggtgaatgatccagtggctttgaagctacttggcaaggcaggatagatgtccaccctggaggctcctgaagatgagagcattaaaacgctttatgctggtggacttgatgctagggtcactgagcaggatttgcgggatcacttctatgcccatggagaaattgaatctatcaaaatggatctccaacaggcttgagcttttggaacatataccaccagagaaggtgcacaaaaggcatcagaagaactctgcaacaaactgggtattaagggccttaagctaaagctgatgtggggcaggcctcagacatcgaaacccgagtctgatggttctgatcaaact

SEQ ID NO: 27359 - DNA, 2216 bp, Glycine max
  Clone ID: PAT_MRT3847_124706C.1
aattcggctcgagagcatttcgtcatcttccattaaacactttcttctcagttctcattatctctgtctctaactcacacatagtagccaccttgcaatctgtagcagaggataataagtcaccccacctcacaaccaagcaaagctagctagtactacttttagctaaagctctttcatttattgactgtgcttacttagaacaactaccatcccaaaaaatccctcttgtgcttacttagaacaactaccatgacttggcaactctcattctaaaaccaaaagtaaaaaaataaatggaatcagatagagagagaccccatcgcagcacaagtagcagtagcagcacaagcgagttgtttgtttgcttcacttcccgtttgtcctcttcatccatgaaactctcatccaagtccattctcagcccaagccgcagcagagaccctcctcagatttccctctcttcctccctcagcaggagactcaggagcaatggcagcatcaagggtggtggtggtggtggccaagcatctccaatgttcccaaccggtggtggtggcaagagaagaggaggctgtggctttgagaatcctgaaccttcttctcccaaagtcacttgcattggccaggtgagggtgaagaccaagaagcaagggaagaagcatgaggggttggttggagaggcggaagagcaggagagagataggataggtattcctcccaagaatgatcctttgttgatgattgacaaaggtgatccggtaactcacccagctgcttataacgagctagagaaccttccaaccgaagaagaagaaggtaaagtagaacagggtgatgatgagagagaaaatagagatagctcggaacttccttagaacgaaaaagagcacacaccttaaaatgaaagaagagaaacaacaagaggcgctagagcaacatgaaagataagccatagaagagggcaaatgtaggagagagaagagaaattgatctaaccgaaggaacaatctcgaaaaccagccccgacccaaaaaccaatatcgaatccggtgtcaatggagcgagaaaacgggtcaaagcgcgaagagagagacagagaagcgttgccggagtgtttgttgctgatgatgtgcgagccgaagctgtcgatggaggtttctaaggaaacgtgggtgtgcagcaccgacttcatacggtggctgccggagagaaccgccgcaggcggcggcaacagggtcgccgcagaaacgcttgcaaagtccaagccaaaaccgaagccgatgatgcagccaccgcggtcgtcgtgctcgttcccggcggcgagaggcggcgccggggtgtcgatggcggcgatgattgagcagaagctgatggggtccaaatcgggtaacgggtacgagccgtttgtgctcacgcgctgcaagtcggagccgatgcggtcctcggctaagctcgcgccggaggcttgtttctggaacaacaggaagctcgagccgcacccacccgcggcacagcttggagtcggcgcgccggctggtattgggttctgattttgattttttttctttccttttctcgaaatctcaaattttccttattttctttaattaattgacagaataatcaattgttgttatgtattatgtgtagattattatcgctaaaacctaagccgatgatgcagccaaggcggtcatcgtgctcgttaccggcggcgagaggcagcgccggagtgtcgatggcggcgatgatcgagcagaagctggtggggtccaaatcgggtaacgggtacgagccgtttgtgctcacgcgctgcaagtcggagccgatgcggtcctcggctaagctcgcgccggaggcttgtttctggaacaacaggaagctcgagccgcaccccccggcggctcagcttggagtcggtgcgccggctggtgttgggttctgattttgattgtctttccttttccccaaaatcttaaattttccttctttttttttaattgacagaataatcaattgttgttgttattatgtgtagattattgctaaactttgggcagctcttggtaagttaggattattcagtatactattttgctgtttttagaatgtaatcctttgtataaatagttttagtgatgctatttgtttttgggtccattactactcgttagtgaatttataataagagtttaatttctgcattattagct

SEQ ID NO: 27360 - DNA, 1832 bp, Glycine max
  Clone ID: PAT_MRT3847_124707C.1
ctagttctagatcgcgagcggccgcccgcgatctaacggtccgacaaatccgggcccacggaaaatttggatttggattttgctctaaatcacattctttgcttcttttttcttactttcttgttccttcttcagcttggatttttggcgtaacgaggaaggggttattgttgagaaaccctagcctaaacctaaaccatggcgcataggttgctgagagaccacgaggccgacggctgggagcgctccgatttccccatcatctgcgaatcctgcctcggcgacagcccctacgttcgaatgacaaaagcagagtatgacaaggagtgcaagatttgtacacggccattcactgtttttagatggagacctggtcgagatgcaagatataagaaaactgagatctgtcagacatgtagtaaattgaaaaatgtctgtcaagtgtgccttctggatcttgaatatggactaccagttcaagttcgagacacagctcttagtattgattcccatgatgccattccaaagagtgatgttaatcgggagtattttgctgaagagcatgaccgtagggctagagctggtatagattatgaatcctcttatggtaaagtacgcccaaatgatactatcctgaagcttcaaaggacaactccatattacaaaagaaaccgagcgcatatttgcagtttctacattagggtgagtgtactagaggctgagtgcccttatagacatgagatgccatggggaattgtctcaacaaaatattaaagatcgttattatggggtgaatgatccagtggctttgaagctacttggcaaggcaggagagatgtccactctggaggctcctgaggatgagagcattaaaactctttatgttggtggacttgatgctagggtcactgagcaggatttgcgggatcacttctatgcccatggagaaattgaatccatcaaaatggttctccaacgggcttgtgcttttgtaacatatacaaccagagaaggtgcagaaaaggcagtagaagaactctccaacaaactggttattaagggccttaggctaaagctgatgtggggcaggcctcagacaacgaaacccgagtctgatggttctgatcaagctaggccgcaggcatctgtagctcatagtggattgttgcctcgggcagttatatcacagcagcaaaaccaggaccaagcccaaggaatgctttactataacaatcccccacctcctcagcaggaaagaagctactacccatcaatggatcctcaaagaatgggtgctcttgtttcatcccaagatggtcctcccggtgggccttctgggttgggggagaacaagcccggtttggagaagcagcaaatgcaacattatgcccatccaatgatgcctcctcaacctggccaataccatcagtattatccaccatatggttatatgccaccacctcccccttatcatcagtaccccccacctccatacaatgctgcagtggctccgtcccagccaccagccgcaaatcatccttatcagcattctatgcagccaggttcttcacagccaggatctttccaggctgcatctgcgccagctgagactggaacatcaacatcagggtcatagcagcaataagatttgcgcatttactgagcatatttctagttatgtttaattattgtcctaagcttttccccttgagctgaccgtgctgacagggaagatattttcacccaagctgtctatttactatctctgctagcttgatattgatcgccttgtcttgaacaagttattttatgatttgattttgtgcttttgt

SEQ ID NO: 27361 - DNA, 281 bp, Glycine max
  unsure (1)..(281): unsure at all n locations
  Clone ID: PAT_MRT3847_124708C.1
ctttttgtgtttttgcattcttgatttttcggtgtttttgtatgacactctgaatttcttgggctgtgatganatctaganaaagtcatgcaccactctgatgtttcagtgctgatnattttctcatacccntattcaatctgagctcttttcctttaatcnccaccaagtattcttatctttgttttttaattctctgttttaattttttatgtntttcattttttaattaatttgactgcaagtgatgtgtgattcgaaaccaaatgggatgagggaac

SEQ ID NO: 27362 - DNA, 655 bp, Glycine max
  unsure (1)..(655): unsure at all n locations
  Clone ID: PAT_MRT3847_124709C.1
caacgaaacatttgtngccaaccgaaancccaagggaaccacaagccacagcaacaggcaccaccgcccggagcgccgcggaaccatcgcaaacgcagccaccaaaaccaaccccgcctataccactccctccacctgccacaggatcaacccctccacacccgcccccaaggcctaaccctaaccctaacccgagcccaggcccaggcccaggcccgggcccaaatcaagccccgagccccaaaccccccacacccactcccacgcccccccaaccccagccctacccaagcctaaaaccgcgcaacaccaccgccgacgcagccacagttgccgcacagcgcctaccccgaaccgacgaccgcagaaaccagcgccgccccgcctccaaggggtggcaaggcaaacggtgagcccgcgcaccaccagagccccgaccctacggatgcgaccgccggcgggcaacaatagggagggccgggccgcaccgcaaacaacgcacataaacctacagccaaggcaagcacaactcaagtgagaacgccggcgcaaggaaagggggaaggaaagggccccaaaggacgccacagggaaccgggacacagcaacagagggcccgggaagacgtcacttaaaccccccaacctccgccccg

SEQ ID NO: 27363 - DNA, 174 bp, Glycine max
  Clone ID: PAT_MRT3847_12470C.1
tgttcttgttgtgagaagactacagaaggtggaaaaccttcttttgccctttcctctgcataactagaaattacaaattcttcctttcttcgaatccaaatgctgaacataaaaaatcttgacatggactcgaaactatcaaaagagaagaataaaggtttcttcattttatcc

SEQ ID NO: 27364 - DNA, 173 bp, Glycine max
  Clone ID: PAT_MRT3847_124710C.1
ccctcgagccgaatcggctcgagcggctcgagctctgcaattcactacgtacaattcttcgttcgttctctgcagttatatccacctttgagcatcaatggcggacgctgaaaccttcgctttccaggctgagatcaaccatctttgaaggcgcaatagcaacacaatctata

SEQ ID NO: 27365 - DNA, 358 bp, Glycine max
  Clone ID: PAT_MRT3847_124711C.1
atcgtgaagtatcaggccttccttagaagcagagtacctactagttgccctcaaaaaccttaagctgaccaacactttactcgtgaatagcatcacccatgtagggaaccttgaaccccatcttcttaagactctcaaggaaaggggaatcctcaacaggtatcaagctttcaccagtaatgtatgagatgacgtactgccctaccatcatcctggatgcatacaccttgaggttgattatatgatcaccacttttggtggactgatacctgcgcaattcaccaggtcttgaattgctctgaagattccatggaataccatgttctagaatcttagataaggcttcatacaactagtt

SEQ ID NO: 27366 - DNA, 204 bp, Glycine max
  Clone ID: PAT_MRT3847_124712C.1
ccactcgttcggccttttttttttttttttaacaaaataattttattattagcgggctgtggtttaacatttataatgtggacgtgccgaccttaatgggacttttggggccccaccgacatcgatcacaggtaaaccgggaaaggaacactgctaagatataatagcgttcggctgaagaccctggagagaactcagctatca

SEQ ID NO: 27367 - DNA, 351 bp, Glycine max
  Clone ID: PAT_MRT3847_124713C.1
gaacaacgaaggggacctgctacttcaacaccacctacactcactggtgtgcattgacccatggctggattcattaatatcgtactttcaggaatagtgtagctaatgagaaggaagagacggtgcatatgcacaactggcgatctttgaccgtggggattctcttgtggatcatggtaacagcaacttttagccaactacaattcgagcatatgttcctccttatggagttcaatacccacacctgaagacacactggccgcgtttgtaaaggctacaacattcctgacttgattagacaatgactgggggccgaatacacattttcttacttagaaccccacctttatg

SEQ ID NO: 27368 - DNA, 1006 bp, Glycine max
  Clone ID: PAT_MRT3847_124714C.1
cgtacgtcgctcttcattccgctcgagacggctgcgagaagacgacagaagggtacaccacttgcgggtgcgtccatcgtgaaagacaactcgttagggctttagcaggtggaaccaattggggtattgggtcttcatagcatatgtataggtgggagtgtaggcatttgtgttgactgagggaggtcatgcatggcatatgcatgcgatctgattttgttaattttctatgtaatggttctgttttggtaccactggtaccctatctaatatatttgatcttttggccgattaaaagaaaacgatgatctaaataaacacattcatttttctcctgcataaaaacaattccctcatcacctttatatttattaattatactgaataaagtacacattcataccaaaaagacacttgacacgcccaaatggaatatatcctttaaccatgtattcacatatgttgatcttcaacatttgcgagcaacaagcaccacttgatcataattatcgttgctaaacccacttaagaataatcactcaattagaagtatctaaacatgattaaaatgagtattacacaactgataattgagatgggacaggcccatagacccaggcccaacaaggttagtataaaaagaaataaacccgtgtaaaagaattgattcatttttaaataatcactgcatatctttaatagctctgagtccaaccctcacttaaacattagagtgtcttttataagtatcctcttatctgtgacagaaacattaattaatattaatatattcaacacgatggagagagatgggccactttactgagtaaactatatcaaactcttccagcaaggccgtgtgcgatggagactttgcttgtagaataagttcttaagttagttagttggtataagacccattaattaaaaggtgtagctttaagagaaacatcccgtaataaattatagtcatagtacaataaaaggagggactataggcccccat

SEQ ID NO: 27369 - DNA, 281 bp, Glycine max
  unsure (1)..(281): unsure at all n locations
  Clone ID: PAT_MRT3847_124715C.1
gagaatggcaactatgactggtgtgagcntttcatgcnccagggttttcttcaacgcatcagnctcanngcaaaacgcgcatgctgtaaagttctcanttncacacagccaagaannganaacgggtagtatcaagttgggtcgcgtgatgaggatncgacncgttcgagntgcgnctgagcgcatatcggagaaggtggaggagagnaaagnaacgcgnaggaggcgtgngcnggngatccgacgagcggcgagtncgtngcggngtggngagaggtgga

SEQ ID NO: 27370 - DNA, 258 bp, Glycine max
  Clone ID: PAT_MRT3847_124716C.1
tggttggggtcgcttagctcaccatcctcaacttacgtaaaacatggtaattcaaatattaggctggaacattttaaattgtctttggagaaaatttagttgaacctgggttatttgtaaaagttcattttgactctagggtttttttagtccataaacttttccaattgcttgagatgatataatattataaggggtttctggcatagtaaggttaaaagatgtttgatatgtcaacgtctcaaacaggcaaagtaa

SEQ ID NO: 27371 - DNA, 480 bp, Glycine max
  Clone ID: PAT_MRT3847_124717C.1
actcgcgcctcgagccgtaatcgagctgcaaacgaaaatagcgaagctagcagtgaacgaaactccgaagccactgcacagagtggtggcagacaacatcatttctctgttacggtcatgcggaacctgcacgcagctgcaccagatctaagcccagatagtgtgacccacgtaatccagggcaacgattacgtcaccccgagtttcgtcacagcatgggcgcgcctcggcggaattcgccacgcccgcagagtgttcgtcaaaacggcgcaaccaaacggcgccacgtggaacgccacgttccgagggtacgcccaagccgagtgccacctcgacgtggtcgtttcgttcgcgcgcatgcaccgcgccggcgcgttcccgaactgcttctagttccccatggtagtctagtcttgcgcctatgcgaacgccgtgaaagaaggagaacaagttcgctgcgttgtaaccaaacgcgggttt

SEQ ID NO: 27372 - DNA, 605 bp, Glycine max
  Clone ID: PAT_MRT3847_124718C.1
ggccccgccctcttttttttttttttttatttttttttttttttttttatttttttattttttatttttttattttttttgttttttttttataatcttaatgccaaaaaaaaaaacaaaaacggcaaaaaaacgaagcaaaacctaaacaaaaaaaaggccaacaaccaaaaggaaggcgggccacgccggcaagcgggcggacccaaccagggggcacggccccacgggggggggcccgcgaagcgcccgggccccccgccccaccccgcccccccccggggcccggaccccccccccggcccccaagccgcgcacgccatccccgaagaaccccccccccgaaccaaaaaaaacccccacccgcggcggaaggttacggcgcggcaagacctgcaccaggggaccaaaacccccccccccggggaacgggacccaccccacggggacgttgcccacaaccccaaaaaacaccctcaggtccgcgaaacacgcgcaatccaccccggcgcccggggcacccgcgaaaacaaagccctggcgacggaaaaaaacaacagagccgggagcggaagcggggggcgccccagccaagccccggaaga

SEQ ID NO: 27373 - DNA, 126 bp, Glycine max
  Clone ID: PAT_MRT3847_124719C.1
ggctcgagggaactgaagcataattgtcgtacttcaaaattcaactcccaacacacaacatcatggctcatggatatcaacgcctccaccgccggagaaagcaacacagttatcctgacccagaat

SEQ ID NO: 27374 - DNA, 261 bp, Glycine max
  unsure (1)..(261): unsure at all n locations
  Clone ID: PAT_MRT3847_12471C.1
ctgcnatgcatgtgggagctatagaaattatgntngatagtttcgnaagtgcctgacngnaacatagtnggtgcaatgcttntggttgatacttatcatacnaatcntgnnaatgcagttcgtagtatttttgttgcgcctttcagaggcggaaggccnattcgggtggttacatttccgaatagnatcgtgcaggattgaaccaganatgaattnaaggtttcagcttttgagtagcagtagnaaggtggattttgttna

SEQ ID NO: 27375 - DNA, 384 bp, Glycine max
  Clone ID: PAT_MRT3847_124720C.1
ggtggatcggtgccccgaaaacgcatgtttaatgggcaattaaatagacaaaccgtggatccttttatgcgactactactatgacggtcagggattaactaactagcaattagctgtatacttgtttggagaactggaagaccaaactcactatgatctataaagatcataatgctgttgatacctactgataaacgaaacatattaacaggatgttgacattgaatatggacactaatgctctatgggttggacatctacaaacttctatgatgacatgcagatatacttggttgtgacccatatatatagttgagtatttaggaagttatggccttttaaaggttggagctggtctgatgaattatccaaacggtagttaaa

SEQ ID NO: 27376 - DNA, 2021 bp, Glycine max
  Clone ID: PAT_MRT3847_124721C.1
aagaaatattttacttgcaaaacatacttcaacatcatattctgaagcatgaacaattcagaaatattctcaacaacaaaaaagaaatctaggagctttggtattgagtcaataattgaacgagtttatttacacaaccaaaagagagagaaagggaaataatttctcaaagcatcaaaacctttaaattttccaaggataccatagattttcttcgccgctgaagacaacgacggctccctccactccttctacgtcaaatccgtcaaggaaatgccctactacatctccgtcctccaaatcagcgccgccgactccgaggcacccaccgccgccccctccgccatcgacccgatctccattatgtccaaacaaggctgcaaggccttcacggaccttctaagaggctccaaggcccttccatctttcaaggaaaacgttgacggcggcttaacggttttctgccccacccacagcaccgtcagcggtttcgcggcaaagtacaagaacctgaccgaagctcagaaggtttcacttctgttataccacacgactcccgtatacgagtcactgcatatgctcaagtccagcaacgaaatcatgaacattctggccatagagggagcgaacaagtacgacttcacggtgcagagtgaaggggaagacgtgaacctcaagaccaaagtcaacacaacagtgtacatgacactgaaattatcaataataatacagtgtgctaacacttatgtaaatataggaactactttttacatttcaaaaagatagaaactaatttgcaaaaatgagtataaagacaaattcattccaaattacaatacttggcctttgctattaagtgtcaagacttcattcaaatgttttgctaagaatcctatggcaaagtatcagaagaaataatagtcctacttgctctcattgtggggtccacggtcacactcattgttgatcattgcttaagttacatggattccctcccactcccaattataagttcaagtcaatatcttctcagacacaatctgtgaattccgatgctactgccactcagaatctttaccctttttgtccaaacaattatcacattgtccacttctattttgaattcaattcacaccacttcttggattctagattcagggacaacttccattatatgccatcttaggaatttctttctcactctccaaacattagacgtttcttatgtttttcttcccaacactacaaaagtacctgttgctggaaattgtcagcgttcaagttaaacaccttttaatatttagtgttctctacatacactctttcaaatttaatatgctgccattaagctcttcgttagactcttatacttaaagttttcacttccgagttcttagattgcgaagggtagcattcaagatggactctgtattcttcagactggttccactatattagtactcaagatttgttcatttggcctataaaattttcaatccaataaacaataaaaacaatataattttttataagcatcctacatatgcattccattgtcaaataggttaccgtttcattccgacaatcatttttttgatagtgtgtttgatttaatccacactgctagtagatgactatagcaggtttacctggctatttctaaagaaacacaaatcagaagctcctactataattacacagttttatgcctatgtagagaatcaatttgccactaacataaaaagtttctgatttcatagactataaatagaattagctatgacagacttttacaccaaaaggtgttacttatcagttctccggtgtggaaatgacctcagcaaaactccatagctgaaagaaaacatcatcatctccttaaagtggccatatctttacaattccaatcacatgtgcctatctcattttgggggtattgtgtctacacttctgccttcatcaccaattggcttccttcaacagttttgaacaagtctttatttgaacttctttatcaaaag

SEQ ID NO: 27377 - DNA, 256 bp, Glycine max
  unsure (1)..(256): unsure at all n locations
  Clone ID: PAT_MRT3847_124722C.1
acgtatanaaaaagcttctccaaagaatttgaaggagaaagattcattcatgttcatttttnccttttccccttcgtccccatcaagtttctgattctctntttncacttcctttctcttcttcattcttctttctcttttcaactattttctttacatttttcnncgtttncctctcgctttnttcgcgttnactttctctactctgttttacgcattttattaatngttttgttagttaatttngcgattcgng

SEQ ID NO: 27378 - DNA, 238 bp, Glycine max
  Clone ID: PAT_MRT3847_124723C.1
cttttgtgtttgtgcaaggaccagaaggggccaaggagcagacactagtgccaaaaatgataaaagagccacggatcgctcgaggccggaacgcaacgctatagacgaacctagcaaggcctacacagtgagtgttatggaggtgagcacataccacacccccacattggactatataactaatgaaagcacgactgatttgttgaaggaacagacagctagaggattgtatgcaagt

SEQ ID NO: 27379 - DNA, 257 bp, Glycine max
  Clone ID: PAT_MRT3847_124724C.1
ataattttttcctactgctttttataagcccacgtataggggaatatcaggggctcactacctaaataactaccatggttaattggtcattcctggaaaaataactcaatattccaaatacattccggagtttctgcaagaacacaacatgcccaagttatgcaaatcttcttcgtgttaagaaaatagacaacctgtgattacttacggccgaagttacttctctttctttgtttctacctaaaaaaacatattcc

SEQ ID NO: 27380 - DNA, 262 bp, Glycine max
  unsure (1)..(262): unsure at all n locations
  Clone ID: PAT_MRT3847_124725C.1
gaagttaaacacatccttttaaaaannaatcttttatgaagtttttttgaattgatttaaaggacaatgaaataaaatttttttttttggaaacataaaccacaatatttgattttccatccaggctcacaagaagaaaacaaaaggttccatacaacaacatttatgccattagggaatcaatggccatggcaaattacccttttcagttataacagatgaaactaagcttgtttaacaaggaccagccaggatttatttt

SEQ ID NO: 27381 - DNA, 283 bp, Glycine max
  Clone ID: PAT_MRT3847_124726C.1
aactaaacaaacgactctgcatcttattcaactcgggatggtggaaccaacattccaactgtaagccgccaactaggcattacacaaccatcatgcagatggccttattcaacttcacatgtctgtattctactttgatcactccttaccaaaaaaattggcgctctccaccttgttccttcatcaatacaacaaattctctcaacactggtgttttccccattaaacctgccccccattatctatccatttatggaacccctaaccaaccatatccactggc

SEQ ID NO: 27382 - DNA, 456 bp, Glycine max
  Clone ID: PAT_MRT3847_124727C.1
aaaaaataaaaatttaaaaaaaaaaaaaaaaaaaaaaaaaaaaaaaaaaaaaaaaaaaaaaaaaaaattgggcggacaaatttaaggaatgcgggcttctttacgcgggcatgcagactacatagcccttttttggggacccctagttttttttttttgcccgtaattttacaaaaatggccctgggtaaacccctggggtggcgggacttaatatggcttgtaccacatttcacctttattgggggaggagtcccttcttaaaggccctcccaaaacgcatttccccccgcctggtcaaccttgacgggcgttgggaacccgctattggacccgggcattacccccgttgcgcgcactttttccgcgcagcttgaggggttcattggacagggccctatcgccttttcctttcccttttttccctttttttttggcttttttccctcctttttcc

SEQ ID NO: 27383 - DNA, 229 bp, Glycine max
  unsure (1)..(229): unsure at all n locations
  Clone ID: PAT_MRT3847_124728C.1
cggnccggaangaccgagtcgaccgacccgttgtnagaacagttcttagaggactacttttggggtttgtctatcaggaaccaacgggtgggaatgggcggggcttgtgctgttcggtgtcccagactttaaagctccaaaccttactattcaaatgattcctatccagatacttccttcctggataacagaatgcagcttcacagaaagcatgctgtgatgcttttct

SEQ ID NO: 27384 - DNA, 527 bp, Glycine max
  Clone ID: PAT_MRT3847_124729C.1
gcacgcacgcgtacgtaagctcggaattcggctcgagagagaggccggatccgaagggagcggagctgcagctaccggagttggtgagcgcagtccccggccttccgctctttccattacagtacgcacctgtcacgaccggcatcgcgaaggatcagtcatgggactttgcaagtgtcccaagaggaaggtgacgaacctgttctgctttgaacaccgagttaacgtctgcgagcactgcttggtagccaatcacgccaagtgcatcgtgcagtcctacttgcagtggctacaagatagtgactacaaccccaattgccgcctgtgcaatacacccctggccagtcgggagaccacccgccttgtctgctatgatctctttcactgggcctgtatcaatgagcgtgctgcccagctaccgagaaacacagcgcctgcaggctaccagtgccccagctgtaacggccccatcttccccccagctaacctagctggcccagtggcttcagcactgagagaaaagctag

SEQ ID NO: 27385 - DNA, 501 bp, Glycine max
  Clone ID: PAT_MRT3847_12472C.1
ggctcgagtgcaaactcactggaaaaagtcctgaaagaagagatgggttcagaggaaaccaattttccaagcaaaccttcaagaagggtctctcatcatgttcagtctgatgctacaagggaaacaacaactcatgcttggccacaacataggtcaccatcaccaccaccaccatgtgttaaaggtaacaacaacaacaactccaacaatgaaattgatgtgtccatgtcttcaggtgcacaatattgttactacatgttggaggctatgcctcagccagggccaacatggtccacaacaggaccttgtgtattggctgagccaacaccaacaccatccccatcagcactcattgaagattcttcatgtacttggtggctgggataccttgaaggcttagatggcaatttgaccactttgaaattggatcccccatttgtggaaaatgttgtgatggaaaatggtaaggcgccttggttatgaatccactcttgtggatgc

SEQ ID NO: 27386 - DNA, 251 bp, Glycine max
  Clone ID: PAT_MRT3847_124730C.1
ccggccacacgtccgggcactttcagaattcgcatttccatttgcgtcctcgtcggggaacgttatcttcaaatggaaccaagtgttccgaatgtatgttgtttttggcaccacccttgggcatttctttccggcggcttacattcttgggtcgtttgcaaaatcggatcaacatgcacttcctgctgccatccctcacttgttcttgctatcgtttcatctactcaccgacaggattattggtggtttgt

SEQ ID NO: 27387 - DNA, 416 bp, Glycine max
  Clone ID: PAT_MRT3847_124731C.1
ttgcgtcgttccagacagcttcagcacacagcagagactcccttcgcatccaatgtctacgctcttcatcgccctccaatgctgccaatgctccaccatgcaggtgaagcagaagaagaagagcagcaacaaatggaattgcgcggtctgcaaccagaagcaatcggtttgcagagtcttcgcccagggattcatggccaaggagcttcgcaagttcgtccaggacttcaacatgtcccgcaagtccttcgacgacggagaatatccccttgccggaaccctaaatccgccgcttcccgccacggaacacggagacgccgagctcaacctcaaaaagaaaccggaacgattggttcgcgtacctccaccaggaacaacaaccagatcatgatgcagatgatgattttgagcccact

SEQ ID NO: 27388 - DNA, 175 bp, Glycine max
  Clone ID: PAT_MRT3847_124732C.1
cattcacaaagggtgttggaggtctaataagacttgggtaagctctacccccacagtgagattaagtaccaccaccaccctgccaccgggggattctaacttcccttgctttgctacacttagaattttccactctgggaaacatctccatccggaagctgaaaagctttacagg

SEQ ID NO: 27389 - DNA, 547 bp, Glycine max
  unsure (1)..(547): unsure at all n locations
  Clone ID: PAT_MRT3847_124733C.1
cccactgatcgggaatggnnctcccatttcaaccgggccatttttttcagcaatatcaattactatgtggatgtccctttggaattgaaacaacaagggatagtagaggacaagctacagcttcttgttaatgttacgggagcctttaggcctggtgtgttgacagcattggttggagtaagtggtgccggaaaaacaacgctgatggatgtgttagctggaagaaaaactggtggagtcatagaagggagtgtatatatatctggttatcccaaaaggcaagactcttttgcaagaatttctggttactgtgagcaaactgacgttcattcaccttgtttgactgtctgggaatacttactgttctctgcttggcttcgattatcttcagatgttgacttggagacacacaaggccttcgttgaggaggtcatggagcttgtggagctcactccgttaagtggagcactagtgggtctacctggaattgatggtctgtcaactgaacaccgaaaaagattgactatagctgttgaattggttgcca

SEQ ID NO: 27390 - DNA, 246 bp, Glycine max
  Clone ID: PAT_MRT3847_124734C.1
tcgcccacgcgtccgagcaaacacttcttccttcctacctggctgatggatgattgtgaaccactaaactcataggccacctattcacccgcaccgactcgatccgagttccaactcctgagctctaagctgagcacaacctcagtggtaggcctatacgcgtaatggaaacccgttcgaaagtatttccccagggttgcattgctacaaatcagatactataactcaaattcgttcatactatac

SEQ ID NO: 27391 - DNA, 279 bp, Glycine max
  Clone ID: PAT_MRT3847_124735C.1
ctacccgccgctcgatgggaattgcgcttcaaggcgtctcgtagggctaatccgcctcacgagggtcaccaacggcacgtgtcctttggtggggccgagcgccccctactgcttggttcgggcaaacggaacggcgggcggcacgcgtccgcttgctagccccggaattctgaacttaggagggcgttccagtccataattccaacgcacggtagcttccgcgccactgggcttttccaccaaggcgcgatgaccaattgtgcgattcaacgggtcctc

SEQ ID NO: 27392 - DNA, 1155 bp, Glycine max
  Clone ID: PAT_MRT3847_124736C.1
aacaccagaaaataataagattaagacagaaaaaagttcatgtagcagttaagataggaccaagcctgtgagagtacaaagttaagattccctgttacccataacagatcaacaagtacagaagctgagaatcccactggacagtgcattatttcatttcatactgatatcaattttttgtttttttttttttattctaaaatctaagtcacctgaaagtattcccttgatcaaaaagttcagaagaaagccctgctgccataaaacacacgggagttagtgctctttggtgtctgtagcttgtgttcagagctagagtttcctgaactagttggtccactttcaaagtccacaggaagcttcatttttgccaatgactcggtgaattgctgcatgcttttcatgtacatgtctacaaaatcctgctgcaccacattcggctccggctcgatgttaacagtcacaagaggtttagggaacgaggaatcagtctcaccatctttgacatccacatttttctctttggtttcctcattgggagacgagtctgagcttgcagccactgaaggagatgaaaccccatttgttgacacactgctaacactgcatgctgagaagctctccacaagctgaacacctgcttcagaactaagattttcagtatcagtagtggtcaagctatcagaacactggctctcctcacatggaatgccgaagtattccgaaaccatcaagtggtcttcatttacaatttttggatccgggaattcgattttgtccaaatctctgaccagtgactcgcatgattcggagtccttctcggtggtaggcattgaagaaattgccataacatcaggcgaagcaccagtgtaagcaagagacaattgaacataaccggctggagaatggaatagatcagttgaagaaagagagaactctttctctagtttgccatccttcttcaccagtacttcagacaaaggcaccaaagcaaaaccaagcaactgatcttcaagataattcttcaccctgctcagcatccaaatttcacatttggcgacagaatcgacagtcctaacgcttagactaagattctcattaaacacggggttccttcctcctccattgatggtcttggtagagcccacgcgtaaa

SEQ ID NO: 27393 - DNA, 1795 bp, Glycine max
  Clone ID: PAT_MRT3847_124737C.1
gacagaaaaaagttcatttagcagttaagataggaccaagcctgtgagagtacaaagttaagattccctgttacctataacagatcaacaagtacagaagcgagaatcccactggacagtgcattatttcattcactactgatatcagttttcattctaaaatctaagtcacctggaagtatttcccttgatccaaagttcagaagaaagccctgcttccataaaacacacgggagttagtgctctttggtgtctgtatcttctgttcagagctagagtttcctgaactagttggtccactttcaaagtccataggaagcttcattttcgccaatgactcggtgaattgctgcatgcttttcatgtacatgtctacaaaatcctgctgcaccacattcggctccggctcgatgttaacagtcacaacaggcttagggaatgactcattcagcaccccatttgaggaatcactcccaccatctttgacatccccatttttctctttggtggctgaaacttgttcctgactgggagacttggaagcagcaacatcagatgagtctgagcttgcagccactgaaggagatgaaaccccatttgttgacacactgctgggtggagaatcagccttaggaggttggacagattcaacactgcatgctgagaagctctccacaatctgaacacctgcttcagaactaagattttcagtatcagtagtggtcaagctatcagaacactggctctcctcacatggaatgccaaagtattccgaaaccatccagtggtcttcatttacaatttttggatctgggaattcaattttgtccaaatctctggccagtgactcgcatgattctgagtccttctcggtgccatttgtggccaactcagtaggcattgcagaaatcgccataacatcaggtgaagcaccggtgtaagcaagagacaattgaacaaaacccagccggggaatggaataaatcagttgaagaaagagagaactctttctctagttttccatccttcaccagtacttcagacaaaggcaccaaagcaaaaccaagcaactgatcttccagataattcttcaccctgctcagcatccaaatttcacatttgacagcagaatcaacagtcctaacacttagacgaagattctcattaaacacggggttccttcctcctccattgatagtcttggtagagacagaattctcaggattactagtcaagcaaatcttagcataaacatcttgcttgtggtatatgcagatgttatgaatgtccctagcctgatgaatgtaaacatcaacaacaccgatggattcctccacattaaccacggcaccttcctttccattgacttcaatgtccttagacaaaggacccgagctttgtgtgaaaacatcagacctatacttctcagcttcacccaagacagagctcttgaatggtgacacaacagattgtggggattccatgatatcacagtgattgggaaccagacaaagcacaaaaacctgccttaggcccttagcctccaaagtcaaagcggaatgtgttatgtttgtggctctaatttccaggatgaagggacacacacaccgtgttggtgatactggttagaagagaagaaacaaaagcaagctgggctggcttgtttaaaaaagggaagggataatgtgaaaggaaaggagaaaatcgtgtgaacagtgaagaaaataaaaatctagaggtgctgtagtgttggtttatgattttgttgtccccttctgtcgtcttcacgcgtccg

SEQ ID NO: 27394 - DNA, 238 bp, Glycine max
  Clone ID: PAT_MRT3847_124738C.1
gttgtaaaaaaaacctaaattttactgggggggccatggtataggggtgaggctaaaccaagaagttaaaaggaccaccttgggctaaactatctggaacaactctcatatccataattacctcaccctcgaatttatgagtctataacaatgtactatggctgtaacgaattccaattggctggactaattccaatattatggcaggaaggcctggaaaaataagatacaccatgga

SEQ ID NO: 27395 - DNA, 477 bp, Glycine max
  Clone ID: PAT_MRT3847_124739C.1
ggctcgaggggctactggcgctcgctcaggggcgtcctagtcttcacaaacttgagatgagaagggctgtttatctgctcacatgatacgttcactacgctgtggtctgcagacacaatctgacgtatctcttattgtaccttgtgggctgcaaaggatactggtgccatctctcgatcagcacagcgatcgttctggtaagggctcgacccttgtgaacatagaatagagtccttctagaacggtagctacgaataccaatcccgatgacactgtagtggtcgagcatgctgcccatggtcctgcatattaagctcttgcagggcacacatcatatttgccagatactgatggacctttacacactgccacatgcgttgatacctagaggccagagctgtgcatacagaccaaggatgttttgattgtctgctcccatctcatatggtgtctctatcatgcctctctatctatact

SEQ ID NO: 27396 - DNA, 204 bp, Glycine max
  Clone ID: PAT_MRT3847_12473C.1
aagaaattcttgatttataattgcatcttaaggtgcatttggcaataaactgaataaagtgtcaagcaaaccatgacaaagtttgtacacattgtaattggaaacaccggataatagaagctgctaataactgacctaccttaaatgggtgtccttgtgtatataaaatgctggaagaggggcctaaacgtgtgtgtgaaaaag

SEQ ID NO: 27397 - DNA, 219 bp, Glycine max
  Clone ID: PAT_MRT3847_124740C.1
aagaaagcaagataaatgggatcattggaaggaagccatttgcagcttctttaatcaaaaatcccacttgcactgtggccacttcttttggtaccggagcatttgtgaaagcacccccttccgattcccaattccttaggccaggttttttcattccctaaggggagcaacgggcctaattttattaacaaaaaagggttttttgcacccaaggtttac

SEQ ID NO: 27398 - DNA, 321 bp, Glycine max
  Clone ID: PAT_MRT3847_124741C.1
cgatgatgatggagtgccaggctctcctttgcatgagaatcatgagactgacactataatgacaaatgatgatgttttgggtgatgagattcctaatgatcagcaagatgcatttcgtcagttctgctttcaaacactcaaactaggtgttggggccagagggcacatgcaattcccagggtcacatccagtttctttaaacagggagaatttacaactgttacgacagcgttattattatgcaacatggaaagctgatggaacaagatatatgatgctaataactatggacggatgttacttgattgatagaagcttccc

SEQ ID NO: 27399 - DNA, 215 bp, Glycine max
  unsure (1)..(215): unsure at all n locations
  Clone ID: PAT_MRT3847_124742C.1
cgacgactacnacgatgttgggtgtcctccgcagcaaggctggttttctccgccgcctcaccttcctctccggccgcctccggcaccggtcgagcaaggctgctgctgtgggtggacatttggtggaggttgacatggcggtggtcgacttggctctgaaacacttagacgacctaatccagcgcactcctcttcaagaagaacacaccggactg

SEQ ID NO: 27400 - DNA, 345 bp, Glycine max
  Clone ID: PAT_MRT3847_124743C.1
aaaaccaaaaaaagggaatgccatccatctgattaatgtggacagtattttgatcgcgttcaagtcactctctcaaaatggaccacgatacgctcaagcgcaacatcgattgcatataattcctatccgcaccactcacatgcaaaagcgtggctaagtgtgacatatcggcataattgagatgtgcgaggctgaagcctaaggattgctggtactggctagctggccagtgcatgaatccaaactgtgcatttagacatcatcgattggatgggcataatgcagcgtcagtgcaatctgaatttaagcaaacatcattacgtgcacacaatacacttgttcccc

SEQ ID NO: 27401 - DNA, 426 bp, Glycine max
  Clone ID: PAT_MRT3847_124744C.1
ggctcgagtttttccaagttgctgcatcgcgcttgcaaatggaggtttggttcctgtcagtgaagctctgaaggtttgtttcatagtcctatgattcttctttttttttttttttgaatttctaattctctcttgctgtgattccattggaaaaaaaaaaaacggttaaaacgcgattttagatcgtgttttctggaactttttttgttctgtatggtttagataattagaaacttcattggtatatttgtacgagacatttaactgttttacgtttgactctgttttcattccctaatttctgaagtctgtgctaatacatgaaaaattatctatgaagcgtctcagcataatcaattaattataattcttgcatcaaatttatagtaattgtatttatttccctagaagattgaaataaaaatg

SEQ ID NO: 27402 - DNA, 816 bp, Glycine max
  Clone ID: PAT_MRT3847_124745C.1
acgcgttcggagaagacaagtgtgatttgcagtcggattgccggtgtctgtttcgtcgaagtcttcctcgttgtgtgatttgcagtcggattgccggtgtctgtttcgtcgaagtcttcctcgtttctggtttcctgattcgagcatttaactggtggttgggccaatctcactgggttgatccccagtccgaaactgacaactatgagcagcactctttaaaaccatatttcaagtatataaagtttttgaatgaagtaagctaaaagaagtactatggagaccaagcgctgcaacttctggcttcctaacaaaaacagattttgtgcaaactgccctctcaatggctccttattctgtggcaatcacaactcaaggtctcaaggccagtggatcccctgccccatagatccatcccactcggtgctcaagcaaaatctcaaagggcatgttaagcggtgtccattgctgaaacaggttcaatctttgtctgaccaaccgttctatgataaaggcatcaatgctggttctgatggagaggaggaaacatctggggttgatgattcaagattgcccactatgacagtttcttcagaaatgaagaggaatactcttcatgaaatgagtgtggctgaattttgcaatttgattgaaaagatagaatttcttcatgagtcattgtgtaaggatattgaggactcggttcagatgccagaggtttgcagactctggattaaaagagttggagataggaaattgccattttcagagaaacatatatgccagcaggcatctattgtggggaatttggaaaac

SEQ ID NO: 27403 - DNA, 472 bp, Glycine max
  unsure (1)..(472): unsure at all n locations
  Clone ID: PAT_MRT3847_124746C.1
ctccaggatggctgttctcaactagccaaaaccttacccagaaccaaaactgtttccaactattgctcagaccgagtacccttcttctgtaagccactcccaattcgcgccagagcattccactgcaatgaactacccttctgctcaaagctatgatcattgcatgccagaactatccagtgaagttaaaactcagtaccccaaaagccataatcagtttacgacagagttatctacaccaaccaaacctcaatacacttctaccaaaatccatgaccaacccttgccattgccacaacaacctagtgcaacaaaaactccaatacccttacctggaagccatgaccagtttgcaccagtgttatctactgaacctaaaattcagtacccttcaacaaaaatccatggccaacacttgcctcaccagtttactgctacaaaaactcaatanccctcatctggaagccatgat

SEQ ID NO: 27404 - DNA, 112 bp, Glycine max
  Clone ID: PAT_MRT3847_124747C.1
gaatgccaatgggctttaattccctacttaaagggctgcacaatcattcaccatacaacggttgggaattttgttagtccaaacaatattaagtgacggcggggaaagggtt

SEQ ID NO: 27405 - DNA, 266 bp, Glycine max
  Clone ID: PAT_MRT3847_124748C.1
aaccggaaacaaacgcaaacgaaacttgatttcacgagtttctcagaatctttctacttctttgtgcacgattgcgtacgggaaagaaaggcactgactgtgctggtcacagactgcgagagtcattgtgaatcacactcttagtcaatctgcggaacactgtcctatacgatataggactatgtgggagatttagacagcttctgactctttctgagttctttcgagaacttcgagcacaagctggtgaaagctgggaaaagtgc

SEQ ID NO: 27406 - DNA, 397 bp, Glycine max
  unsure (1)..(397): unsure at all n locations
  Clone ID: PAT_MRT3847_124749C.1
aaatatcagagtctcatgaagctccgcgatcgaaatgttcaactgcaacagcttgggaccacattgtatgtcgagttttggacttatttgttgacatgcagggaatacatcggaattactcatcggtgaagctggtaatggcaattacttcacaagaagtgtgctcttcaaaatggagaaccagcggcaaggaatatttngaaaaatggcttcatagcagcgctgcagatacancatgntgataaataaggaatttataagagtggatgtggatggaagatatgctggacaattcttggaaaacctcaaaaatcacanatccggattcatgaaaataattagcggccagnctatcatatatctaaagcctcatatgatatcaatatagatcgcgctg

SEQ ID NO: 27407 - DNA, 205 bp, Glycine max
  Clone ID: PAT_MRT3847_12474C.1
ggtcacgctagatgcttggcttgcgggccacgactgttacggcaaccgagatcattgaaggttccatacttctgactaccaaggtgtaacagaactaaccaaaaattccctatgccggtaccatctcctacaatcactccggcaaacatgggccactctcgtgcaacttagcatcatttgacatgcatgaagctgcttacctcac

SEQ ID NO: 27408 - DNA, 528 bp, Glycine max
  Clone ID: PAT_MRT3847_124750C.1
tactatttgaagatgctctcctgctgtgccgccgcgccattattggggggtccgacgagtccttttattacaacagcccggttaacctatttttgatcgaccgacagagccgcaaacggattttgctcatagtgcaggagcgtgaccgcacattatacgggtgaagttttgttgagcgccgccactacagctatcgagataatgcggacgctaaggttcagggtgccaatagagcacattgtgctcacagagggagacatcaagtgcctgttcaatgtgcagagggaaaggctagacccgcggctgaagaccaaaggcctgacccccaacctaggggggacattgatggagaacaacccattccagggatatgagacgaacccggtatacatgccgcgtgcggtttccaaggacagcgcaaccaaaacatgctattgccaagaagccaaagccgctcgtgatggagagcccgaacgaggcccaccggcttgcggagagggtaccggtcgacgtgaccatacacgacga

SEQ ID NO: 27409 - DNA, 273 bp, Glycine max
  Clone ID: PAT_MRT3847_124751C.1
tcggcttttacaaaagcaatgactatgtcattcaatgcaaacccgtgttctgatgcatgcagtccataatttctgaagcgcaccggatttcactgtgatatcattagagccactggatggcctgccaccccaatgcaggatgctcaggatacaattgattgcttgatccatccatacctactttgcttccaggacctattgcgttttaaatccacactaatcctccagtgtccaacagttgatataaatttccattgccttgatgcaggaatg

SEQ ID NO: 27410 - DNA, 218 bp, Glycine max
  Clone ID: PAT_MRT3847_124752C.1
aattcccggtcgacgacgcgttcgccacgcgttcgaactcttaagaaaatattccaaactcttaagaaaggaaaagtggaattctaagtttcagaaatttcagtttccatttcaattttcggttttctcaaaacccattttcaattttttccaattaatcttattttccacgccaattaaacctaaagaaaacctcggcatttcccaattttccattt

SEQ ID NO: 27411 - DNA, 196 bp, Glycine max
  Clone ID: PAT_MRT3847_124753C.1
gtgagagtgaagcgagatgcgcgaagcgacgtgtatccagacgcgttcgcaaaggcgcttcgacgaacacatactgggccgactttgacaccaagcgcgacactctcgccaatctgctaccaggaaggtcccatgctctctccccagggttaaacgctccacggctgtcatggcatgaatgctggacggacgtgcc

SEQ ID NO: 27412 - DNA, 254 bp, Glycine max
  Clone ID: PAT_MRT3847_124755C.1
ttccaaggaaggtttcccgtcatcactgtatgacgtcctccttctgtgtcagtgagaatgacgtggcctctgtagcttcaggcatttgcgggtatacgcggtgaaagttacatgcccggcaggagcaagagttggcctgcagtacaccaccacccagctaaggtagggagatgttccccataacaacaggagtaaagtttggatggaggtgttggcaacttttgctgcgcatgggaggtgaacatttagttagg

SEQ ID NO: 27413 - DNA, 477 bp, Glycine max
  Clone ID: PAT_MRT3847_124756C.1
aaacagtaagtcttagttgtaatcataattaaccttaaaaaataaacaataatcataaaaaatataatattttaatttattggtagaatttaaaactacaacatatataattaaattagaagtacactttaaaataaatgatatgatttttaattttttaatccatattcttaaaataataaagaagatgaaggtgaatagatcttaaacaataggtgatggcgacgctgggtggtgctgaacacacgcggtgatggtggtggtgaatgcatgacatggttgaggaggcagagaaagagttgggcggacatgaagaagaagcataagcggaagtgaaacgtagaaagaaaatcgtatctctcttcttaagtttttagttgacaaatatcatacacttgggttggaatcactcaaacctaacttcccaaaaaaaaaaaaacattataatttcataattgaaaatcagacgaaaagaat

SEQ ID NO: 27414 - DNA, 338 bp, Glycine max
  Clone ID: PAT_MRT3847_124757C.1
ggcagcagacacacacaccataaacgattcagttcagtcactttcattatcaggttatgtcgtcaatcaacgacattttcggaacgtcaacaacatgcacttacacgatcactatcactcagtctcactctgctgttcatctacctcatgggtatccatgaaatgacacatagacacgaccacggtatcctgcacattgataacctccaccatggtatccaccccagcagctatgccccacagtatgctcagcagcctctcctcatgcatcatgttgggtttcatgacggatgtttggctgaactctgctgctgatgcatgcttgatgcctgcattta

SEQ ID NO: 27415 - DNA, 521 bp, Glycine max
  unsure (1)..(521): unsure at all n locations
  Clone ID: PAT_MRT3847_124758C.1
attgtaaaaaccaaaaataaaccctactttaatgctgagattttttatcaaantaatagactcttcttttattaattcaatcaaatcattaaaatattttttaattctatttttttttttaatttcccctaaaatttcaaataatcaattccaaacccctatttataaccacatcaatacttgttcattatatatttattcacaacttaacaaaaataaactttctcaaaataatcaacaatacatctacccctttcccataattaacataaaattttttacctttctctacaaccatcacaactctttatttataaattattaaacctataaactattttactaatactaataacccccccgtttttataatcaacattccttcattttcatatttttctcctcaaataaaaaaaaaatttactttaacctctaaattttctttttattccaattttattgctataaataaaaaataaaaaacactttcttattatacaactattccttttctcaatatt

SEQ ID NO: 27416 - DNA, 922 bp, Glycine max
  Clone ID: PAT_MRT3847_124759C.1
cctttaaagcggccgctttttttttttttttttttttttttttttggcacatacaaaaagagactattttattcaactaacaaatacattttgagaagcgaaacattgttaaaccataatgattaaatgatcaggattaacatgtcaagcaaaatcaacatgtatttgcacgcatgaaaataaaatgtgaagactagacagtataatgatttactgttgggtcttcacattgacacaaaagccaggacagtaaaattaaaaaacaaatcataggacaattgaactgaaacatgattccaaaaggagactaacaagcacatgcttaattttttcaaggtaaagattagacaaaaagccaatttggagttggaaattaacatctgatccaaatggaggcactgttgtcttatcctcattaccattaagcaaatccttacacttcttctgcctttaaatggggtttgcactcatccaacgctggtgattggatctgtggttggtgtggtgtcttctccttaacatccatggcttcaaaccttccactaatgtccttcattttctgttcaacgatcgacacaagattgttcatatcatccagggtcatgttgtcgctaccaggcagaagcctccctgcatgaacgcaccgatatatgaacatggtcatctccttcttcctgatttccttttgtagtttctttatcttctcttggtgcttctcgatcctttgccctaggaagttgagttcctccatcttcttcagaattcccatcctccttttcctggatgctgccctccttgcagcatcattggagaacgcgattcttacatttgtcccggtcggcatgatggtgaccagaaaagaaaaattaagagaagagttgcttgttgtccccttctgtcgtcttttgccacccgtaggaag

SEQ ID NO: 27417 - DNA, 321 bp, Glycine max
  Clone ID: PAT_MRT3847_12475C.1
cccacgcgtccgaaagacaacggaatggctagcacacacgttaatcccaatcccgagacgggtaccttaaatgtaactgattcccacttcgatctctagatccatcgctacaacgctcaaaccaacagcctatcggacggtcatggataccatgaaccagcaatcagaattaacgaactgaataagcctgttccgcaaatacaagctccacgagatgccatatgatggcctgcacctacagtctcacatgtgaaccagaaaattatgcctacataatcatcttgaaccctaatgtatcagtgtcatcatcaaagagtagtt

SEQ ID NO: 27418 - DNA, 1593 bp, Glycine max
  Clone ID: PAT_MRT3847_124760C.1
atctcggcacgggaaatggagggctcactcctcacttccctcttcccactccccagatcccaaaggagtgtcttttctttttttatcaagtttgttgtttatatttaacaacctagagttaaggattttttttgtgctaattagatttaaggatttttaataatggacataaaagtgctttcttccggagttcagtactcaaatctgccggagagttacatccgacccgaatcggagcgacctcgtctttccgaggtttcggagtgcgaggatgttccaatcatcgacttgggttctcaaaatagagcccagattgttcaccagatcggtgaagcctgcagaaactatggttttttccaggtgattaatcacggggtggctttagaagccgcaaaggaaatggcagaggtggcacatggattcttcaagttgccagtggaggagaagctgaaattgtactctgaagacccctcaaagacaatgagactgtccactagttttaatgttaaaaaagagacggtgcataattggagggattatcttagacttcactgctatccattggacaaatatgctcctgaatggccttctaatccaccctctttcaaggaaactgttacagaatactgcacaataattagggaattggggttgaggatacaggaatacatatcagagagtttgggcctagaaaaagactacataaagaatgtattaggggaacaagggcagcacatggctgtgaactactatccaccatgcccagaaccagaacttacctatggattgccagggcacactgacccaaatgcacttacaattctgcttcaagaccttcaagttgctggccttcaggttctcaaagatggcaagtggcttgccgttagtccccaacctaatgcctttgtcattaacattggcgatcaacttcaggctttgagtaatgggctttataagagtgtgtggcaccgtgctgttgtcaatgttgagaaaccaaggctttctgtggcttcatttctttgtccaaatgacgaggcattgataagccctgcaaaaccactcaccgaacatggatccgaagccgtatacagaggatttacatatgcagaatactataagaagttttggagcaggaacttagaccaagaacactgtttggaacttttcaagaacaagtaaccctttaggtgtgattggcaagaaccaaaataatgctaataagagtattctttatagtttgtttttcactgcttttgccgttttattgttagtgcatttggtgatggcaaattatagtttgttacacaacttcaatatgtcagagtcagacgctcatcatttctcgtgtggtcatattaatatagctgcaagaccgaactgcttattattttgattcatgtggaacaagttacatttcccaagaagcaatcgtactctagtagctttatcttgggaagataaaatggcatgtaatattcatatgttgaaccttcaaaatttcctagcgctgctcatgcattcttggtcatagagaagcgctacggaaaagtatcttaaatttggaactatatttttgtcccaaaaaaaaaaaaa

SEQ ID NO: 27419 - DNA, 294 bp, Glycine max
  Clone ID: PAT_MRT3847_124761C.1
ataacggggcacccaaattcaacctctcaacggcaccaccaaaggcctatgcgacaataacgcataatttgcataaaacttcatatcctctcagcatcaaagataaaaggcactcctcagcgggagatacttgtcaacacaccacacgttatatcaacacacctcatctactgaaatggtttgaaaaaactcattacctaatgaccactggtggagaacctgtgaaagcaaaaacagcactccagtaaacacggttgtaacagaaatctttgggcagtcatgtctcaacaataa

SEQ ID NO: 27420 - DNA, 842 bp, Glycine max
  Clone ID: PAT_MRT3847_124762C.1
cccacgcgtgataaacatttgataagtcacgcgcggcgccatagcgtgtgaatcctaaattaaaccctagctagaggagagggtttaaagctctgaagcttctttcttcttctccaattaagatcgcagagagagatggggagtgacagcgaggcagagaaggagaagaagaagatgcttgcgctcgctcccattgctaaaccccttgccggaaagaagctttgcaagcgaaccctaaaacttgttcgtagagctgccgaacacaaatgcctgaaaagaggagtgaaggaggttgttaaaagcataaggagaggtcataaaggattgtgtgtgattgctgggaacatatcgccgattgatgtcatcactcatcttcctattctctgtgaagactctgacattccttatatttatgtcccatctaaagaagatcttgcaggcgcaggagcaacaaagaggcctacttgctgtgttctggtacagacaaagcctgtaaagggtgaaattgagcgaggggaacaagagaaactaaagtcagattatgatcaagttgtgtcggaagttactgagcttacaacttcactattttgaaacaagcacacatgtatgtgtacagtgtgttctagctggattaacatagtcagcaacctgggcctatattttgtaatttttattcaaagagcaaagaaccaaatgaagtgccatgaactcattatttagtgtaaactcacaatgcagacaagcaagttggcgaagaaattttgcaccaaaaaaaaaaaaaaaaaaaaaaaatcattttgtcatccaaaattgctatatcacctgttttaaaaatttgaggc

SEQ ID NO: 27421 - DNA, 870 bp, Glycine max
  Clone ID: PAT_MRT3847_124763C.1
cctaaattaaaccctagctagaggagaggggttaaagctacaaatcaaattccaactcttgcaagacggctgcgagaagacgacagaaggggaagcttctttcttcttcgccaattcagatcgcagacagacacagagagtgagagagggagatggggagcgacagcgaggcagagaagtcggtgcagaaagagaaggagaagaagaagatgttggccctggctcccattgctaaacctcttgctgggaagaagctttgcaagcgaaccctaaaacttgttcgtagagctgccgaacacaaatgcttgaaaagaggagtgaaggaggtcgttaaaagtataaggagaggtcataaaggattgtgtgtgattgctgggaacatatcaccgattgatgtcatcactcatgttcctattctttgtgaagagtctgacattccttatatttatgtcccatctaaagaatttgttatttatattgtttttccaggatcttgcaggcgcaggagcaacaaagaggcctacttgctgtgttctggtacagacaaagcctgcaaagggtgaaatagagcaaggggaacaagagaaactaaagtcagattatgatcaagttgtagcggaagttactgagcttacaacttcactcttttgaattaagcacacatgtatctactgtttgtttcagctggattaacatgtggtattagtgtgccttacaatcaattgatgtatgaattttattatttttctatcttgcttattattttcttgtcatatagtctaccactgccttatcatttgcataatttgccttgtccaccttcatgattttcccatgaggatgcccgaagcaatcttgatttgaatttgg

SEQ ID NO: 27422 - DNA, 129 bp, Glycine max
  Clone ID: PAT_MRT3847_124764C.1
ggagacgctactggagtcgtctctgctgcctgcggacctgcgtctagactgacccaccgcgctcaagctcggctgtcttatgcaggggagatgctgtcctgccgtctccagtgcgcgctggcctcgctc

SEQ ID NO: 27423 - DNA, 271 bp, Glycine max
  Clone ID: PAT_MRT3847_124765C.1
atttaaatattcagaaacagctgatgatacatgcttaaatgaaacatgtaaatcattagatgcatcctgtgtgccagaatcaacgtttgttcctgagactgaaattgaaaatggaacggagtcaatttctggagcagtgtcttctggccctcttgttggtcctcaggatcaggaagtttctgtgaataatgagttgaaaccattctgtgttcgaaggcgcttaacaaaattgtcgcaaaatccagatttgttggatactgaaatttcagac

SEQ ID NO: 27424 - DNA, 480 bp, Glycine max
  Clone ID: PAT_MRT3847_124766C.1
tacggctgcgagaagacgacagaaggggcaaagtgttcaaagtaatataatgtgatcaagtcttggatcaatgattagtcctgcagtcagtcctttggactgaagctcatgtagataccttgggttccaccagaagtcaaagactctaattaggatgattaaaaaattggactgcacaaactatttattgttaacaatactaacaactagttataaaagtggtagcttcactgaagctcgtgaaaatatcatgggtttcactggaaaacaaaaaactctaattatagtgattaaaaaaaaaaaaaatagtgattataaaaaatgaactgcacaaactatttattgttaacaatactaacaacttgttataaaagtgatacttttgtggagaaaaacatacacaagtataacggagaaaaacataaacaaaaatgattgtttaataaagtggtacttttgtgggaaagataaaattgcagc

SEQ ID NO: 27425 - DNA, 365 bp, Glycine max
  Clone ID: PAT_MRT3847_124767C.1
aataccattcctgcccttcaacacttattccttttttttttttttttacctcttgtcctctactcaaataggaaacattattcgaagctatcaaacaacactctttcttctatcaaccctcagccagggggctttctttcagccaaagctgacgcctttgttcgtcgctcatccttcgcctcagggcccgctgtgcgtcttttgtttctgacaccgtctgcagctctcatgcagggcataccgatcggaaccttctctcaggctaaaagaagccagtgtcttttttgctctgcctatgcttttggacctacccgagtatgacgctgtttttgtggaggcggctaactaagccaacctatatctta

SEQ ID NO: 27426 - DNA, 2252 bp, Glycine max
  Clone ID: PAT_MRT3847_124768C.1
ccgcggtccaatgctgccttgctggtgtgccccagtggctggagcagagaagttagcggactcaaagtcagctccagccagcccagctccaagtgatcaaattgctaaaccagctccttctaacagtggcatcagtgttcagtcagcaggtaaactttattcctacaaagaagtagccttagccccacctgggacaattgtgaaggtagtggctgaacagtcgccgaaaggaaatcctattcaactaaattctgaggtgagtgccatgatagttgcaacaaaggagactcaaaatatcatggcaacaacaaatgatgtggaagattattttcagaaatcaattgatgtgaaacagcaaagccctgtccatcaagaacaagaagaaaaggaaaccactgtggtgaaagataatacagaaacagtaaatagtaaggccaaagatgaggcttttgaagttaaactccaggaagctaacaatgttgccatactagagaagataactgaagttgcaaacatcacagtcgtggaggttgaggactggtggctataacagatatgggaaccgtgttccactgaaggtgccctcagagatacaagtgcaagaaagttgtcaagcaacttcccacgatttgaatcccctaaccattttagttgaaggcaaaaaacagttgttaattgacaatgatgtctctgtgtcgaaagatatggttacggagggagatgagaaacatgaatcatccagtgacaatgcagtaagtaatcctctaccatcagaaggagaaaagcaagaaacagaaacaggaaaggaaccaaccaagagactttctgcagctgcaccaccgtttgatccatccacaattccagtttttggctctgttcctgttccaggtttcaaagatcatggtggtattttgcccccaccactaaatatttctcctttgcttcctgtcagtcccccccgaagatctccacatcagtcagctactgccagggttccatatggtccacgaatatctggtggctataacagatatgggaaccgtgttccacggaataaaactgtatttctctctggtgaaccttaccctgatggtaaccccaacagccctcctagaataatgaacccacatgccacagagtttgtacctggccaacattgggtacctaatggctatgttgtgcctcctaacggatatatggcttctccgaatggaattccagcctcacctaatagttttcccccagtgtcttacagtgttatgcctgtgtcacccagtggatatcctgcttcactaaatggtgtccaagtgaatcaaaatgggttagcaacatctccaaccagttcaactgattcggcacaagttgtatatgttgaaactgaccttgaaaccaaaagtaaaactcttgatgaggaaaataaagattcattttcaacagatgtaagttctgaaaagaagcatgttgtgcaaaatgctaatgaattatctgccagcagtgaaaatccggaagtagaagaaaagcaggaagatctcagccccccatctggttgtagtaaagaggataaagtaaccaacaaggatgcagtagatgagaaaaagccaagcaagtgttggggagattacagtgacaatgaagctgaagtcacaagttaaggaatgataaacttttcttagtaaaatgattaaaaaaaaaaaagaaacatagcgaactgtttccttgcaagatgcctaccgagatacctaaaagtgatgccaaggattgactggactgaggaggtctttgaggcagaactgattacatatgaggatttctgaaaagtttcacccaacttggtacatatgggggttcaaatttatagcgtttcgtgaaggaggtctccgtggccatagaaggggaaggctttgttgcatagctaattggcaatgtcttaaattgttttactttttttctgctacttttcttttgcttattcaaaatggaattctagctttgaggtcaaaatactcttgctcttacggctgataactaggttgcagttgcccgacaataaggcctcatttgtcaggccagtgtttgttttttcaagttgtagaagcagctcttacatcttacaattttgttcatattttgattttcttatggtaacagtgtttggcagtaaaaaaagttttagatggagggatgattttcttccaaaaaaaaaaaaaaaaaaaaaaaaaaaaaaaaaaaaaaaaaaaaaaaaaaaaaaaaaa

SEQ ID NO: 27427 - DNA, 562 bp, Glycine max
  Clone ID: PAT_MRT3847_124769C.1
gatcacagggagggctacatgcctttgtatgtctgtgatttgtaatcttcgaccagctattgattaattgatgttaagggggatttaaaaaaaaaaaaaaaaaaaaaaaaaaaaaaacctggccccccacctctccttctttttccccctttaaaaatgaacaactcccctcttcacatcaacatcatcaccctttcctactgtaaaatactgtcacccccccacaccacccaacatcccaccaccctaaaatcaaaaagcctgcctcctctgccccctaactaacccacattacctcatttgctgctcacccccccaccccccttccaaaaaccaaaccacctctcccccctactgtaataaacaacccaccaccccgaggaaaagacgctatcggactactcttccgctcctcctcttacttaatcaatgaccctctcccctccgttccgctgctccgaacaccatcacctcactactaaaaggcggtactactcttctccacatcatcacgcaactacaccacataacatcatatcagcaacccaccaccaggacccca

SEQ ID NO: 27428 - DNA, 341 bp, Glycine max
  Clone ID: PAT_MRT3847_12476C.1
tgcttcgaacctttgggctgattgatgtgcttgcatggtcgtggatgaatgatcgacatggtcgccagaagatgatcgatagacgtggacgtaagaggataatagaagggcatggtcgtgagaagatgatagatgggcatggtcgtgagaagatgatacgagggcatggtcgtgagaagatgatagaagggcatcgtcgtgacaagatgatagacgggcataaactaagaacaacgccacgacgacgacgcacacaccagtggttcgcccagacgacctaacgccatgcatgtccgtacgtcatgctacattctcctcacaacgctatttaaacctaacct

SEQ ID NO: 27429 - DNA, 339 bp, Glycine max
  Clone ID: PAT_MRT3847_124770C.1
ggttgttcttcctgtacgcatgtgtcctgcttcgccctggcgacgtaggccctgccgtgctactacaaagcgcatcgtcgtggtgacatgggttgcttgaatcatgccgctgttccctgcggccatactggctgtactggcctttccgctccttgtttttgtgaagtgtgtcttcgttggcaaaccccccctctgtccgcctttgggcctctgccgtgcttgttgaaggttctcatctcctattgatgtgagatgcctccttcgctgatttcatgggtgacgacgatgattctttccttgccattatgcctagatcggatgatacacaatgttgctttg

SEQ ID NO: 27430 - DNA, 273 bp, Glycine max
  Clone ID: PAT_MRT3847_124771C.1
acgacatcaactacgtattcgaacaaaccgcatccccccgctattacattacaaaaccctacactaagccctgggctttaccatttctgggcagcgctctattacactatcgcccaatagtaaaaaacggaaagctctacttagtttccacgcacaaataaaacgacgccattttcactaactcaagcgccgtttactacaccgacataaatgacttcaccgccaccgtcaagagactcaccacacgctgaaagatgaactacaatcccgtcg

SEQ ID NO: 27431 - DNA, 630 bp, Glycine max
  Clone ID: PAT_MRT3847_124772C.1
ggattgttgactctacagatgcagatcttcgtcaagaccctcaccggaaagaccatcacccttgaggtggaaagctctgacaccatcgacaacgtcaaggccaagatccaggacaaggagggaatccccccagaccagcaacgtctcatcttcgccggaaagcaacttgaggacgggcgcaccctcgccgactacaacatccagaaggaatcaacccttcacctcgtcctccgtctccgtggtggcatgcagatcttcgttaagaccctcaccggcaagactataaccctagaagtcgagagctccgacaccatcgacaacgtcaaggctaagatccaggacaaggagggtatccccccagaccagcagaggctgatcttcgccggcaagcagctcgaggacggacgtacccttgctgactacaacatccagaaggagtcaactctccacttggtgttgcgtcttcggggtggtatgcagatcttcctcaagacccttacgggtaagacttttaccgctgaagtggagagcttcgacaccattgacaatgtgaaaggcaagatcccagacaaaggaagaattctaccgaacagcagaggccttattttgcttgccaaccagctggtggat

SEQ ID NO: 27432 - DNA, 430 bp, Glycine max
  Clone ID: PAT_MRT3847_124773C.1
gcagatcttcgttaagaccctcaccggcgagactataaccctagaagtcgagagctgcgacaccatcgaccacgtcaaggctaagatccgggacaaggagggtatccccccagaccagcagaagctgatcttcgccggcaagcagctcgaggacggacgtacccttgctgactacaacatccagaatgagtcaactctccacttggtgttgcgtcttcgtggtggtatgcagatcttcagcaagacccttacgggtaagactattaccctcgaagtggagagctccgacaccattgacagtgagaaggcgaagatgcaggacaaggaaggaatgccaccggaccaacagaggctgattgatgctggcaggcagctagatgatggaaggaccctctgtgactacaacatgcagaatgagtagactctgaac

SEQ ID NO: 27433 - DNA, 676 bp, Glycine max
  Clone ID: PAT_MRT3847_124774C.1
agccattctctctgtgtatttccctacctctcccttcaagatgcagatcttcgtcaagaccctcaccggcaagaccatcacccttgaggtggaaagctctgacaccatcgacaacgtcaaggccaagatccaggacaaggaaggaatccccccggaccagcaacgtctcattttcgccggaaagcaacttgaggacggccgtacccttgctgactacaacattcagaaggagagtactcttcacctcgtcctccgtctccgtggtggcatgcagatcttcgttaagacactcaccggcaagaccataaccctagaggttgaaagctccgacaccatcaataacgtcaaagccaaaatccatgacaaagaaggtatccccccagaccagcaacatctcatcttcacctaaaatcagctcaaagacagcctcaccctctccaactacaacatccagaatgaatcaacccttcacctcttcctccatctgcagtataacatacatatcttacttaagacgcttaccaacaagactattaccctacaactgcaaatctgccacaccatccacaacgtctatactaatattcaatacaaataatgaatgctcccataccagcacaatctaatcttcctctagaaacagctcgaatactaacgcaccctatctagatacgac

SEQ ID NO: 27434 - DNA, 505 bp, Glycine max
  unsure (1)..(505): unsure at all n locations
  Clone ID: PAT_MRT3847_124775C.1
gctgatcttcntcaagaccctcaccggcaagaccatcacccttgaggtggaaagctctgacaccatcgacaacgtcaaggtcaagatccaggacaaggaaggaatacccccggaccagctacgcctcattttcgccagaaagcaanttgaggacagccgcacccttgctgactacaacattcataaggagagtactcttcacctcgtcctccgtcttcgtggtggcatgcagatcttcgtttagacactcaccggcaagaccataaccctagaggttgaaagctccgacaccatcgataacttcatggccaagatccaggacaaggatggtatcctatctgaccagcaacgtctcatcttcgccagatagcagctcgaggactgccgcaccctttccgactacgacattcagaatgaattcacccttcacctcgtactacttctccgtggtggcatgcagatcttctgtaagacccttactggctagactattactctagaaatt

SEQ ID NO: 27435 - DNA, 790 bp, Glycine max
  Clone ID: PAT_MRT3847_124776C.1
agcctacccccactaaaggaattagtcctgttcatcaaaagaagccccaccgaaagtctcttcctccgcaactgacttctgaaaagaccaggtcatccaattctgcgtctgtgaggacctcatctaaggcagtgaatggtggtaaaaactccttatcaagtgtaacaactgaagttaccaccttatccaatccaagagaggaagagaaagttgaaatagctgcagccactgaagagaacaatgtcttattgaatgagccaagtaaagctcttcctctgaatatagagccagatgaaacagaatctcctgtgaatggtgatttagtcattcaagagaaaccacagctcaacatggcgcaagaacccatagcagcggagcactaagcaaacagcaggaacagaaccaaatattaactatcagatcaattgatcgtctcatgaatgttatagaagcatatgactgagagattatttaacaatgaaaggcttgcagaatttctgtggtttgcgatgtcattttgtcttaagcagcattgcttcctgtgtttgctcctaaagcttgctggttttgtccttatgattctctcctccttgcagcaatgtatgtaactattttccaggttgttctagttgatgtttattttaacgtgtaacatttgtctgtttagttaatatgttggcgaaaattttgagaaaagtttgccattggtggctcaatcacattttggaacaagccgtgttgtggacactcttcatgaaccatatgattgtgttagctttgctttgtgttt

SEQ ID NO: 27436 - DNA, 526 bp, Glycine max
  unsure (1)..(526): unsure at all n locations
  Clone ID: PAT_MRT3847_124777C.1
ggtttcccgtcatcactgtatgacgtcctccttctttctcagtgaccaatgacccccgatatctcatgtaattcccacctagatataagcgatcgcccagcaccgagtatcgtacagtacagtgctacgcttaactggcgaactactttgtatttgtaagctaccaacgtattttaccttctcatcaacttcgtcgcaggtgtattctgataatctaggcttgttcatcagaccgggtcnttaagcgttagcccatggtagcgtgtaccacggctggtcgctggctgcacagttgtacgtaagattccacggtcataaccacaaggaaggatcgaaggaagggtacgagaggaggaagtgatggttgaacgtgtgcacgccacgcggagtgtcataggggtagaggagtagcggagagagcggcagccaatcatttgctggaaggcgagaaggatagtaacagtgcgttgccatggcaccagccgactacgtgaggggcacgtcggagaagaaatgaggtggggag

SEQ ID NO: 27437 - DNA, 579 bp, Glycine max
  Clone ID: PAT_MRT3847_124778C.1
aacgtcaaggccaagatccaggacaaggaaggaattcccccggatcagcaacgtctcatcttcgccggaaagcagctcgaggacggccgtaccctcgccgactacaacatccagaaagagtcaaccctacaccttgtccttcgtctccgtggtggcatgcagatctgcgtcaagactctcactggcaaaaccataaccctagaggtcgaaagctctgacaccattgacaacgtcaatgccaagatccaggacaaggagggaatccccccagaccagcaacgtctcatctttcgcggatagcaacttgaggacgggcgcaccctcgccgactacaacatccaaaaggaatcaacccatcacctcgtcctccgtctccgaggtggcatgcagatcttcgtttagaccctcacctgctagactataaccctagaagtcgagagctccgacaccatcggacacgtcaaggctgagatacaggacaaagagggtgtgcccgcagaccagcagaagctgatcttcggacggcagcagctcagagacggactgtcccttgctgactacaacatacagaaagggtca

SEQ ID NO: 27438 - DNA, 2380 bp, Glycine max
  Clone ID: PAT_MRT3847_124779C.1
cttcacactctctcaagtctcaaccttctctctgttttcctattattatttatattttatttcatttttaagaataaaaaataatagataaagcatcagcatcagcaacatcttctaccacagtttgaatctttcggatcttgttggtcggactcggatcccccattcctcagatctctgaacccacgatgccattcggctcttgacagtgacacttcaggtgacaatttctgggaactcgtcaaaatctcttttttctttctctccccgtgtcaagtcttgggcttcagttaagatggtagtgaagtagttgttgttgttggtcttgatttgttttctgctgcaaaatggagttttcttaattgttcctcattgggtggcactcttttgggatgaaaggtttgttcttggaaatggtagtgctgtggagaatgccaatcttgcttgtgtcactatcccctgatttgatttgctcaggtccactcttcctattttgatgatcttagcttgatgatggatccaagcaaccttttgccagctgatggacttgaagaagtccaccaaaatggtgttcatgacgaactgtctaattctggaaaggatgatattgcttccaatgtagaccctggtgttaccaaaattatagaaactgccgctacaaatggaaattttgaaaatttcatccagtatgatagcactgcaactgattaccaccttatcgaatccaagggaggaagagaaagttgaaatagctgcagccactgaagagatttctaaggaagaggaagagacaagtaaagatcggacagagcaattaaaagtaggaaaaggtcctgcaaagaataagaatgcaaagccaccaagccccagagcacgtcatgcaagttcacaagaacccatagcagaggagcactaagcaaacagcaggaacagaaccaaatattaactatcagatcaattgatcgtctcatgaatgttatagaagcatatgactgagagattatttaacaatgaaaggcttgcagaatttctgtggtttgcgatgtcacattctgttaagtcaatggagaagacgtgttcacaattatcgcagaaagattttgtccttatgattctctcctccttgcagcaatgtatgtaactattttccaggccgttcctcgcggggtgggtgttcacccaaaatatggatctgtttagttgtgtgatgagcgagctgagagaagaaaagagttctacactaagcttgaggaaaagattcacgcaaaggaagtggaggagagtaacttgcaagcaaaaaccaaggagaaccaagaagccgagattaagatgcttagaaaaagtctaggatttaaagcaactccaatgccaagcttctaccaggagcctcctcctcctagggcggagttaagaaagatgccaactaccagagctaaatctcccaagcttggtcgcaagaagagttcaataaattcagagccagaaggaaacactagcaacagtgctcgacaaggtcgtttaagtctggatgagaaaatgtctcagactaaccccactaatggcattagtcctgttcatccaaagaagccacaacgaaagtctcttcctccacgactggcttctgaaaagatcagttcatccaattcagcgtctgtgagaacctcatctaaggcagtgaatggtggcaaaacctccttatcaagtgtaacggctgaagttaccttatccaatgcaagagggaaagagaaagttcaaatagctgcagcagccactgaagagaacaatgccttattgaatgagacaagtaaagttcttcctgtgaatggtgatttagtcgttgaagagaaaccacagctcaacttggcacaagaacccatagcagcggagcactaagcaaacagcaggaacagaaccaaatattaactatcaatcggatcaattgattcatctcgtgaatgttatagaagcatatgactgagattatttaacaatgaaggcttgcagaatttctttgtggtttgtgatgccattttgtcttaagcagcatggttttgtccctatgattctctcctcctcctccttgcagggatgtatgtaactattttccaggttgttctagttgatgttattttaacatgtaacatttgtctgtttagttaatatgttggcgaaaattttgagaaagtttgccatcggtggctcaatcacagtttgaaacaagttgtgttgtgaacactcgtcatgatccatatgattgtgttagctttgtcttgtgttatgcatcgattttcagctctggattctaccttgtaaccgcatatgcatgtgctcaagcacagtcataggcaactcaagcaaaataagtacttttacttttatt

SEQ ID NO: 27439 - DNA, 1784 bp, Glycine max
  Clone ID: PAT_MRT3847_12477C.1
ggtcgtggcagacaaaaatgagagagtgaatgatgtctgggagcacaagaagggtggagttggtgctgaagaacaggttcctgagttacttgatctggcaatccatacattcctctctcattttcatctctcttctctctttttcctcacctcactacccctttctctcccttctcctcttcctcccttcccatcttctcttctccaccaccctctccttcatcgtgtccccccacccccgccctcgcttcaccctctccctcctcttcgccttctccgccgccttctccgcctccctctccctctcctccgtcgcccccgccgcccacggtctccccggcgtctcccgattagggtttaggggtttcctcgtcggttccctcttcggttcgcattacgtcttcaagcgccgatgggttcttcacttccccatcattcagcgtcctccatttttcagcttcaagatgggagttccttcttctgctaggcgagccttgaagctttccattgttgcttccgttttctctggtattttgttggagcttctgccgcatccgttcaagtacagcgtcgccaccggaagattcggcaccgggcagattacctcttttgctgccacttttgctatctttttttcttgggaattgactcatcatttgcattgggttttgcatactaagaggtccatatttgcacctccaaaaggatcggcagcggcagaaacaaatccaagtgagcatctactttcagctttggaggagagtagtcctacttctcttcttcggtatcttgcatatcttgatctctgtatggtttgcgagaacaatgttgacacttggaggcgtgcgggattttttgaagaaaccggtgagacttacaaaagagtaattgctgtgtgcttgaagccgttggagcatcttgcaacaaaattaggtgaaggcttaggaaatcctgttgacaaagccactcaactatcaaatcagctgttgtccccaactgatgcacggccagatttgaagcacatagaagaactgcacaactttcagctatatgcgtggtgttcaaggactgctgtctcactgactgcctgctcacgtaaagacgacaagtttggggttgctcagctttctgggagtaatgctgcagtggtttcaacacttctatcctgtcttcttgctgttgagagtttcatgggaaagaaaacaaacctgcaatccccaaatcagttattgggacctgctggtatcaaatgggcgactgtgaatagtggaagagtagatgttgctgctggtaaaagaagaagtgggccagtaaattcaaaagcttatgccattgctgacgttctcaagacttcaatctaccaaatagtctctgcattccatgatgagatgttggctggtgctaaagcaagtcttctggagaaggactgggtcacaaatgggaagccactttttggtactcgtgagatgcttatacaaaaattacgtcttttccttgattttcgagctacctaagtgctgcattgtactgtggtttgaatgctactttcctgaaattaaacattcttgtaagacattatacacacatgatgttttcaagtgaggatatagatgcaatggaagaaaaaggttcagttttgctgttagaaaatagagatgaaggatattaatttgtcgagattttgttgaagatgcctgcattggatggtaagtgatcatttggttatttttttgttgacaagttttttagggtacttaaattttgatgagtttggatgagctttt

SEQ ID NO: 27440 - DNA, 392 bp, Glycine max
  Clone ID: PAT_MRT3847_124780C.1
tttttgttacgaacgggatgagtatattaagaacgaaaatggccatcaggccttacatcatcctaaacaaaatcaccaatctgaggagggacatcctcaatccaataggattcaaaaaccaaaaaagaagaatttgaatggaaagtagaactctataatctttgatgatacctacaaagtagttgttagaattggagtttctagaggcccaagcagaaactaaatgaagacaaacagactcaaaaaccacaggatttagtattaggtaaccaacagattcaatagcccatctaaacgccactgcttcagcaatatatatatatgaacctcaacacaagtgggcaaagactttgtagcagcagccatgacttcaccaaactcatttctaaaaa

SEQ ID NO: 27441 - DNA, 1158 bp, Glycine max
  Clone ID: PAT_MRT3847_124781C.1
ccgcgccaggagtttggaaggaccttaagagagaacattcttccagctacctatcattaactaccttatctagttcctcgggtgaattgaggttccgtcgtccttgtaattctactaattcattttgatattttgataattctcgtacatccacgacaaatttcaagtaacagaacagacttccaatacgggcattctcacgtcaataaacagcaataacaacaaatcataacaatgcgcaaaatcaaagtagcactcaacaataatcgaaacggtgttttgctatgatataagagaacgacgaggtagacacaacaaaaaaggtgatagaaacagatggttccagagataaagaagaagagagaaagtggaggtgtatatcggagggaaggatactcaacaataatcgaaatcgtgttttcctatgatacaagggagcgaggaggtgcacggaattggatccctgagcgcaacaataagaaaatccccaaaaggaaccctaggtggcggaaattcaagtagcatagttatagcaagagtaataatactaaaaaaagactcaataatcgtcatcactcaaacatcgatttagaaagaaagaaaagaaaagacaaaaaaaggagatagaaatagatccttcctagcacaagaaagaaaacaccaagtttatatccgagggattgattaaccgacttatctgcaagggtgaaatctcaatcgcgattcttcaagcgttcgagacgctggttcaagtggtcgatcctgacgacgaggttggtgacggagtagaggagccagtagaagaggagtgcggcggcgatgaggagggcgttgcgttggctcttcatgatagatttctggtggcgaaggtgctcggaaggggtgcaggaatctccctcacagctaggcctggtttcgtacttccaatatatgtccatgaaaaggaacaggcagaaaggcaccaccgagaggaacggcttcagaaggttccgggtcaccgcgatcagaccctttcggagagcttccaggcccgggatggtgaggagaataaccattatggcctctgcggccgcgacgtaccctagcacaacccactctagcgccatcagatctccgcttgcttccctctcgacagttttggaattcccgtatttttta

SEQ ID NO: 27442 - DNA, 621 bp, Glycine max
  Clone ID: PAT_MRT3847_124782C.1
gcagatcttcgacaagactctcactggcaaaaccataaccctataggtcgaaagctctgacaccattgacaacgtcaaggccaagatccatgacaaggagggaatccccccagaccagcaacgtctcatcttctccggaaagcaacttgaggacgggcgcaccctcgccgactacaacattcagaatgaatcaacccttcacctcgtcctccgtctccgtggtggcatgcatatcttcgttaagaccctcaccggcaagactataaccctagaagtcgagagctccgacaccatcgacaacgtcaatgctaagatccaggacaaggagggtatgctcccagaccagcagaggctgatcttcgccggcaagcagctcgatgacggacgtacacttgctgactacgacatccagaaggagtcaactctccacttggtgttgcgtcttcgtggtggtatgcagatctttggctagacccttacaggtgagactattacacctgaggtggagagctccgacaccattggcaatgcgaaggcggtgatccaagacagggaagggatcccaccggacccaggggaggcttattcttgctggcgaaccgctagaggatggaaggaccc

SEQ ID NO: 27443 - DNA, 564 bp, Glycine max
  unsure (1)..(564): unsure at all n locations
  Clone ID: PAT_MRT3847_124783C.1
ggttccattctctctgtgtatttccctacctctcccttcaagatgcagatctatttcaagaccctcaccggcaagaccatcacccttgaggtggaaagctctgacaccatcgacaacgtcaaggccaagatccaggacaaggaaggaatncccccggaccagcaacgtctcatttttgccggaaagcaacttgaggacggccgcaccctngccgactacaacatccanaaggaatnaacccttcacctngtcctccgnctccgtggtgggatgcagatcttcgttaagaccctcaccggcaagactattaccctataagtcgaaagctccgacaccatcgacaacgtcaaggctaagattcaggacaaggagggaatccccccataccaacataggctgatcttcgccgggaagcaactcgaggacggacgcacccttgctgactacaacatccagaaggagtcaactctccacttggtgtagcgtatacggggtggtctgcagatttacgtgaagactcttacgggtaagactattaccctggacgtggagagctctgacaca

SEQ ID NO: 27444 - DNA, 1125 bp, Glycine max
  Clone ID: PAT_MRT3847_124784C.1
gccccctttttaaattcccacaaagcgcaaaaagggatttttttaaaagagccaaatttttagaacccccggtgttttcccccccagcgtgtttaaaaaggccggcaataaatttataatgggggcgccaaaaaaaaattgacaagtttagcaagcctcgatgaaaatatatttccacaaaaaagcgcgcccaacatttttttttcagttgagaaatcccatttttcctttcagttttgttcattttttttttaagttttgtttttttttgtctttttttttttttttttttattttttttttatttttttttttttttttttttttttattttttttttttttttttttttttttttttaggtgggatattagaatactattattaatgggacacaattgagttcaacacaaaccgaacttattttcaagggatattattacagacccattaaacatcaaagttcttcaaatgttttgtgatcatttccggggtttcacaacgagcttaaaaaccccccacaaaaacagaggacaaggggagggggtgattccttctaagatgttgaagacagcgagggtccttccatcctcgagctgcttgccagcaaaaatcagcctctgctggtccggggggatgccttccttgtcctgaatcttggccttcacattgtcaatggtgtcagagctctccacctcgagggtaatagtcttacccgtaagagtcttcacgaaaatctgcataccaccacgaagactattaccctagaagtcgaaagctcggacaccatcgccaacgtcaaggctaagattcaggacaaggagggaatccccccagaccagcagaggctgatcttcgccgggaagcagctcgaggacggacgcacccttgctgactacaacatccagaaggagtcaactctccacttggtgttgcgtcttcgtggaggtatgcagatgttcgtgaagactccttacgggtaagactattactctggaggtggagagctctgacacaattgacaatgtgaaagccgagatacatgacgaaggatgcatcccaaccgaccagcagaagctgatatatgctggcaagcaggtcgaagatgggaagaccctcgctgac

SEQ ID NO: 27445 - DNA, 789 bp, Glycine max
  Clone ID: PAT_MRT3847_124785C.1
aggctcattgtgaatgccttgtcttgcagctgcagtacgcaggtgagtgccctcactccctcacccacttgattgctccagccagatgagaatatttgactattcaaaatcgtatctgcctccggttccaccaaatcattgaccttgccgcggcaagtgtcatattgtcagataatcatcataggtaaggttagggtgcatgaaggtatgcttttgattttaagatagttaccagtacaatctaccctaaaattacatgcatccatgacttggttgcttttttcaaagctatgttattttaatattagtccttccagaatccacctccttaacctctatgtactcggcattttcacgttatgtgaaaatttgtcaaatcaaggctcattgtgaatgccttgtcttgcagctgaagtgtgaagggtgataaggcatggtaatacaaactctcttcttgcagctgatattcacacacttctccaaacactttattgaaccagattgcctacaatagttggagattcatctgcgtatgtgcttccaattgcaacaaattagtgaccctcatgaagcaagtttcttcattccatttgttcatcactggcaatctgagagcacattaagctatgcattggttttttaatttgtaacttgtaacatctaataattgattatgtaacgcaatgataatcatttgtatttgtaagttttttttttttttttttgagttttatcagacttgtactctttatggtatatgacaaaggggttataatgtatattctttca

SEQ ID NO: 27446 - DNA, 1126 bp, Glycine max
  Clone ID: PAT_MRT3847_124786C.1
cccacgcgtccgacggctgcgagaagacgacagaagggggcacttcaattgcaatcaaattagttcattctctttgcgcagttccctacctctcctttcaaggttcgtagatttcttctgtttttttttcttcttctttattgtttgttctacatcagcatgatgttgatttgattgtgttttctatcgtttcatcgattataaattttcataatcagaagattcagcttttattaatgcaagaacgtccttaattgatgattttataaccgtaaattaggtctaattagagtttttttcataaagattttcagatccgtttacaacaagccttaattgttgattctgtagtcgtagattaaggtttttttcatgaactacttcagatccgttaaacaacagccttatttgttgatacttcagtcgtttttcaagaaattgttcagatccgttgataaaagccttattcgttgattctgtatggtatttcaagagatattgctcaggtcctttagcaactaccttatttgttgattctgtggccatagattaggattttttttcacgaaattgcttcttgaaattacgtgatggattttgattctgatttatcttgtgattgttgactctacagatgcagatcttcgtcaagaccctcaccggaaagaccatcacccttgaggtggaaagctctgacaccatcgacaacgtcaaggccaagatccaggacaaggaaggaattcccccggatcagcaacgtctcatcttcgccggaaagcagctcgaggacggccgtaccctcgccgactacaacatccagaaggagtcaacccttcaccttgtccttcgtctccgtggtggcatgcagatcttcgtcaagactctcactggcaaaaccattaccctagaggtcgaaagctctgacaccattgacaacgtccaggccaacatccaggacacggagggaattcgcccagaccaccaacgcctaatcttccctgaaaacaactctaagacggccgaccatcgccgacaaaagattcagaaaggatccaaccttcactcttgtctccctcctcgaggggggatgcaactctcccttcagacccccaccgccaaaactatt

SEQ ID NO: 27447 - DNA, 146 bp, Glycine max
  Clone ID: PAT_MRT3847_124787C.1
ccacctcggaaaaaattcaagacactgggtggctttaccgacgtaccgacacaggggggtatcaaaattctcgctttgtgtgaaacacacaaaaaaatgcagttggattggaggggtaggaaaacaagggtttggactgactatta

SEQ ID NO: 27448 - DNA, 399 bp, Glycine max
  Clone ID: PAT_MRT3847_124788C.1
tttcggtgacccccgggcagacgcctcgtggatgatcggtgcacacattaactcggctaccggtaggttctaggattcatgggtagcatctcatccagcatgtaagatagaggcccttagctgccaggggaattctgtggagaggaggatcacagaagaggaattagccggaatgagcggctacttactctagcaggcatcacaatgaagccaagcatatggctgctacagaggaagagtagagcctggtccatgcaactgaagaggggtttgcagacgcgaaggctgtggttggtagttaggccaattctacaacgcagtggatgattgaaccgtggcacttatagactaaacaggctataaccaggtaaggctgtcgagggctgattgcaatgccaa

SEQ ID NO: 27449 - DNA, 302 bp, Glycine max
  Clone ID: PAT_MRT3847_124789C.1
ctaaaccaagggcacagcataatctgttgcggagggaaaaacatttggcttctagagtgcatacctagcttgggtcccccccggggcaaaaaaattaaggcacccctgctttggcctcacgcatggttaataacccggcgggagccaaacaatttgggcccccaattgaccttatttttaggcataagggtggagccatgaattccccctttccaccttttataaacgggtgatttggacccttggacccccccatttttttgcttgggccaaaggtttttgggtaatttcccttgtcaaga

SEQ ID NO: 27450 - DNA, 721 bp, Glycine max
  Clone ID: PAT_MRT3847_12478C.1
cggggggcacaagtccatttgtgtgtcgagaaagctctattcgtgggacgaagatgaaggtccttgttttcttccttgttacttttttggcagcatggcaatgccttgcgtacgatatgttccctgctccgaatgaacactgtctatggtgcccgtactcctgaggctgaaatgctcaagttaggatgcttgctgagcaagcacacagcactctttggctttgagaccattcctgagcagtgcagataaaacaacaaaggagtacatacatggtgaacaatatggatgacactccaacagagctaaccaacatacttacttttatgccagagaccttgatttccatcccaaggacacgatttgtgttcaatatacatggcaccgaactctgtaatattccatactacagaaaacatggatttggggtggataaatttatcttgaccttgcttgatgaatggaatacacatggtcgatgcaccggctctgtgccgagactcttaatatttacaacaggctggtgattcttggcttcaagattatatatttgccatgaagaacactggacatgcagaccgccacagaagcaaagttaaagaaagctggctaccacacatggcagagattgattctgatggatccacaagatacttgcactccaaatgcagtttgcatacagaacagcagcgagagaagaaactgattatgcagggatacaaca

SEQ ID NO: 27451 - DNA, 506 bp, Glycine max
  unsure (1)..(506): unsure at all n locations
  Clone ID: PAT_MRT3847_124790C.1
ggctcgagcaaacccgcaatttcacttcccctcttccaagagccaccggatcctgcaattcctctctctattagggtggtgcagcagtgatgggcaaattccagcttcgtctatattggagggtttttaggcagagggagtagattattggaataagggagacacatggtgctttgatagcttttgcgaatttgttttatctttgactgcgttctgaaaatggaaaatcctgacgttgaaaagtctgaagaaaccaatagacaaattgacagtaacacaaaatctaattctaaacagcagagcgtagagaaagctaatgaacaccctgattggttacctgatggctggaacgtggaagtcagaacccgtaaaagtggtgtacacatggngatctggatatnaagtgttacattgagccattgaaaggatacaaattcttctccaaccggaggtattacgatatctcgaaactgtaaaggacaacagttgcacttccaagaggggaa

SEQ ID NO: 27452 - DNA, 331 bp, Glycine max
  Clone ID: PAT_MRT3847_124791C.1
aaaaaaaaaaaaaaaaaaatttgggtaacttccggtcctttacaagggaacccacaaacaagggtaagggggttctgtcccattcccttattattctcccaaacaaaaaaaaaaaaaaacaagcttactttactacaacgttttaagaagcaaatcccccccgaagaaaaccaagaaaaaaaaatgggggggccaaatttgcggggggtgggatatccctcgacatcattcatttggaaaaaaattcacgtttgggacaaaaaaaaaatttttcggcgcttaaaaaaatgcgggggggggagcaaagggtgcaaaaccctacctgccaaaa

SEQ ID NO: 27453 - DNA, 428 bp, Glycine max
  Clone ID: PAT_MRT3847_124792C.1
aacccaaagatttaagggcttgattaaacattgcagcgcatttacaaaaggcaattttttttggaaatacccgttgctcaatttgggtacaactgttctaataactttggggtttaaaacatttccctttagggaaacgaaaggaccttccccttgccaaaattcataaaacaggggagggggacctaacctttcttgtttacttttcaacaaaaaaaaatttctaacaatacgggtttttttttaacaaaagggggcctattttttgccctcattaataagccttttcccaattataaactacttaaaaagctggatccaacttttcctttttctttgagccaccttttttaccagaattttaagtttttttcccaaaaactttagctttaacagttggagacaaaaaacttgaactcgattcctgg

SEQ ID NO: 27454 - DNA, 382 bp, Glycine max
  unsure (1)..(382): unsure at all n locations
  Clone ID: PAT_MRT3847_124793C.1
ggagagagaatttcaagttttaataatagttagtggcagagatggatgctgcttcnaagatgggatgtgagactgagcagcttcatcacctctctctttgattctcttcaaccttcagtaccactttaacaaactggtgccttttcttagttgcgctgcttttaaaaagtctgatgggttcaagattcccatctcatcagctcagtaatggcctgtatgtatcaggccgccctgaacagccaaaagaaaagactccgacaatgagttcagttgccatgccctataccggtggtgacatcaagaagtctggagaactaaggaaaatgtttgatatccccatggatggctctaaatctagaaaatccggtccaataaataatgc

SEQ ID NO: 27455 - DNA, 395 bp, Glycine max
  Clone ID: PAT_MRT3847_124794C.1
cttgggggggggggggggcgtttgtgaggagaaatagctttgattgtattttgagccacaagcagtgtaaaacttgtactaatagtggtataagacacagactgttgtataggacatttagttttagcaaggccaacacgttggttgggtagccttaacactaacaatgggccaagtaatggtgtaccaaatgcaggacctttagaaataggcggtttgtgtcgtcggagaattcctaaattagatcagtgattagatcttagcataactagggtactattactggggcgcctacaagagccaggccgaccgaataaggcacaacttgtagccgggttaattatactagttgtagtgcgtgtattagaaattgtagtacgctgtatagcaagcaa

SEQ ID NO: 27456 - DNA, 2045 bp, Glycine max
  Clone ID: PAT_MRT3847_124795C.1
ctttctctctcacttttttttttctctttctctttctttccctctcacaacaccacttcacttaacaccaaactcaacttcaagcttcggttttatttccatcctcaaacgtatctttccattttttgacatgttcctactttccctggtcctccaccaccctctttagccgttcaaaaataatcaacgtagaagaagaagaagaagcataagaggaaagaaagagaagatctttgatgacccactttgctaaaaaagagaagatgatgatgatgctgaccacaactggcacaccttgctgctcctaggaactttgtaacacactacactacactgcacttatcccgtgtccgaatcctcatgtgaatcacgcacaccccgggattatcgggtacctcaaactccttcacacaaattttctcatcaccatgccctcttgtcattacaccaccaacaacaacctcaacagcaagactaggaaacgaggttgttcctcctcttcctcttcctctttggtaagaagataccgtttcaagagagctattttggttaggaagaaaggagggtcgagtactccagttcccatgtggaagaccaaaacaagttcttctccttctgttcctactcaacaacaacaacaccacacgaagcctttgttgcattcttctggctccatgttaccctccaaggacaaggagctttctgtttctgccagaaaactcgctgctacactgtgggaaatcaatgatttgcccccttcgagggtgaagaaggagttcgaggttgatccaatgagaggctgcaaggagaaggttagaagcagagagaagaagggtgtgggtttgtccagatcgggcttgttaaggccacagatgtcagatccatctcatagtcctgcctcagagaggatgaaggggcttgaagggggtagctgcaagagaagagtatcgaggttttctcatcagcttctgtctggtgattactatttggatgctcttgatgctcatagcagtgccaattttattgaggaggtagaaaatcagctccgaagcaagaagaatcgcggtaaacccacgcgtcctattagaaaccgtccgctgagcttgaggactttatgaggactaaagatggacaaaatgaggatgtttctcccgaaagtaaaaagataaggatcttgagtcttatttcaaaaatgtctgtaggggattccagaatgaagagaaggaggatgattcggatgttgaaaacgatgtagggcatgagggagatgatgattcagatgacagtgatctccattccattgaattaaacatggatgatgacagcaaaggctacaagtggagttttgcttgtgaaaatgttgctcaagataagaggttttcaattgacaaagaaagtatagggaggaagtctttctctgagaaaattcagtggggaagtatttgcttcaacaaggggacatcaagtggtaggaagagggacttttctataaatattcaggaagtttctgatcattttgatcctgataggtcaattgaatttctctcacaagctctgatacaagatgataaagatgaaactcagagcaataggtctaatcaggggctccacgacactatgtcatgtgccaattcggataagagaaatagtctactattaactttgcagtgtgctggtggagaagctggggaaaatgctcttgccctggaggttgacaatttgaagcatgaagttgcaggaaaaaatctggatgttaagaattttgatagtgttagttagtaacttatttttatcatagatagcttaaactatttctgttctaaactgtaaatgctgtctttgatgagttaaatatatgtccaaggctcatatcatcgttatgtgtggtaattgttaaagccatagcaagaaacatgtacatattgaatagagccacatactgcagttttgtgctagctacccctggcatctgaagtgcaagtaaatgttcctatgttttttatttttatttttggaatcaaagaccgtatcaagggatttacaat

SEQ ID NO: 27457 - DNA, 406 bp, Glycine max
  Clone ID: PAT_MRT3847_124796C.1
ccatggtcgcacactaggagtattatctttgacctgtgacaaggaatctgcccgtgcgcttcgtccttcattgcctgtccacattaaagtcgattgtagcgatgcacatgccctggaacgaatttctaagaaataaggagaccacatagctacgtttatttctaaacctatgcagggtgaagctggggctatatagactccagatggctatataaacgctgttttagatatctgctccatatataatgtcttgctgattgctgatgaaattcagactgggttcgcaagaacagggaaaatgctggcttgagagtgggaagaactccacccatacattgtcatactagggacagcattgggtggaggagatatacctgtcattgcatttgttgcagcaaagatgata

SEQ ID NO: 27458 - DNA, 489 bp, Glycine max
  Clone ID: PAT_MRT3847_124797C.1
tacggctgcgagaagacgacagaagggggcgaggcaaggcaatagcctcatcctcttcaactcagagagagcgaaacgaagcgtctaaggttaaaaaaaactaaaaagggaaccacaaatactaccaccaggtttctctctatctattcctcactctagtctcttcattgctaattgtctgtaacgcttacatattttgattctttcactcactttgttgttgcgtgggctagatttcagcgttctcgtttctactctttattttaatgcactttgttcttgtgtttggaattaattttatttcttatgccatgtgattttcggtgtttttttggtttctggtgtacgaaacttgaatagtttgcaattcattcctaagatcacttggcaattcgatagttttttttttgctggtctggtattttcttatatatatttttaatatcttgggccttctttgaacttgccaaactcttccggtgttttttt

SEQ ID NO: 27459 - DNA, 415 bp, Glycine max
  Clone ID: PAT_MRT3847_124798C.1
gaataggacttggttccatgatgtgattttattgtacgtacatttgttattttcaatgaaactcttattcagttagatattttctcatatggttttgtgcacatatttatttatttcgagaaaaaatcattcggtttagatatagaataaacatatggtttattcattaagttgagagctagtgttgagagacttgatatattgtggtacatggaagatactactcatcatcagaggacctatcgccacgactcatatattatgtttcttgttatggctgatgttgagttaaatggaccaagtgggagaatgttggaagcgcacgttcacttccacgtcctttttttattttattttattattttggaaaatttagttatttctgaatctggtccatttttcatccacattcaac

SEQ ID NO: 27460 - DNA, 478 bp, Glycine max
  Clone ID: PAT_MRT3847_124799C.1
tggtcttacccacgcgcgcgcttacgcgtgcggacacccgaacgggcactcgtgcggtctgctgagagatgactccaaattgtggagctagagtgaagagcgaagagaacggctcccaagggcgaatctttaggctgcttatgcttgtcagactgcactgaaccgttgtgttgcggaggataacagacttgttgtgaactcctacaaggaaacatgccctcaggctgaagacatgatcaaagaacacgtgaagcttctatacaagggccacaagaacactgatttctgctggctaacaaacatgattcatgactgagcatgttagagatggtgatgcttcactgtggctggactccccatgaaggagctggtttgagacggatacatatagaagctttgggttgagaaattgcaggtacattgggaccatcaaataagctatggaaagggaatgccccagagttgtaacctgtgctga

SEQ ID NO: 27461 - DNA, 237 bp, Glycine max
  Clone ID: PAT_MRT3847_12479C.1
tgttgaacctttccaccacaatcggattagggcatgatgaaacctacctaaaagggaacaaaatctttgaaggttgggtcacagttgtgatgaataacggcatgtggttgagctttggtgtgataggtagcaacttgtggtgttttgacggtggaggttgggtcaccggagtttgcactagtggttatggaggacagggcggtgcagtgggtttggattatggtgtggtgtttgaag

SEQ ID NO: 27462 - DNA, 112 bp, Glycine max
  Clone ID: PAT_MRT3847_1247C.1
gtaaaattatgggccactggtatggctacgttactcctaacgctgtttctgatttgttggacccacatcttgcaaagggagaggtcaccaaacgacttttcaggggccaaat

SEQ ID NO: 27463 - DNA, 361 bp, Glycine max
  Clone ID: PAT_MRT3847_124800C.1
ctgtaatcgagttcttgaagattgcagcgctactggtgagagctggatcatgttacgctaggaactctgtgttggctttttcataaaaatgcttgtgggctattagatcgacaatatgatgtaaatctctctaccttggtcagctggacatttttttctagctcggccatgaagaatgatcccggattaggactaagtctatgtatgagagggccaccaagtcctgtaatggatgaaattcaatactatgtgaatcacattatataactggtttatcttttaggttaacttatggacccctttgggtccattcctccaaggaaggaaaagggccgcccgctttttagggggttggcccccc

SEQ ID NO: 27464 - DNA, 274 bp, Glycine max
  unsure (1)..(274): unsure at all n locations
  Clone ID: PAT_MRT3847_124801C.1
tacggctgcgagaagacgacagaagggtgaatacaaatacaaagaagggaacaaataacaaacaaaaatataaagataaagacccctaagtggagtctatcaaaagcttctccaggatggcctcagtgggatagttccacttgccaacagctattggatccacagttaaaaagagaaaaaaacattaatcttgtaagggtanaagggttttttcataaatctaatcattctgtttctactctatttctcttcaaccaaatcacctatatttctt

SEQ ID NO: 27465 - DNA, 327 bp, Glycine max
  Clone ID: PAT_MRT3847_124802C.1
tgctatacggccttatgctatgttttatgcaatgaacaggttgtatcgggtggcgtcaacatcacaccgcgggcgcgtgtgctagaaatattaccatgttcattaacgtggaacctgatatatttgaagggatatcaagcggctatattacatgaaggatttggtggggcattatattgacgtattatacaactcttatgtactggtggtaatattcggagcatgcatgagcctaaaatttgcaaactgtgcagtatcaaccacacattatttttctcttttaccagtcgcattataatgttgttgtgaaccgacaaagatttaata

SEQ ID NO: 27466 - DNA, 715 bp, Glycine max
  Clone ID: PAT_MRT3847_124803C.1
gagggtggaaattgaagaagaagaagagaaagaaagggaaagggagagggatcagctttctattttgacccttttgattgctacgttcaggaaatctttgattgggtgcagcaccactacaacttcttcttcttcttcttcttcttcttccatggagattgggtggccttccaatgtgagacacgtggcacatgtcacctttgatcgcttccatggctttctcggtttgcctgttgagttcgaacccgaagttcccacgcgtccgcccacgcgtccgcccacgcgtccgtctcaagactcttgttgtgaaggcattgagagaaagagaggaatctattgtaaaatcaaatcctgttcctgaccttaattcttttgacgatgatgggaaccatagcaattcagaaatgcttgacaaggaggacagcgaaaatggaaatgattgtagcgatgacgatgaagatacagtgtttgtcactgcagagccttctcaacaaagccctagtcatcttacagaagatggttgtgaaactgaaaccgcgaccaaatccaaaagtttgccagcatctactgagaactatatttcaagtggaaataggttgctggttgacagttgtccttgcaatcttgtatctcaaatttgctctttggcaattggacttcaagactgtggcctcgctaccggcagacaaaggggatccagcaaaatttgcggagc

SEQ ID NO: 27467 - DNA, 2256 bp, Glycine max
  Clone ID: PAT_MRT3847_124804C.1
tgcctgctctgtcgtttcctgttctaggcgtccgcatgattcatctccgaagggaggcacagtaatgatggtcacgtctcaccttccgagacccttttcttgaaggaaactctactccaccaaaaccttgccttttcttggtgaagaagaacaagaagaaaaataccaataataacaacaacaataataataaatatattattgttgttattgttattaaaaattatgacggaagtgcttcagttgccttcatcctcaagctgttcgcgtcggccatgtggtggtctcacacccaatgatgggtcgcacccaattccccttattaacgctcccactgtggaagaacaacaaagtgtggaaattgaagaagaagaagagaaagaaagggaaagggagagggatcagctttctattttgacccttttgattgctacgttcgggaaatctatgatttggcaggggcctactacttcttcttcttcttcaatggagattggggtgttcccgaatgtgagacacgtggcacatgtcaccttcgatcgataagatggctttctcggtttgcctgtggagttcgaacccgaagttcccaggagacctcccagcgctagtgcaaatgtttttggagtttcaacagaatctatgcagctgtcttttgatgcaaaaatggtatagtgttcctacaatactgctgtgaatgcaaagacatttgtatgcacaatgaggtgcataatttctgatgtcataatggagagctgctgaaaatggtcaagaggagtttgtgagggaacaattaaacagaggcatagtaccagatggcattgatgtgcactgctttgcaggtctcataaaggcttggtttagagaactaccaactggggtattggaccctctttcgccagagcaggtgatgcaatcccagtcagaagaagaatgtgctcagcttgtgaggcttcttcctccaacagaagctgctttgctagattgggcaataaacttaatggcagatgttgctcaaatggaaaacttgaacaagatgaatgcacgcaatattgcaatggtttttgctccaaacatgactcaaatggcagatcctttgactgctctgatgtatgcagtacaagtcatgaattttctcaagactcttgtggtgaagacactgagagaaagagaggaatctattgtaaaatcaaatcctgttccagaccttaattcttttgacgatgatgggaaccatagcaatccagaaatgcttgacaaggaggacagtgaaaatggaaatgattgtggtgatgacgatgaagatacagtgtttgtcactgcagagccttctcaacaaagccctagtcatctcactgaagatggctgtgaaactgaaaccgaatccaaaagtttgcctacatctactgagaattttatttcaagtgggaataggttggtggttgacagttgtccttgcaatcttgtatctcaaatttgctctttggcaattggacttcaagactgtggcctcgctaccgggcagacaaaaggggatcaagcaaaaatttgcaggagcaaaagccttcagttgagtacttatgatacagacaagtgttccagaaaggtgattgagcttccagtaaccggagctgcagagaagaactgtggaatggcaattattgagcgcataaattcgagaacagagttggctgaagcctggcgttgaaaggcatctgatccttttatcttgctgtccgagggacaggatgaaaaaagaaaaatggtactcccataatgtttctgcaattgtgattttcagtaaatatggaccccttatgagttgcataattgctgatgtcataatggagagcatccatcgtccatgtactgggagcactcacataagctccttttgggaagggaatggaaaggacaaggtgtaaagggaatggtctctatttgtgtttccacgtttggaaatgctggctactggtttggtgtgtgtttttctgttattgtttctgggtgagttgcttaaccatgtttcttaattctatgtcattaaccatgcagacttctaacgtttttctttctgctcctgaagtatagaatttaacgaattcaaagttgtttgtccgctttgttcaacacatttttgtattgatgtttaacagtttaagggagagtgaaatggtttgaacagatgaaacatgatggagtgaaatagaaaataaataccattttaatgtatggatattcttatggcgttttggg

SEQ ID NO: 27468 - DNA, 1117 bp, Glycine max
  unsure (1)..(1117): unsure at all n locations
  Clone ID: PAT_MRT3847_124805C.1
tcctaccggttccaaaaaaccaacaaaaggggccactaacctttggcacaaacacacacccatcggcggcatccttatgcgggcgaactctanctacctgagcacanatttgtagccatgttggggaagaggccccagccgcggattggaaaaatctgcgaattattggtctcttgcgactgcaccaccaagctttttgatgccctcggaagaagccctagaagcccgtttgacatgatgaacttgaagatgcaatcaccaaagggtcttaaaagctatgaccttggtggtgtaggtctaggaattgtggtggcccttgataaaaaatcatcatccgaggaacaaggccatgacgttgtgcccaaacacgccgttatttgcacgtcaaattcaaaccgatccgtaccaatcccagttaaaaaccatcaagggtttcaaaagggtgtgaatgaaattcccgttggaagctccgaggattacacgtttgtgacataccatgtacctaacaacaagaccatcactaaggtttattatgatggcggtgaacgtggaattctaacacatggctgctataatattaacaacaacaacaacaacaacgttggtgttggtggtgttagaagaatcccaccaacgcaaactttaaatattgaagaagatgaaccgtcatatcccacctcggattttctcagctcgtgtcacttgtgccgaaagaatctccatggcaaagacatttacatgtacaggtacttacaaattcatattccaaagtccttcttgctcaaaattcgatcattttatttattatttattcaattttttttagttatgggcaaggttttaaaaaagggtcggcgaccgtgatttgggcaacgcgataaaaccacaattgatgatatttaaaaccttggttatgggatattaagttggactaatgatttattttgtattcgggtgtttacagaggagaaaaagcattttgtagcaacgagtgtcgttcaaggcaaatatcaatggacgatganacgcaaggaacggtgtagatcagaagcttcaaggtctgggggagatgtcaagttcaccatatacagcaagggaccaaatgttttcaactggg

SEQ ID NO: 27469 - DNA, 1275 bp, Glycine max
  Clone ID: PAT_MRT3847_124806C.1
tacggctgcgagagacgacagaaggggacaataatctttggcacaaacacacacacacccatctcctccatccttgttctccacaattctagctacctagcacaaaaattgtagtcatgttggggaagaggccccagccactgatcggaaaaatctccgaattattggtctccggcggtcgtgccgccgtgcttttcgatgccctcggaagccctagaagcccgtttgacatgatgaacttaaagatgcaatcaccaaagggcctaaaaagctatgaccttggtggtgttggtctaggaattgtggtggcccttgataaatcatcatccgaggaacaaggccatgtttgcacatcaaattcaaaccgatccgtaccaatcccagttactaaccaacgtgggtttcaaaagggtgtgaatgaaattcccgctggaagctccgaggattacacgtttgtgacataccatgtacctaacaacaagaccatcactaaggtttattatgatggcggtgaaggtggaattctaacacatggctactataatattaataataataacaacaacaacgttggtgttggtggtgttagaagaatcccaccaacgcaaactttaattgaagaagatgaacagtcatatcccacctcggattttctcagctcgtgtcacttgtgccgaaagaatctcgatggcaaagacatatacatgtacagaggagagaaagcattttgtagcaacgagtgccgttcaaggcaaatatcgatggacgatgaacgcaaagaacggtgtagatcagaagcttcaaggtctgtggagttgtcaagttcaccatacacagcaagggatcaaatgttttcaactgggattgttgccctttagcgtttaatttctgtcactgtagtagagactcatatatacattgaagtttgaattcacatcatataaggctatactttgtgaatgaaattaagacaccttagtggtgtaaccatatgaaaattttggatcggaaaaagtggtagagattttgatgtagttgaatactaataagagctttcttcttctttgttttatcttacatagaagaattataaatttgcggtttcaattgccgatttagtttgttctgtttccttctatccttttactctgtacttttttttgttttttagtttgctttctgctgtgttctgttttgaggtcaagtcttttaggaaacataataattttttgatcactttgttcaatcagctttaacaagtggcagttcataatt

SEQ ID NO: 27470 - DNA, 320 bp, Glycine max
  unsure (1)..(320): unsure at all n locations
  Clone ID: PAT_MRT3847_124807C.1
atggtctagctatctcgatcgaactgtccaaggtcctgtcacaggtatggcattgtggtgttcctgggcggcccagatggctagttgtccagcgggacgtaacaatgaggttggtgttaggggtatgttatacattagcggccatggcaaccttaggattatgcctgctgctactgtagacgctggcgtgtatgacgagtagtgggccgtgataatgagggggttgaataagggtaatctcctgtgctcgtgggtgagggtatgtagtggttaaccagcgccgggagaaatacccncgggacgtgagccaggttagtggg

SEQ ID NO: 27471 - DNA, 388 bp, Glycine max
  Clone ID: PAT_MRT3847_124808C.1
gggttctagtgagtgattgattgttggtgtaactcgttcttcttcttttaacgctctgagatcgtgtttggttcttctctcacctaaaaaattctagctgcagtggtaactgtggttgcggaagcttcttcaagggcttctacggctgcataggcttcaaaacatactctgacttgagctacactgagttaactaccacctagaccttggttatggtagctgcacctgctaatgctcaatatgaagttgctgaaataggcgtgcccgataagaacgattgctgcaaatgtggaccaaactgctactgcaactcctgcacttgcaagtgaggtgttgggagagcaagcttaaagcagagattggccctaattatgaataatgataaact

SEQ ID NO: 27472 - DNA, 406 bp, Glycine max
  unsure (1)..(406): unsure at all n locations
  Clone ID: PAT_MRT3847_124809C.1
aggcaccggcccggaaggaaataccgggccgacgagcacacnttttggccgccgcccgccccnaaaaaacangggggggctaacaaaaagaagaaccggccgggaaccccccanccaaaaaaaaaaaccaacacaccccgcggaaaaaaaagcaaagaacaccagggcacaccacccacacacacaaacaccaccagcccgaaaaaaagcccgcccacaaagcaaaagcaaaacaccgaaacacaaaaaaaggggcagaagcagaaacccacaaacagccacaggcaaaaaagaaagccgacccaagagccaacaaaaaaaggcccgggaacaaaaagaacacccacggggggggggcaaacaaccaagccaagggaaaaaggacggcaaaccaaaaccccacccc

SEQ ID NO: 27473 - DNA, 538 bp, Glycine max
  Clone ID: PAT_MRT3847_12480C.1
ccacgcgtccggaaaaagagcgtctccgtacacgacttctattatacgatatacgaaagctaaataaaatggcgtttttcatgtacgaaaaagagaaagggcaatcgtgatacacattgatcaaacagaaaaagcaagcgcgaaaaatgctctgactgtgcactctctaacatgcgcttcagcactgctttggcctcactgggctaaacgccaaccgatgatactgctacgccagcagatgatgcttctcttactttctttactgatactgatgctggaaagcacgtgccacgtacagcgtttgtagatcttgaccccactgctattgatgaggtgagaaccgaaacttaccgccatcttttctcactagagaagctcatcatcaggaaacaagatgccgtcaacaactttgcccatgggcattataccattgacaaagagattgacgatctgtgcttgaaccgaatcagaaagcttactgacaatctgcactgtactccaagggtttatgatcttcaaatgcgttggtggaggaact

SEQ ID NO: 27474 - DNA, 767 bp, Glycine max
  unsure (1)..(767): unsure at all n locations
  Clone ID: PAT_MRT3847_124810C.1
acagctaggaattcatcctttatatacaaaagagctccagatatcacccctgcanaaatacacacccaccgatcaatcaaaatacacacacacaaataagagcaaaaacataggaatgaaaaaagatggcggagaaataaaaaaacatancaacgagataaaagtgaaacacagggacatttcatcgaatagatagaagggagtaaatcatgcaaacttgcgaagatttattttcatatctccttatctaaatgctattcaaaatagagcaaagatgtttaagatgtgaacgaccactggctcgaactcttccggcagccaaatcggcaaaatccgcggcggcactgtcgccacatcgacgacggagatcccagaagaaggcgaaacgacacacaattttcctctctgagcgacgatttgttcggctcctatgagtctctgagacggactatgcattttcagcaagggtcatgattgagcatgtcgcagatctcgatgttcatggcccaatcaggccctatgagcatgtcgctcgtggcacgttccaccatggaattcaccatcttctccggtcaccggtgcgattcgaaactctcaacgagatcggcgattctccgacgaccataaaccgaaccatcggtgcaatcggagaacatgattccgacaccgcacgctctttctctctctgtctaaagaaatgaagattgacgcgggagtttggtggattccattgctgagggaaaggtttggaatgggcggacgcgtgg

SEQ ID NO: 27475 - DNA, 341 bp, Glycine max
  Clone ID: PAT_MRT3847_124811C.1
cccacgcgtccgattgcagcatatggaatgattcttatacttacatgacgcatgcatttggtatgttcacttccagttgtatcttgtatgtttagataaactcttgctatttgacaaagaaaaaatgaaataaatttaaccacttgtggatacttatctggaacagggagccttgttcttttattgttttcctttggctaaaatgtaacttttgatcctctatttttgcaaatgtgtaatggtagtcctattgttgattgagacatttgtctccacttttaaaaatcctactttaggtcctatttttaatgaacatttgtcccacttttatatctggatta

SEQ ID NO: 27476 - DNA, 626 bp, Glycine max
  Clone ID: PAT_MRT3847_124812C.1
gatcagcaaaaatataatatattgatataagtaccagaggtactaaaaaagtacagaggtagagccaaagtcatggttccaaataaaactaaagcagtttgaaaaggaaccatagcatggctacaaaatacaaggatctggtacagctcctaataagagccactgaaacctaaaacaaaaaaccttctctgatgtgagttgaccattgattaaaaggaagcttgaaatctttgtccaagtttgagagccatgtccacactaaaaacactgcatcatcaacaagcttgctaccattaaaggattcattggagaaaataattctgtttctcatcttccaaatagaccaaacaacagccatccaccaagattgccaccttcctcttcttataccttccacttgcacaaaggagtgttggagaaaatgctgaatcggattagatgggaacacactagtgatattcaaccatgatgtagtctcccaccaaataggctgaatctttgagcagtagaaaaaaagatgggaagcctcctcctccattcctgctatgacattgaacactgcacattcagtcggcctctctgggatcacaatatgtataggggatccaaaatggtggattagcagt

SEQ ID NO: 27477 - DNA, 390 bp, Glycine max
  Clone ID: PAT_MRT3847_124813C.1
ggaaacaggggcccaaaatttataaaacccccaaaaaaaaaaacaacaaagggaagcctttaacaggacttggggacccccagttgaaacaacaaaaagggaagctgggccccctatttaaaccccttttattccataaaaaaaaaaaggaccaccctaaattgttgaaaggggaaggaacccctgaaggtaacccaggggataagaaacctaaaaggccctgctttccccttgggggcccccaaggaaacccccccatgggcccccaaggaccccaacaagggggaacccccgccttataaatttctctctccctgcggttttgaaaaaaactgctttgggagggaaaggatcttggggacccttgaaaataaattttccccagggggg

SEQ ID NO: 27478 - DNA, 237 bp, Glycine max
  Clone ID: PAT_MRT3847_124814C.1
tgagaattgtgcgagagggtagacattagccatgatgtacaaaggtgcagtggtgagttgatgtgttaatctggtattgctcttcggtggttctaagtagatacaaaaattgtcattatctcatttctgcatatttggtttgggataggagaaactaagatttaagacattggttgctccgttagagtatattgtttcgaagatgaggtgttgtaggtgtgctgtattagaggggag

SEQ ID NO: 27479 - DNA, 629 bp, Glycine max
  Clone ID: PAT_MRT3847_124815C.1
gcttttcttggggctttccttgcccttttgagggctgtgattgcatgcaccatggtggttggccgagtagtcaccacactcccacatgggccaggttgctaccctgaggaacaatcgcatgctatgctgcaatgtgtggaaattctgaaccttgggaacctgcgcccaaagggaatgatcaaccactggcgaaccctgattcattgtacccgacgaaggcacgaaggtcaccatcattctgcacaggctggataagggggttcaatgggttgagacacggaggcgacactgtataaaatggggtcttcagctacaacctgctgggaggacttgtaaacttgtgaaggattattggtgtagcagttgtatttactagatcatgtaaccgtgtgcatgtaagagaggtgaatcatgtgttgcaacaaatagctgtgaagaacctgtgtgttgtaccatacagaagaaggggtttctgacactgagattgatatcagatcgatactgtgtaataacataagggacactgtgtcatattgatcaccagtcagtatgccgatatgcacttgaaccttatttataagatctattagtattgtagcttaacctagcaccttgtttgggttcacgga

SEQ ID NO: 27480 - DNA, 784 bp, Glycine max
  Clone ID: PAT_MRT3847_124816C.1
atgacacgcatgtatttttagttgagttgctggtgggaagcctgcttttaaaaagcctccctccgtctgacattgaagtacgatttgtcacaatcatcaatattagttttgtaatcttttgtgttccgctcatggcttctgttcaagatattgctacccatgaacttggttttgaagaaggcatttactggatacattctcatgttatggacgaggcatgtgactccaagatacatatgaggaaccgccgacaaaaactgctgcaacactacagatatccaagggaaacacagtcacagtactgctcaaaattttctacaagatcttcatatgataaaaggccgaaacatgccacaggtggacctggaatgcaagctgttttcttagtttcggggcaaggatcatgtggtactggcgtgttcttaccccaaaaagcaggcacaaaatcaatcaggaaaccaggttaattaactttgcacttttgtatttcctagtaatgagatgtatgtttgtgacagtatgactttttttattatatatccatatgtagtaataatttaatgattagatcgatcaaattcatatgttatttaaagttattttttttagaactgttatttaaggtttttgaaatatatattgtatgagttacattgatatctttttatgcatatggttacagtgaatcgtttgctcatgccctggtcctacatcaagtaggcggctctattaatctgggagcctaggacctgtgctataagatccctctccgtgtatcattgtt

SEQ ID NO: 27481 - DNA, 232 bp, Glycine max
  Clone ID: PAT_MRT3847_124817C.1
gagagtcaggcatctcgctctgcgaccttccacttaaccgcaatccaagagctccaagcttcgaagacatgtcgtttaagcaaattctacgaccgtcctcgctacacgatcacgaaggcgagattttcaacggcttcagcagcagcagcagctccgacatgtactccgacgacgacatcatcatctgcggcaaactcgttcctttcaaggccgaactagccgctgaaaaacc

SEQ ID NO: 27482 - DNA, 425 bp, Glycine max
  Clone ID: PAT_MRT3847_124818C.1
gctcggaaaacgggtcgagcgtgacaggtaaacctcagaaccaagcctcaaaaacacgagcagagccgaagatcaccatgggggaggcaaacgaaagaacccacacggcaaggccgaagaagagcccacaggcccagggaagcccacgccggaaccagacaccgacgaaccccccccggatgagaaagaagaagccagacctgaagccaacggggagaaaaccaaggaacccggacctaaaaagggagccagaccacgcgacccagcaacacatgctgccaacgaggagaacgacaaagacgcaagtgccacgcacaaagacacaaccgctgcgagccaacacgcgatagcaaagcacagcgaggagaaccacaaggcagcctgcaccgaacttcaggaaaggacgcccaaaccatgggaagaaa

SEQ ID NO: 27483 - DNA, 403 bp, Glycine max
  Clone ID: PAT_MRT3847_124819C.1
aaaattctaccatgtggcctgaaacatggtcacatttctaaaagttgggcggtgattacatttcatcatgtgcaaacatgctccttgcaagcatccctttttaaccatgatcaggttctggtagcattttgtatactatgcctccattcagctcttactcaagctttagcaatgatactcactggtgagactaagggggatactgtctttgcatactgtaggtctgtagagcgctaaccatattttctgattccctatgactcccacttagaaacatatgattcatatatgcacgcttgtggcttactggatggatctatgaatactgttctacagtctattaccgtgagtcaggcttttgcttagatctgtgaatgcttgtacaggggtaaactccagaatg

SEQ ID NO: 27484 - DNA, 329 bp, Glycine max
  Clone ID: PAT_MRT3847_12481C.1
cttatgttgcttagtaagtttcaaaacatacctgctttccaattcttggcggctgaacctttcctgggcttcgtcatctcacgaaaggcgggttcggggatatttacatatctgtctaatatgtatactcaaataaacattttatatgtagtgatgtcataactacatatatctgagatctccattacggtataacagcaagttatatgttggttgccaacagactaacacaaccctcctacttaaccctagcttgatactagatataaaacacatgagcagaatttatattttacattcaattgagttgcggtgccctttttataatt

SEQ ID NO: 27485 - DNA, 401 bp, Glycine max
  Clone ID: PAT_MRT3847_124820C.1
atctactcgagtgacgcagagaatacctgcgctcctactctcttctatcgtcgcatctgtgcgcgtgtctagctaatagcgaacatctgcatcctccgaaggacatcctgcaggcacccacgagaaatggggctgacattcacgaagcttttcaaccggcttttctggaacaatgaaatgctaattcagatggatggtgttgatgatgctggtaagaccactatcctctacaatgtcaaggtcggagagatcgaaacgacaaacccgaccattgagttcaatgttgagactgagaaagacaagaacattagcttcgctgcatggaatgttggcgatcaatacacgcaacatcccttgcgtgatgacaactactataagactttgggccacatatttggtgt

SEQ ID NO: 27486 - DNA, 267 bp, Glycine max
  Clone ID: PAT_MRT3847_124821C.1
gaataaccgaataaggtctaacagcctacaatagcttatgtggtcaacaactaaaaataagtcatcacaaaggggccttaatcaactccaatccatctgtcggtgccgtgagccactgtttcccactggaacgccgctggttcgagaaaacgcggccacgcatgcaaattgacttccccagtctaccaccatgtgcataccacatggaagccagtctcgtctcgcgcggcaaccccgatcgagattatggatgaaaacggatggata

SEQ ID NO: 27487 - DNA, 554 bp, Glycine max
  Clone ID: PAT_MRT3847_124822C.1
ctttgtttcatcattttttactgttttaacttcaccactttattacgtgctttagattgccattttctatgccataaaaaattaaaaagatatcatttttttgttggtttaatttgcccccattatatatgtcttcactctttttagtttatgattgttaatttaataagaaactcaatttcagatttggttattaccaagaatgttattagcaccggggaaaggcacttcgtgcctctctaaaatttttgagaaataaaagtaataaaataaataatattggatagtttttaagatgtgaatgtgtttttttttttaaagatgatttgagagataaaatgtgtacaccaaaatattatatttcttttattaatagtataaatatatacatagatgttttagttggggtgagactgactcaagataaaacaggtaaaacttaagttttaggcctactgataatatatacttttactagcttttataaagcaaaagaaaatcacttcacaaaaaaatctaatatatatcttctttatttaaagtaaaaaaaaaaa

SEQ ID NO: 27488 - DNA, 253 bp, Glycine max
  Clone ID: PAT_MRT3847_124823C.1
tgtaccaatcctaacgccttattttgttttgaatgccaggctaggctcactcacacctacatcaaaatggtgggaaaagttagcgaaccatactttgaaatacaggatcagctgctacattaaatgaggttaaaacggaagattggttgggcaagaaaattttttcgccagcacaaagggactggggatctggcacaaaaacttaataaaaacaatgggtagaaataataaaaatatcccaatgtgttaaaag

SEQ ID NO: 27489 - DNA, 277 bp, Glycine max
  Clone ID: PAT_MRT3847_124824C.1
cattggttcaattccggctgcccaaaaacacgctgcgtagtctgcttagcctgaaccggtcacttcggcggcaagaaaacgtggtggagaatgcatcccatgcggagacactcactgaacgccctctttgagtcctcgccgccacgagaggagcgtgtgcatgaacatgaaactgactccaatgttggctaccgttgccgttcaccagtcttcttggagtaatgaaaacggttcaaccaacccgcctctcgccggttttcgttgcacgtcctgttaa

SEQ ID NO: 27490 - DNA, 170 bp, Glycine max
  Clone ID: PAT_MRT3847_124825C.1
ctccatccgattcatctccacgagaccgagagctatcaagtatcgcagatgtttccatccggccacactggtcataatctatatgggactatggaggttatgcagaagatcattgtgcatctcatcaatatcaccagtgttgtcagggatcgtcaggaccggcttacact

SEQ ID NO: 27491 - DNA, 319 bp, Glycine max
  Clone ID: PAT_MRT3847_124826C.1
ggaaacaaaatcctaggattctttgttccttggggatttcctaatttcccaggtttctaaattaccttttgtttcaaattgacctgaaattcaaaccacaatttttcaatgagcgacaagttgttcacacaatcatttttaaacaatttattttgaagccaaaaggctttcattaagggatttgaaaaaagcaaaaagtggttctttatgaggaaagaccttttttacaaccaggtgggttgacaaacttttggttccttttaaaagcttttgaaattttttactgggggaatatttgcacccttgttattttttgaaa

SEQ ID NO: 27492 - DNA, 633 bp, Glycine max
  Clone ID: PAT_MRT3847_124827C.1
aacgaaaaaagtaactttctttattgaggaacaaaattccaaactagactcagtatgaatgtagattgggtgaagtaaactcctatcacatcaacaatcttagccaaaagacacctttttccctaattgctaagatataagtaataactaagtaattaaaaacttctctaactaactaactgttgagtccattaggccatctcagcccgtggcccacccctttccttctaacacagaccagtttaatcactgtccctctatcacagggattaaatgattctataggattttttttatcagtaataattacataggattaataatatgtaaatgagacaactaggcttaaaataaacataaaagttcgttcactagtggaattcaaaatctatatgatccaccccttcaatttatgtagtctttggttggggttatataaagttaatatgtgaactatgaaaaaataataggaatatagggttgaagagtttttgacctggaggaatataaccaacagaaccaacaacttcagaaaaattccctgtactctttaagggattaatcacatggtagagttcaacatccccaacttgaggctccttgagggacttcaacataatacttttacttgat

SEQ ID NO: 27493 - DNA, 318 bp, Glycine max
  Clone ID: PAT_MRT3847_124828C.1
ggctcgagcaaagctaaagcactgccagggagaaagtgtgcgatggcccagcagcagaagaaaccaccaccaacaggctatcagggatcgaaccaaacgatcggcacccacacacacaccatggcaaggcacaccaaagacgccaactgcacaccaccggattgaccggaaagcacaacgcagaccgactgaaccacgagacatcaccagctcagccgtggacctgctggacgatcagaggacgcagaagccgaactgagcacataacatcggacccggagccgcacgatgccagcgtcaggaccgggaaacagccca

SEQ ID NO: 27494 - DNA, 275 bp, Glycine max
  unsure (1)..(275): unsure at all n locations
  Clone ID: PAT_MRT3847_124829C.1
aatgagcgagctgagaagcccctaatgcccagtgcataagcgccgcaaaagaatatggagaaccctagcgagggaactggaggagaagcagaagaagaaaaggagaagggctcataacttgcaacatgtgcagggtttggacccatgaatccaatgcgaactntggtccttccgattgacttaaaaaagttaaaagcaatgttgtccacttgtacgtactaacacattgaatgtgataagtttattgcttagctagctattaacattaagctgtc

SEQ ID NO: 27495 - DNA, 509 bp, Glycine max
  Clone ID: PAT_MRT3847_12482C.1
accaggcaactaatgttattcctgaaaagccatcaccactggggcaagtacaaacatcctcagatgtaggtttaaccatgaagaacttaaccaccgcaaatgcatcttcagttaactttcctggcacacattcaactctagcattgcggggtgatggcaccaattacgtaaaacctgtacctaatttgagtgtacaacatgagggtttgtctaattcattccgacaacccttcatgccaccctcaccaacgccatcccattcagcctcacagcaacaaagacatcaacatttgtccctggaagtccattacactgaacctccatatcgtaaccctggccgttcctacccgccacaaatcgaaatatcagatcacgggtctgataatatgtggagagttaggcaggatcatgtgtcatccagttatctttctcagcgaaaccataacaacaactataacacaatggttgggggatccagacaatctggtttttatgatagaaataatcat

SEQ ID NO: 27496 - DNA, 169 bp, Glycine max
  unsure (1)..(169): unsure at all n locations
  Clone ID: PAT_MRT3847_124830C.1
cggangagttcaccggaaaaaggtggcttcgtgttttggggtaatggggatggcatatattgaccacacacacacacatatatatatgctttatattaatatcctcgtgaaaatttctctgctttnggtgttctcaattgtttcaggaaatggatgagtgcaatttatt

SEQ ID NO: 27497 - DNA, 930 bp, Glycine max
  Clone ID: PAT_MRT3847_124831C.1
gcaggatataatcaacgtgattctcaaattatttaatcaaaccccttaagtaacccagggtgtaggggcgaaaaacaaattgttgaaagtaaaattacatattagataagaattttcttgcataaaaaaattgtagtataaaataaaactgcaaagcaccctacaatgcagctttctaagacattttatctgaccttaactactactactttaaggaacagaaatataaatatagctgcctctttaaaactgcccatggtgacgtacaagcatattcaagatcatggaagtaatgagccatggcagatgatgaaaacccgctgaatacagccccctcccttttttctctctctctctcttttttttataaatgtttccaaaagaacaatacagctgagactgagccaaaagtcccagaaaagaaaattccagtggccgtagaactgctgtcttctaaaatccttagtaatacaaggattagccaagaggactcgaattttagaggaaatgacagaagaaaactctacaagagctaagccaccaagaaataaggatggtgcatttttttatatttatatttatttaagttaaaaaggtcttctattgttctgcttactaccacgagaaccaccgaagccactagactgacctgagccaaaatctccaaaaccacccgaacgatctgaaccaccaaatcccccaaaatcatctgagcgactaaacctagacctgctggaaaaaccaccagatctacttcctgattgaccagaaccaaagccaccagatgagccaaaacgattatattctgtccaccaaacctttcaccggaatttccaaagctagagcggccagaaccagggttactgtaacccccagaatggccagatccaaaacccatatcaccgtatcgacgatccctgcggacgcggg

SEQ ID NO: 27498 - DNA, 1485 bp, Glycine max
  Clone ID: PAT_MRT3847_124832C.1
cggacgcgtgggtggaatttcactgtactccattgcaactgatttgtatgttaaagcgggaattcttgctcctctaataacggaacatgcaaaaggagggaaagtgtattgttttcactcaaacaaaacgtgatgctgatcgattatcgtatgccatggcaagaagtgttaaatgtgaggctttgcatggagacatatcacaagctcaaagggagaaaactcttgctggcttcagaaatggccattttaatgttttagtggcaactgatgttgcctcacgtgggcttgatatacctaatgttgatcttgtaatacattatgatcttcccaacaattcagagatatttgttcatcgttctggacgaacaggtcgtgctggtaagaaaggaactgcaattcttgtgtatacagaagatcaatcgagggctgttaagcttattgagcgtgatgtaggcagtagattttcagagctgccacgtattgctgttgatagtgcatcagtggacatggttgatagcatgggtggcgggcgatttggttcttttggaggtaccagggatcgtcgatatggtgatacgggttttggatctggccgttctgggggctacagtaaccctggttctggccgctctagctttggaaattctggtgaaaggtttggtggacagaattataatcgttttggttctggtaattcatctggtgaaatgaatagatatggtggaccaagctctggtcgttttggatcatctggtggctatggttcaggtcaatcaggaagtagatcaggtggatcatccagtgggtctaggtttagtcgctcggatgattttgggggatttggtggttcagatcgctcaggtggttttggagattttggctcaggtgagcctagtggctttggtggttctcgtggtagtaatcagaacaatagaagacctttttaacttaattaacatatatataaaaaaatgcaccatccttatttatggtggcttagttcttgtagagtttgcttctgtcatttcctctaaaacttataggtttcttggctaatccttgtattactaaggattttagaagacaaaagttctacggccattggatttttcttttcttttctgggacttttggcccagtctcagctgtgtattgttctttttgaaacttttataaaaaaagaaaaaagggagggctgtattctgcggcttccatcatctgccatggcacattacttgtctctatgggcattacatcagcacggatagttttaaaaaggcacctgtatttatatttatgttccttccagtagtagtagttaagggaagatcaaatgtcttggtaacctgtagggtagggggctttgctgttttccccccccctaaaaatttattatgcaaaaaaattttcatccaatatgtaattttggttatcaacaatttgttttttgccccttcccccttggttacttaaggggtttgtttt

SEQ ID NO: 27499 - DNA, 432 bp, Glycine max
  Clone ID: PAT_MRT3847_124833C.1
aggatttaactgtgatttggattgtttgccatgtacaatatgccgttacccccctctggtagagtaggcatgtttttacagctttgtgcacaattgttctcctttctcttgctttatcctccaatttatctctttagtgcctgatgtcataaaaataatttggcaatccctcactccttttccaagttccacccacaaaagaaatccccacaagaagtccagccaaaaaaaatatctgcagttaaagctgtcttgattggctattgttatgatttttcacattttttttctctccggatcatggttctcaatttccttcaccagtgtttcgggaatgtaaatatgttatgttttttaacttattcgttcctccttttctttgctaagtaacttattcatagaaatagcatcgttgtaaattgtgtcaaaaaa

SEQ ID NO: 27500 - DNA, 1951 bp, Glycine max
  Clone ID: PAT_MRT3847_124834C.1
gcagcctttgtgttcgcgtttttcactctctctctcgggcggacgcgtggggtgcgtgtgtttaacattcacatttacaatgaacaccatctcatcactgacccttgattctcacgcaatatgcaaccctcagcgcagcatctccctccgccaagttcgccccaccactcgaaacgtcgtcgtgtgctccgcgaagcccgtcgcgcctccccccaccaagctcgccgccgccgacacctccggctgccgcatcggcgaactgagccaggtctccggcgtgcttggctgccagtggggcgacgagggcaaagggaagctcgttgacatattggcccaacacttcgaaatcgttgctcgctgccagggtggagctaatgctgggcatactatctacaacgcagaagggaaaaagtttgccctacatcttgttccttctggtattctcaatgaggatactctctgtgttattgggaatggggttgtagtgcacctgccggggttgtttaaagagattgacggtcttgaatcaaatggggtctcttgcaagggaaggatattgatatctgatcgcgctcacctgttgtttgattttcatcaagtagtggatgggctaagagaagccgagcttgctaaatctttcattggcaccaccaagagaggcattggaccctgctactccagcaaggttaaccgtaatggcatccgagtgggtgatttgaggcacatggatactttccctcagaagcttgatcttatattgtcagatgcagcattgaggttcaaagattttaactatggcccatatatgctcagggaagaagttgaaaaatacaagaggtatgccgagaggttggagccctttattgctgatactgtgcttgtcatgaatgacgccatagaacaaaagaagaagattttggttgaaggaggacaagctaccatgttggacattgattttggaacttatccctttgttacttcttctagcccatcagctggtgggatatgcactggtcttggtattgctccaagggtacttggtgatttaataggagtggtgaaggcatacactacaagagttggttctggtccttttccaactgaaattttgggttcaggaggtgacctcctcagatttgctgggcaggagtttggcacaactactgggccgccctcgacggtgtggctggctcgatttagttgcactgaaatactcttgtcagatcaacggtttctcatcgttgaatcttaccaagctagatgttttatcagatcttgaagaaatacagttaggtgtctattacaaacttgctgatggcaccccaatcaaatcattcccttcagatcttcgtcttcttgagcaactgaaggtggaatatgaagtacttcctggatggaaatctgatatatctcccataagaaactattctgaccttccaaaggctgcaaggctgtatgtggaaaggatagaagaacttgtgggggtccctattcactacattggtattgggcctggacgtgatgctctcatatacaaatgagttcacattggccctattcactacatttgtattgggccaggaggtgatgctcttataggtaaatgttcccgcattttcagtttttttgggatatgaacacatttgtagtgactagtgaggatcagctacatgatgtattatgttgttagccgacatcattggcattttttggggtttttttttttttatatataaatttgatacaaggtgttcacagtctagttatgcaatacttgtcggaatgatgagtatgaattagatgtatgatgctaacatctgcccttgttgcggtagtattcatgtagcgggaaaataatgatgtacttgtagccaccacccaaatgcttttagctttcaactatctacaaagttgcatcatggttttgctgctccctgcaatctttattctc

SEQ ID NO: 27501 - DNA, 276 bp, Glycine max
  Clone ID: PAT_MRT3847_124835C.1
ggaaggaggccggcaaaggcctaataatattctccataaatctggggctccgggagccggaccatttggattctgctatgcggctggaggttcctaatttggcagccaaggttcatgatgcaaaccgcaacctcaaatttaagactttccgccgttggctgggggggggggccagccaaccattaactgttccaccagaaatggtaggagaccttgttttggttgccacagggttttttaccaggggtgactcccaaaaggttttggacatttttg

SEQ ID NO: 27502 - DNA, 252 bp, Glycine max
  Clone ID: PAT_MRT3847_124836C.1
cgtccttttttttatttttattattttcttgtttattcttttgtttaagaaccaaatttgagttttactcaggacaaacaggattttttggatttttaacaacccctagttatttttccttgtgaccattcgctttcatgctctggagtgtaaatgataatgggaaaacaattctcttgcctagatttttgggtaaataccaccatagttgcgcagtcgctgtttcaaaaaaattcatttggacctcaaaat

SEQ ID NO: 27503 - DNA, 400 bp, Glycine max
  Clone ID: PAT_MRT3847_124837C.1
gtttcattgtttttctttagtgaaatgagctgatacttaaaagaagctatccgccttttgaggtaaatcacctactcttcataaaacagatatgatatgatgtttttctgagtagctgtttttattttgcaatagatgactttttctgtgtggtttattgtaaactgtggaagactaaactagtagattttagttgaatggtttgatgtttgctcaccacaggattcagaggttatttatattatttgtttggcaatgctcgtattaaatctcacattcctatgtgattattggacctttcttatgcatctttcatgctgaattatagagtatatggctgtaaatcacacattaatttgaacgatgaattacattgttatatcaactctgatgcatgatt

SEQ ID NO: 27504 - DNA, 247 bp, Glycine max
  Clone ID: PAT_MRT3847_124838C.1
aattcggcgcgagcacccttttcttgtactcaatgagatgttggatttaacttgatttgaaatttatagtctaaaatgtgaccatttgaccattggaaaaaattcaataataaaaaaaaaaaaaaaaaagaaaaaaataaaaaaggggtgccaacaaataaataattgtgggacccggtaataaattaaaaacaaaatacctggcggccgaccatatttaattatagccaccagaattaaatctggg

SEQ ID NO: 27505 - DNA, 486 bp, Glycine max
  Clone ID: PAT_MRT3847_124839C.1
gagagaagttcgaaaaacagattctatggttgcttgttaattttagtgtttatatatcataatccatctagagggatgttcatgtggctccgctagccgataagcaaagcaaggaaaagacaactttatacgttaattaggaacgcaactatgagccgcaaaataatgatcttagaagttagaaataatagattcaccaataccataaacaaataaaaaaaaatgtaaactctcttttccttttccctaattagtctggcacgatacttttaagcagaggcgacaagaatgtataagtgtgaaagaaagaaattaagagaaaaagaaagtaagtggaccaaaatccaaacaggccccttacctataccttacgtttgataatttgaaaattgagccctctccctaagatggaaatgaagatatccttggtgtgccgtagtgtgccctatagtcgaagaggaagcattttggtacatttttgtttcg

SEQ ID NO: 27506 - DNA, 627 bp, Glycine max
  Clone ID: PAT_MRT3847_12483C.1
tggcatatgggacaaagcgcatgtgttctcgccagaaagattcttgcactctgacatagacgtcaagggtcgccacttcaagctcacgcccttcgggagtggcagacgcatttgccctggctcgccactcgccgtcagaatgctccacaacatgctcggctccttgatcaacaactttgactggaagcttcagaacaacatggaccccaaggacatggacttggatcagtccctcatggccatccctctcgccacagcttaattagcgcctccttggaatctgttcacacccatttcaatgtactgttctgtaacaagtaacaacttcgtaaattgttactctttctttaaacttatgtttgtagctttttcagattgaataattccagctagttggtggcagctttggtcgagcttgttgagcctggttttaagatgaataaatcatcgtaaggctttgagttgcagaagatagggtttgtgtgagtgtaactttaatctagtttgatttggctcaagtgcctccctcctgtgtgtggtgtttcaggcctttgtatgtatgggatgtaaaatagtgtactcgtgaaagaagaaaaatcaccgtattaagtacttattcgttctccc

SEQ ID NO: 27507 - DNA, 217 bp, Glycine max
  Clone ID: PAT_MRT3847_124840C.1
agcgacactcggctcgagccgcacctttttttttttttttttttttttcaaacaaaaatcgctgatatgcacccaaggacggggacacgaacctacgcccactgcagccggactccattgacagacgcagaggacacattgcacactacggacttgatctcagagatctctgcagctcggctctaaacaccaccaccgctgagacgagtcagcgaca

SEQ ID NO: 27508 - DNA, 1138 bp, Glycine max
  Clone ID: PAT_MRT3847_124841C.1
ctgaatcatagctatttcattcaacctcttaacaattgccaatttcctgggcaaagaccagccaaagtagaaattgtggagaaatgctgaaaaatctacatgtccatttccagttagttttatacaattgctacaaagaaaaacatgttttcaatgaaccacaaattataatattgattcaaatacaagcatgttagtgtcatgcaataacctttgatgtctgtatagtcagcaaggtcagttcccagcagctgtgtcatttctacactgttcaatggctggaggaagcaaaagcctaagcctacttctgtaccttgtgatacgttgtaaccgttcttcccttaaacgtgctctaacatttttggcacgtttaatatgtctcttcaatagatcttgaggtgacaagtgctcaacagactgctcattctcttccttctcatcttcatctttttcatcctctttcttgtttgacagataactagccaccatagatgcaggcaatggtttaggaagagccttaattacatctttctgctgtggctggctttcttcatttataccatttctcaaccatgatctacaaagtgcatatagagaagcatcgtccgttactctgacttttcgatctctaacaacaatgaaggtatcctcgctgcttttttccctcgtattcgtatctttaccgccattgacatcagcaaccgcggagcgagcagcagcctttttaacgggaggcgaagcggcgggtgcggcgtgagggaacggcacgtgagtcggcggccgacccacgtgcaaggcgtggctgaaatagtccaagggcacgccgcgaacgccgccgctgtacatcatggacggcggcgggaacgcggcggagacgccggcgtgatcggcggctctgacgcctttgggcgcgaaggggtagacaaagtgggggtttggggcaagaattgggagggtttgttgctgggaagggtaatggtggtggtgctgctgctgcggctgggggagcggcgagatgggtcgcgatgcggtggttgtggcggcggcggggtcgagaggcatggcggtggtggtttttgaactagaatttgagtgaagagaggaaaaggaaactgcgaagttgttttcggacgcgtgg

SEQ ID NO: 27509 - DNA, 291 bp, Glycine max
  Clone ID: PAT_MRT3847_124842C.1
tcatcggtatcggtcatcgtaagggatactctcagtctctgcaaacctctcaatttctctcctctgtctttttcactctcttgctatccttttggctagttgcactgctgcaagtgcaactccagagaagcacattgccaagccagcatgtttcaacattcaacagaatcctttttccttccatttttctctttggcattggatcttctgcgtaacaagcagcaggagcagcaagtttaaatgggataggtccattcatatgagacacctacactacacagcatactgaaa

SEQ ID NO: 27510 - DNA, 298 bp, Glycine max
  Clone ID: PAT_MRT3847_124843C.1
gggttgggttctctttccttcttgcaaaaaaaaaaaaggggggaccccacccccaaggatattcggcgccccccggggttctacccaagaaaccccccatccccctggggggctacaaccactttgtttatctccccggggggggcagtagccccccccttctaatcggcaattgcccccccaatttggggtttaaaacctttcttccccacaacaaccccgggacccttcaattccccaagacgccataaactggggcgggcggttttaaataacactttgggccccacacttttcc

SEQ ID NO: 27511 - DNA, 432 bp, Glycine max
  Clone ID: PAT_MRT3847_124844C.1
aaggggggcatcaaataaaaatccaactttgaaattaccaaatcttttttaaattaacagttggtaaaaccaggtcatgacttgcaattctatctctcatgatgactgacacatttaaagttagtaaaaccagtcgttaagactgagtaagaccttttttccacaaagattgtagctagaaatgtatttattcttcacgcctatgctttgtgcttgcgcatttaactacctgcaaattccttttctacgtaccataattttggcgcactttctagaagttgttaatgacttccattaaggaaccatatttaatgaagttcaatgaccccatatgtatgaactctgtgtaacgaagtattcatgcaggaaaaccaacatggctgctcacaggttcataaaccaataaaaggtaaggctgggggcctttgctac

SEQ ID NO: 27512 - DNA, 836 bp, Glycine max
  unsure (1)..(836): unsure at all n locations
  Clone ID: PAT_MRT3847_124845C.1
ataagttcccaaatgttgtttctccgaaactgagttttncggagtctcaaacatactaattggggagtaaccaaacatgatcccatattcatttttctctcaacatacttttggacactctaactgaaaatccaaacacatctaatggatgttgacatgataattgtataaaactattttacacgggttcagtctttttttttctataaataaacttgtactatgtactagtattctctttccatgttgcaatgaacgcacgtatttatgtgcttaaaagtgagcgtgcatccttaattaaaacatatcttacatgtgaggttcttaatttccacaaactttccgttttccaagcttagcttttccttggtggttttgctttcatggccgacattgcacccttaaatcgcgtaataagacagaagcagacggaccatgtagattttttcatctttttaaacattcttttagtggtacatattgtcatcttctagatttttttgttagggggaagagtgtctgctccttttgagtatatgctagttaaataacatatgcatgtgtcttgcgtggtgttgagcagccaaaaactgttgggagcacgaaaagatggggcacagcttcctctggtaaataaaactatgatgtacttatcaaggctacaatcaggtggttcctcaccatcaggtctgattcaaacgcagagtataatagcttatgttgcctctgtttttttggtgcctttcttcctgttctgccctctttagcatcctttatgaaatacgtttgcttggacacttcagggtagacacttacgccaaaaatagctgcttctc

SEQ ID NO: 27513 - DNA, 1369 bp, Glycine max
  Clone ID: PAT_MRT3847_124846C.1
gcaaagtaattaaatattcaggttgtatttatatttcatcatattgcccattcagaacaaaatttcaaaatgtgtaccgatccagcacaggccatcgcatttatacagtcaaaggaagaaaagaaagtcaacattcaatggatctcacgttccccaaccaaagaaagcgaggggcagttagacatgcaatcaccacaatcacatttagttttggatttaatgtaacttgttaaaaaaaagtcagagacactacttatcacacaaatttataaagaatgacaaggttaagcacaaagtcagcatcatgatcattatacacgtaatttcttctttcttcttgttcttggacaagaatgttgcctccaatttgtaacatttgtcctcaaccacaacaagccgatttttgtgcagcctgtccagcccctcctgactggtcttggttgattttgattgttgatggctctgccttggtgtcagtgtcagccagcctttgttttatatctcttgctattgagaagaaaacttcctccacgtttagatttgtctttgcactagtttcaaagaatttgatcccatactcatcagccagtgcttggcccttggacgtaggcacggcccttttgctttcatccatatcagctttgttccccaccagtattttgttaacattgtctgaagcatgttgctcaatattgcgaatccaattcctgatattgttaaatgatgcttcatctgtaacatcatagactagcaatatgcccatagcaccacggtagtaagcagttgtaattgtccgaaaccgctcctgccctgcagtatcccaaatttggagcttgatccgtttgccatcaagctcaatggttcttatcttaaaatcaatgcctatagttgtgatgaaactagtggtgaaagaaccatcggagaaacgcagaaggaggcaacttttcccaacaccgctgtcaccgatcaagagaagctttatgagataatcgtaatcggcacgagcccttgccggtggagcagccattaaccttcttcaagttatgagtttgcgttaaacgaaagggtgaatctgatggaagagtgcgtgaaagatggtgagatctgggatctcgtccagagctcagaagtgaagggagatggggatttcggagagaaaagagcggtgcttatgttgtttggttttattagaaaaataaaaatggaaaatatgaatgaggagaagagaacaacagtaagaaggtggaggtgcttgcaaccttgcactttgaagctgcccccgactattgtgggtgtgagtcagtgcccctctctccaccccccttctgtcgtcttctcgcagccgtactcgagccgattcggctcgagt

SEQ ID NO: 27514 - DNA, 426 bp, Glycine max
  Clone ID: PAT_MRT3847_124847C.1
tcgtacggctgcgagaagacgacagaagggcactacaagagctaactaagggtgtgagatcttgtcacgcattccacgaacacacatgggcatcaatcatgttaagacattaccaggtacacatagaggtcacgataggtactaaggtattcctcgaagcatccacaaactttttccagattaaggtaaagaggactaacatttatctcgctaataatacaactatcatcactaatcctttaggtcacctatcttacacaagaacactcactcttgaacccttccatgcttagcaattaacgccttactaactaccttacactattcttaaagtttaacactaaaccttttagctattcttcacaacttttccaactactctatattcttaaacaactgtttacgagacaaatctctggtgctaca

SEQ ID NO: 27515 - DNA, 443 bp, Glycine max
  Clone ID: PAT_MRT3847_124848C.1
ctatcattctgcttgcattgataaccatgagattttgggatcatgcaaagggttcatagttttatactataagagaaacaatgatctcattctatggaatccatccacaggttttcacaaacgattcctaaactttgcaaatgaattaacctatcttctttgtggttttgggtatgacacatcagtagatgactacttactaattcttattgatttatgtgagtctaaaaatgaagagtctgaagatgatgactgcaaacttgaaattgcgattttttcatttaaaacgggtaattgggttctatttgcggagattcatgtttcatataagaatttctattatgatgacttgagagtcggatcactcttgaatggggctcttcattggatgggttgttataaggatagaaagggtcctgtgattattgcatttgatctaatac

SEQ ID NO: 27516 - DNA, 391 bp, Glycine max
  Clone ID: PAT_MRT3847_124849C.1
gtttttgttattatactataaggtttcagatcttattcaaactatagatatgtaattaaattgtgacatatttccctgaccttccataaaactagtagccctggaagaaaatacgcacgccaaacttggtcatagaactagaatttgctcaagccgttatcagtaaattgacttgacacaacttgtccacataatactaccactataccatgagggcgtttggatacaagctgataagttacgggaaaaaactgtctttccagactgaaagctctcaaagcgcttgtattcaaacagaacctatatgtagacggaaaccacatttcttcagaaatgatgcaaatatggatgagcgtcgtatcccggcctcctaggattccttggaaaattg

SEQ ID NO: 27517 - DNA, 1730 bp, Glycine max
  Clone ID: PAT_MRT3847_12484C.1
ggctcgagggcaatctcaagttgactgactagtttggtgtggtgtctgttgattaacattacattgcctgccgactagtttacggtatcagcaatagcaagtggctcacacacgcacagatctgatctatctgaagctgaaaacgccgacgcccgacggtgatgatgaagatggggtcctcaccttcacgttgctccttcttcctattccttctccatcgttcccttcgatcagtttggattcacccacaagggtcgccttgagctcagcgtttccaaaatatcactctccaattccaatttggacctctccaaggtgggattcttcctctgcaccctggattcctggcttcatgtcttccagcaactggaggatggcgagattcggtgcgcccttcaatccgatctgtccaagtccgtctacaccttcaattctctaaacggcaaggactctttcagcacgctctacaaagaagaaaccgacgccgatcagtacaacctcgtcttcgccaactgccactggcagcaactcaaggtgacaatggacgttaaatctgccatgtacaacctagaagggaatagcaacgtccgcgattacctctctgcgggcagaaccatccttcctagggtttatttgctcttctcgttggtgtatttcgctctggctgctctctggatcagcgtcctctacaagaagcgccaaaccgccttccgcatccattacttcatgctgggcgtggtcatctttaaggccttgaatctcttgtgcgaggccgaggacaaatcctacatcaagcgcaccggaagcgcccacggttgggatatcgtcttctacattttcagcttcctcaagggcatttcgctcttcactctaattgtcttgattggcactggctggtccttcctcaaacccttccttcaggataaggaaaagaaggttctcatcattgtcatcccccttcaagtcattgccaacattgctcaggtcgttattgacgagagtgggccctttggccatgactgggttacctggaagcagatcttcctccttgttgatgtcgtctgttgttgcgctgtgctcttccccattgtctggtccatcaagaacctccgtgaggccgctaggaccgacggcaaggctgctgttaatttgatgaagcttactctcttccggcactactatgtcgtcgttatctgttacatttacttcaccagggttgtcgtttatgccttggagactattacctcctatcgctattcttggaccagtgttgttgctgctgagttggccacacttgctttctatgtctttactggctacaagttcaagcctgaggctcacaatccttattttgtcatcgatgatgaagaggaagaggctgctgcagaggccttgaagcttgaagatgaatttgaattgtaacttctttcaaaatacaaaattaagcttttttcctagttaggttttgaacaagttggttccatgctcagcaatgctcaggtttcatctcaacagccagtagaaattttcatcttaaatgttatgggtatagtcattattcataaatcattgcgctatattttgtgttctggactcatgccagtttttttaattagtgttataatatcctaaacccttgtgtagtgctatgaacatatattacgtctaagtattgataccgataccttgcaaatattttttgtcggaaacaccccacccgcagaatgggc

SEQ ID NO: 27518 - DNA, 221 bp, Glycine max
  Clone ID: PAT_MRT3847_124850C.1
atttatgatgcgccaaacacaggcggaaggcccacacgggaggtaacattcccgaataccactgcgcagatcgaaccagacatgaattcaaggcaacagctatagagcaccaacaccaacggggagttaggccaaggaaaagatctcgcaatggtcaaagctaaggtagcatgagctgctgaaggctcgacatcaagttacactccaaccccatagaagga

SEQ ID NO: 27519 - DNA, 199 bp, Glycine max
  unsure (1)..(199): unsure at all n locations
  Clone ID: PAT_MRT3847_124851C.1
wgnncaggagagtgatcgtganggagtcngngaattagacggagtnaattatcttagagacctcaacagaagntatcgcaatgcctcatacgagaccactggcggantatcaggtgttttattaatcagcttggaaagcgtaatagtctcgtaggaganagtgttacatagtgaaccanggantgttcagtaatctgnn

SEQ ID NO: 27520 - DNA, 344 bp, Glycine max
  Clone ID: PAT_MRT3847_124852C.1
acgattacttaacacatcttgattctcatcctcttttatcggcttaattctttgcacaaggggacgttcattacaaacggcagcaggtactatttgccattccacccatattctgagttctttcctttatccatctctttctacattctctctactcctcacccataaaatttcctctcaaaaggttactatcctcatattgatcattttttactcactactcacttgattctctctaattattatcacatctagattacatatttatcatgatttatgaatctattctttcttttatatctattgtacttttatctttgattcattattattaatgatatttc

SEQ ID NO: 27521 - DNA, 191 bp, Glycine max
  Clone ID: PAT_MRT3847_124853C.1
gtcgttgacgaaggcgattcggtgcgaacctgaactacgatctctcttatcttctctcactcttgtccatagcttacgacaatgtcttcttctaagagcgtttcgatgacgggtgagaaaatacgatgggttaaatcagattggaaaaaagatagagaagtggcaaaggagtgagaccacaactctggtca

SEQ ID NO: 27522 - DNA, 440 bp, Glycine max
  Clone ID: PAT_MRT3847_124854C.1
aaaaaaaaaaacattttgttttgtttttttgaaaaaaaggacatttctgaacgtgtaaaaggggacattcacaaaggggggggggggggataacaaaaaaaaagggaagcggagaaaggcaaaaaccccacctctgggggggagcaagccggcaaagcccgcacttcatgggcaggaggcacaaggggggagcctgcccaggcaaccctggcaaagggggagccggcccgggagaccccgtcgccctggcctttccacgcatgctgttcactgccctgggcaccacacaaataaagggttccgaaaaccccccaaaggagggaaacgggaacacaaacttttaaaagatccatgcctgcacgggagggtcctggaaaccccttggtttccccggaaattttacccaccaaaccaatggcggggaaaatgtgccccacaaa

SEQ ID NO: 27523 - DNA, 435 bp, Glycine max
  unsure (1)..(435): unsure at all n locations
  Clone ID: PAT_MRT3847_124855C.1
gcggaatncggactcgagccgncggcagaacaatggaacacacgccaatgtgctgaaactgtcttcgtccttacttacttcttgcttgtcgttatctacttgtagtacgttctagcgttcttactgaacataggagactgtgtgtgctctcgagaccctcacccctgtcactcttccgagtgtcgactttcatcgacttactgacaccacattgctcacgtgctccaagctatagtgaatttcagcacgcggaaggaagaataagggcgtgcttcgacgacgcctaggcttgcggatgcggtgtgtgaacggcctccgctcgagcgaaccatgtgatactgatcgatgatgagagagagctcgtagcgtggttcaccacaacccgccatggaagtcaccacattcaatcaaagcactttcaacgatgctgctgac

SEQ ID NO: 27524 - DNA, 266 bp, Glycine max
  unsure (1)..(266): unsure at all n locations
  Clone ID: PAT_MRT3847_124856C.1
ggggttataagacctgcttttgttgangaacattctacaatacagaagcataccatctgccaatcaatccagtgatactgacaaangtaaatctatagnnagtanaggggaaaatattggtgtgattaatggnngtgtgctaattcanaatctctggagataatgcggcccagcaggttgaaaaacaangggaatagtgtcatccccctttagcgagacttccattttaccaattggtgatgattaagattccagtgttttccngc

SEQ ID NO: 27525 - DNA, 769 bp, Glycine max
  unsure (1)..(769): unsure at all n locations
  Clone ID: PAT_MRT3847_124857C.1
cccacgcgtccgcccacgcgtccgtacggctgcgagagacgacagaagggggtgcctctcgtctccctttgcacaaaccctaacacctaaaagccagaagaagcgaaatcgtaatcgcaatctagcggatatgaaggtcgtcgctgcatacttgctcgcagagttgggagggaatccatctccttctgccgatgatatcaaaaacatcctcggcgcagttggagctgaggctgagcatgagttgattgagttgctcttgaccgaagtcaagggcaaagacttcaatgagctacttgctagtggaagtgaaaagatttctgcagtggctggtggcggtgcagcggttgccgttgctgctgcaccagctggaggtgctgctgcacctgctgccgaagcaaaggaagaaaagaaagtagaagagaaggaggagtctgatgatgatatgggtttcagtttgttcgactaaaaggtctgaagtgtttttgtcttacatttgcagttctatttagtattttagcccaatcacaaggttttgttacctgagttacatattgttttaggtttatgggttttgcttattcacattggagacaacgtcatgttatctgatataatttagtaatgtttgaatttaattcgtttgaccttaaatttaatcaggaaaaaaaaacactcgagacgaattatctcctaactgaaagggggagcggaaaaaaaaaaaaaaaaaaaaaaaaaccncgcggccgctctagaggatccaagcttgcgt

SEQ ID NO: 27526 - DNA, 286 bp, Glycine max
  Clone ID: PAT_MRT3847_124858C.1
gtcgcgccaactattgagaatgttcctctattgcaaagtcccatcatctgtcatcatcatcatatgaatgtctacaaagacatgcgcaaactctttcacagtgttatcatcataaaagctcatagcgaatgcataacctggcttacaccatcatggggcgcatacgtgacggagggtcagagctctggattcattggcccacatgatgagcctgatcggatgatacctaagtcgtcgacttgttttactctaaaacgaagcgaatggaagaacctcacatatatga

SEQ ID NO: 27527 - DNA, 482 bp, Glycine max
  Clone ID: PAT_MRT3847_124859C.1
ttttttttatatttttttttttttttttttttttttttttaaaatttattgggtgttgatttggaacccaaacaaaagaaaggggtgtgggaaaacaaacaaaatttaagggggggtaatgaggaaaaaaggtgaaccgaccactttaaaaaaaaaaatatactaagggggcggaacttttgaaggataaaaaaaggtggaaagaaacaacaggttgtgtgaaaattaaagaaggcacaaagagcgggtggaaataaaagtatgagtgtggagaccaaccaaaaaaataaagggtgaaaatgaaaaggcgaggggaaaaaaagaaacgacgcgaaagatgtttatctaatacgggcgtaaagaaaaaaaaaaggtacaacaggacgcatcatagggttactggcaggaaaaagctgataatcgaaaagatggggtaaaaaaggaaaaaaatactagggcaaataatgaatgaatgtgatgcc

SEQ ID NO: 27528 - DNA, 1723 bp, Glycine max
  Clone ID: PAT_MRT3847_12485C.1
cgttgcatcttcttcctatcccaggctggttgcaatttctaggcaaagtttctgtagaagaggatgcttctctccatgccttaaaatatctctgcgtgcgagaagacgacagaagggctccgcaatctctcttcgaagatgtttcccagtggtgccaactgtgctagccagcatcttcaccagttgcagagatctcttcagtgtcagaacttgggatggagtaacattttcactctttagcaaccactcttcagcatgtgtgaagtctatgatctttggaaggaggccccttgtgtttccaatctttccacagttgtcaaggtcacgtgcaagttttttcagtatgaggagtcccaagtggttaaaagtccagaacccataattttggtgatcaaatacaagtttcttttcaccaatctcatcagctgcaggaatcacactcctattagtttgtaaaagagatgatattgattccatagctcccggtattccggctatgcggagagagttctgcttcttgccagctagttttgacaaaatctcagcagctgagagcctaatctcttcgtccttgaagtctgtccaattcaacatctcaactagtctctccaccattgatatgtcaattccaatcttttgaagggtgtcatcacaaaatctttcactgattgaaaactgcctaagaatccttgctccaatgagctgctcatcaggggagttagaagccaacaagtccatagaaaaacctaccatatccattttcaagccatcaaatatgcttccattgacacatcttgaataggcatcatagaagagccttctagtggacaccattcctgatggccccaactcacactccttgttgacctcttccaacagtttacaatagctgacttgccattcccaataggccttttccattaggaacaacaaagcttccgaaagagccaaggcatagaagatagagagagcagatttgcggttcctcttgtcagtgtccccctttgccacctctccataatcatgcttgacgagctttattaacgagagaaccacacaagccgttgcagaaagaagctgaagccaatagagaagtctactgacatgcctcgaaaggaaaaaccatttagcatatggtaggagtggaacatctgagctaacccacatcctagttcgtgtccttgttggggtagtatctgttgaaacatattggtggtgatggttctccgtgatagaccatgtggcttggtgctgccattcaagttcatgactcctgctgaaaatcctggttccttcaactacaagtatgatggtgatgaaccagaagtcggttttttccaaggtgatggcgaaaccgccgagaaggacaacggttgcccaaatgaagccgagagttcccaacccggttgctgctttttcaagcaccgcaagctgaagagcgaaaagggtgagcttcttttctggtgctgaggttgttgaagacacagaattggcagtgctattattactgtccagcttgtctatgctgctgagtccacgaggctcaaacatggtggtgcctatgctgatggtttcgctgagcctcatcctttgtagttcatcaacttgtacatgaatgcttccctctccttccattaatgtaactagtcttaagtaactacctgcaatgcaactagtgtgatatctaataaggttgaaaatatgtgattgtgttatatctctg

SEQ ID NO: 27529 - DNA, 256 bp, Glycine max
  Clone ID: PAT_MRT3847_124860C.1
atctatgccaaaaacccatcacagaattcaccaccctttttctcctcctcctccttctctttttccccccacatattattatcttttttcctcctctgtaattgccaacaaggttctgtgcagtgtttgtagagagagagagagagagagaggtagatagtagatagaccacagaactagatgcaaaatattataggaagagagggatacactactagagcgtcctatgctgggggactcagcagtgttgggaaca

SEQ ID NO: 27530 - DNA, 264 bp, Glycine max
  Clone ID: PAT_MRT3847_124861C.1
tacccacgcgttcgttataatactacttatcgaaaaactccatcacctattattaatacaatggtgaactgttgaaaatcacttatacaaactcaaccaactagatcggtctaatgactaaagctgcgaatggttcataccaacttttaagttcacaccttattttcacacgctcaaaaaaacaaaaaaattcgtacaatttgctgatgcgaaagatgataacacatcgttacttttgtagctggccctggtacaatcaaacct

SEQ ID NO: 27531 - DNA, 408 bp, Glycine max
  Clone ID: PAT_MRT3847_124862C.1
ttccttagcttcgggttccttaaaaccggccgccctcttttttttttttttttttaagcccgattattaatggaaatttgttttttcaatcataaagttcccacgtccgtcgatggacctgaatttccttccttataaaggacctatttttaagacaaaattatcttggaatgaacacatggcattttaaccattttttttcagttcttcctttcgccatttactgattccctgataaaaaaaaggcccttcctaatgcttcctagtaacatatttccagcccttttccatatccacgccttacaaaattaatcacagcccctggatgaataattttttaaaccctttttctggccaattcttttttttcgaggcatttaaggggacgccaagtccctagtaaacaaa

SEQ ID NO: 27532 - DNA, 815 bp, Glycine max
  Clone ID: PAT_MRT3847_124863C.1
ctcgagccgattcggctcgagctgagttctttgaactcaaaccctaaaaaaaacgatgtatcgttttttgtcttccattcgccatggctgtggatcttccctcacatcacttctcgcgccgaaacccacccttccattcgacgccgccctacgatctcgccgtttacctcaaaacgacggacatgttagaggattttcaagctcgaattttgattggaggaatcttattgtgaacgagaatgtgaatgcagatgcaaatgctcatccagattctatgcaggatgcagagaacagaaactccgaaaagtggaataatatgaggctgaatatgaatgcagatgcaaaagctcctccaaattttgtgcagaatagagggaacataaactccagaagctggaacaatatgcgacagaatttgaatgctcctccaaatttatggggaatagagagaacataaactccagaagccagaataatctgggccagaatgtggatgcaaatgcagatgctcttccagattttatgcaagataaagagaacataaacatcggaagcaagaatgatgctgagactggctggaactctaggcctatggactttgtaagaggaattatagatgaagataattttatgaagggttctccctttcatcagtatcaatatgagcaggatgctgattttgttcatataaagatgttgcgtaataatacctttgttactgtaacagattctcaaggaaatataaaactcagtggctctgctggtccattgaaagacctgaaatcagggcaaaagctttctagttatgcagccga

SEQ ID NO: 27533 - DNA, 303 bp, Glycine max
  Clone ID: PAT_MRT3847_124864C.1
gtgggggttttttttttttttttttttttttttttttttttttttgaaccaaatttgtttgggcgtgggccgaattccgggtttcccaaccccggcaggagacgtcagacccttttctgagggtcacctttttttttttcaatggccctcgtttttgggggggggggctggaaaaacccgggggttcccccaataaatggccgtggaaaaaaaacccctttccccagctggggtaaaagcgaaaagggacaacccggccgcccttacccaaggggccacaccccaaatggtgaatgggacccc

SEQ ID NO: 27534 - DNA, 1094 bp, Glycine max
  unsure (1)..(1094): unsure at all n locations
  Clone ID: PAT_MRT3847_124865C.1
tccatatccgtgcccgatccattcctattctccctcaaaattgtagatccttgtaatattccgaagaagctaaaaaagggttctctcaccaacaaccctcagttgccgctccctttctctcacagttgcgtaccatcaccaccagtcgccatcgcctccgcactccgcaccgccgtcgccgacgtcgtacgcacttcttttttacctcggcctccttctttctctcatcctgctaaaaattttcacgccccacgcgtgtggaagtgtaagcaagcatcccaaaaccccagcagcgtgtgctttcttcgttcgtctcttacatcaggtacattaattaagataatactacttctgaagtgctgttgaggttatggagcgccagggtcatgattatgcaactgcatctgctatggcatatgctcagcaacaacgacaagctgctaatatgcaacaacagcagcagtttggatttcatccccagcatcagcagtttccttcgtcaatgcacggttctccttttatccccccaggtcctggtcctgcacacccccctatgcaacaattcccttatcatcctgccctgcagcagcagcaacagccacttccacaattacaccctcatgcccctcccccgcctcatcttctacttcagcagcagcagcagcagcaccaaggaccacctgcatacccttcgcattatcctcctcctcttgttccatctccgttttatgattctgctcctgctccgcccccggttgctcccccttctgatcccgagctgcacaagagaattgacaagcttgttgagtatgcagtgaaaaatggccctgactttgaagctatgatatgtgaaaaacaacgggataatccttcctatagcttcctctttggtggggaaggtcatggttactaccgttataagctttggttatcaactcgtcccccgggtggtccattcaacccgtcttttccatcatcttccatgcccatgatgcttnctccaaatccaatgatgaatctgtctcctgtaaatgtttctccgatgaaccctgcaggaattgggtcttcaccttcgatgctaggtccacctcctt

SEQ ID NO: 27535 - DNA, 142 bp, Glycine max
  Clone ID: PAT_MRT3847_124866C.1
ataaggtgagctgcctgccgtgccggaccggaactgcagggccgacccaagccaccggtcctttttagagtcacaaaagggggttcttctatacagggagatgccgtagcaaattctgctacaatgcactatatgagaagtg

SEQ ID NO: 27536 - DNA, 1862 bp, Glycine max
  Clone ID: PAT_MRT3847_124867C.1
ggctcgagcttggatcttcgtatgctcgcttggctccgccttgcttagaaaaatttggatgctttaaacaaattttatatttgagtcgtattctaatgttatattttaagcttctcgcaaggagggttgggtttggggttaggtatgagagtgagaacgaggaagggtaagtgtattcacattttgtagagggcgatttcctagactctgtcttgggggcacaattcaattgtggctccgatcaagggcgtagtggtgaaggagccgaagtggatggtggcggctgcggcgacaacggaggagaagcataatgagaatttgagcagcgaggggagtttggaggacgatgattcgtggagagtcagaatcttcaatgggcgcaggggaaagtaggggaggatcgtgttcgtgttgtggtgtttgaggaacacgattgggtttttgtggggacctatgatggtttcagtggacctgatgtacttgattaccttctctccaatctccacaccgcggtgcataaggagcttaaagggttgttatgggatgatgggtctgcaccggaaaattcaatgataaaggaggacaggttgtgagattttactgtagatgttacggtcactgatgaagatgatgcttgttcttactgtcaaaccagctcctccgtcgtgccaagctttcaagccaccgcgaaagactttgtagtcgctgcgtttgtgaacgacaagcgagcgtttagatctaggttttttcaagtgggcgttcttgatgttttttttccttccttttgatcttatttaattattgttcattattgtattttcccctttcggtcttagtagcttgtgatagctatggtggttcgtgggtttgatttgtggtgcgtgttaaacattgcttgttggtgtggatttgatttttaggaaaaaaattccagcataaacattgaaattgcttgctggttgttgtgatctgaatcgttgtcgattaaggatcttgagtcttgggatgttgatacgtccaacttggtaccgagtttgagcgcgattcagcttaccaaggatcatagtactagtgttgaggaagaaatccagagaattaaaaaagagcacccggatgatccttttgctgttgtaaatgaccgtgtgaagggttctctcaaagttactcgagcatttggtgccggatttctcaaacagccaaagtggaacaacgcacttctggagatgtttagaatagactacgtaggaaactctccttacataagctgcctaccatatctaaaacaccacagattaggcccaaaggacaaatttttgattctatgctctgatgggctctatcagtacttgtcaaacgaagaggcagtggctgaagtcgagcttttcatcacattgcaacccgagggagacccggctcagcatttggttgaagaagtgttgtttcgtgctgcaaagaaagctggtttggactttcacgagttgctcgaaattccacagggtgataggcgccgttaccatgatgatgtttccatcattgttatttctttggagggaaggatatggagattctgtgtataaataagtatactgaaaatcatatatattactatcatatatataaaaaaaaaggaaaaaaggaaaaaaggaagaggatatgagatatatatagtgccgaagaagggtgaggcatcctttttgccgttttccccctccctactcaccttttgtaaaacaccaactaagaagctctgggagagtgctttgttgtgcaatttaagtgggtggtgaggattgtaaagttgtaaaagctggattttgttgataataactcccataaaaattgtaatttttgtaataaaagtc

SEQ ID NO: 27537 - DNA, 965 bp, Glycine max
  Clone ID: PAT_MRT3847_124868C.1
taaagaagactgaggagtcttatctcgatgtggcggataagatggtgatggagaatcctgaattggctttgatgggttcgtgtgttcttgtgatgttgatgaagggggaggatgtttatgtgatgaatgtaggggatagtcgagctgtgctggctcagaaggctgagcctgattactggcttggcaagatcaggcaggacttggagaggatcaatgaggagacgatgaatgatcttgagtcttgggatgttgatacgtccaacttggtaccgagtttgagcgcgattcagcttaccaaggatcatagtactagtgttgaggaagaaatccagagaattaaaaaagagcacccggatgatccttttgctgttgtaaatgaccgtgtgaagggttctctcaaagttactcgagcatttggtgccggatttctcaaacagccaaagtggaacaacgcacttctggagatgtttagaatagactacgtaggaaactctccttacataagctgcctaccatatctaaaacaccacagattaggcccaaaggacaaatttttgattctatgctctgatgggctctatcagtacttgtcaaacgaagaggcagtggctgaagtcgagcttttcatcacattgcaacccgagggagacccggctcagcatttggttgaagaagtgttgtttcgtgctgcaaagaaagctggtactgataattacaaccaacattttcattcaaaagatctcacaatcgcataatggatcattggttttactttttactgatgtttttgccatgttaatcttcaggtttggactttcccgagttgctcgaaattccacagggtgataggcgccgttaccatgatgatgtttccatcattgttatttctttggagggaaggatatggagattctgtgtataaataagtatactgaaaatcatatatattactatcatatatataa

SEQ ID NO: 27538 - DNA, 244 bp, Glycine max
  Clone ID: PAT_MRT3847_124869C.1
catgtgatccgttcggtccaatgtagcataagcccagcatggtcattgcatcagtagctgtcatctagtgcttcagggggacgcgcctcctggaggcccattccggggcggggcgggtgcatgcccggttcgggtttggtaataagtaagccgtcgtcccgaagaaagttttcagggggttggtgcggtagcttcgataggcccctgtggtatccgggcgccaaggcgcctcgatacctgtatg

SEQ ID NO: 27539 - DNA, 1869 bp, Glycine max
  Clone ID: PAT_MRT3847_12486C.1
cgcggcgcctggcccggtgttgatttacattaaacattacattacattacctgccgactagtttacgctatcagcaataggaagtcggtcgttcagacacgcacatatctgatctgatctgatctatcgccagctagtttacggtacggggattagcaagtggctcacacacgcacagatctgatctatctgaagctgaaaacgccgacgcccgacggtgatgatgaagatggggtcctcaccttcacgttgctccttcttcctattcctcctcctcctagtggcgctcttcccctcgtcgctctccgagatccggttctccgagatccgaaacgacgatcgctccatcgttcccttcgatcagtttggattcacccacaagggtcgccttgagctcagcgtttccaaaatatcactctccaattccaatttggacctctccaaggtgggattcttcctctgcaccctggattcctggcttcatgtcttccagcaactggaggatggcgagattcggtgcgcccttcaatccgatctggtcaagtccgtctacaccttcaattctctcaacggcaaggactctttcagcacgctctacaaagaagaaaccgacgccgatcagtacaacctcgtctttgccaactgccactcgccgcaactcaaagtgaccatggacgttaaatctgccatgtataatctcgacggaaagagcgacgtccgcgactacctctctgccggcagaaccatccttccgagggtttatttcctcttctcgcttgtgtatttcaccctcgcagctctctggatcagcgtcctctacaagaagcgcttgaccgccttccgcatccattacttcatgctagccgtggttatcttgaaagccctgaatctcttgtgcgaggccgagggcgaatttcgctcttagctctaatgtagcttgattggcactggctggatcttttacattttcagcttcctcaagggcatctcgcaggttctcatcattgtcatcccccttcaagtcattgccttcattgatcaggtcgttcatgataaggaaaaaaaggttctcattgttgtcatcccccttcaagtcattgccaacattgttcagggcgttctgttgttgactgggtgctacttccatgactgggctacccatcaacaagtcttcctgcttgttgatgtcgtctgttgctgcgctgtgcttttccccattgtctggtccatcaagaacctccgtgaggccgctaggaccgacggcaaggccgctgttaatttgatgaagcttactctcttcaggcactactatgtcgtcgttatctgttacatttacttcaccagggttgtcgtttatgccttggagactattacctcctatcgttattcttggaccagtgtggttgctgctgagttggccacccttgctttctatttctttactggctacaagttcaagccagaggctcacaatccgtattttgtcatcgatgacgaagaggaagaggctgccgcagaggccttgaagcttgaagatgaatttgaattgtaatttctttcaaaatacaaaattagttgttgaacaagttggtaccatgctcagcaatgctctcaggtttcatctcaacagccagtagaaatttgcatgttacattttatgggtatagtcattattcataaatcattgtgctatattttgtgttctggactcatgccagtttttgcattagtgttataatatcctaaacccttgtgtagtgctctgaacatatattacttctaagtatagatactgataccttgcaaatatttttttgtcatgattacttttattgtacctatcttccaatttggaacttcttttcctgc

SEQ ID NO: 27540 - DNA, 781 bp, Glycine max
  Clone ID: PAT_MRT3847_124870C.1
aattacacctcgttacccggggatcctctagagtcgacctgcagaagctttatgctacattggaaacactcaagcacaatggagataattttgcagctgaaattcagaataggttgagaataattgtaagatgattgctatgttgtgctctccaattcttatgtacttgaagcaagaaagcatattcatgttgtaatggttttattctttgatgatctttgattaatctctgtttctaatgtattctggaaaatcaggttgcaggtggagatggtactgccagctggcttctaggagttgtatctgaccttaaattacctcaaccgccaccaattgctactgtgccattggggacgggaaataatcttccctttgcgtttggatgggtattttatttgactctttattcaatctgctgaaatatgtgaatttcatgatatgctcaattcatagagttgaccatttccataccttgttataatcacttagatcagtaatcattttgcttacttttttatggtcattttctggtatgaactttatctatcaaattgccattcaaatcatgaattgcaagagtaattttttaattgcgaattcaatgatttaatttactccactatggtacaaactatgtctggatttttgctagatgttttttcttggacatgttgcaatatttgtcaagtatgaatttaatgcatgtggggtgtgggtgttctaaaatattgataaaaaataataaactcattgctcagaacttaggagctaccttcctttt

SEQ ID NO: 27541 - DNA, 301 bp, Glycine max
  unsure (1)..(301): unsure at all n locations
  Clone ID: PAT_MRT3847_124871C.1
cacattatatcaacattttggtgtgagttgcaaagagtgcagttactattcagctgtgtggaatatcaagtcagacctgnttcgtcattatgttncgaaggttctcccagtctgcataatgattntggttcagaagtgtttacagtggcagcaagcgtnctnngcaatgctctggttagaatgtgtggtgttacaatttctatacactttggtcaaatactctgtgtggtnccatgtgtagctnatgaatctgacaatgacggatancatggatatgtctgtgtagactctgnaagataac

SEQ ID NO: 27542 - DNA, 397 bp, Glycine max
  Clone ID: PAT_MRT3847_124872C.1
cccacgcgtccgcccacgcgtccgaaaaaaaaaaaaaaaaaaaaaaaaaaaaaaaaaaaaaaaaaaaaaaaaaaaaaaaaaaaaaaaaaaaaaaaaaaaaaaaaaaaaaagaaaaaaaaaaaaaaaaaaaaaaaaaaaagaaggggggggcggcaaaaaagaacaaaggttaaagaccgggggaaagaaaattaaaagtttttaaatggggaccccaaaataaaagaaaaggcccgtggttaaaaaacttggaaacgggaaaaaccatggcgtaaccaaattaaatggtttgaaagaaaaaccccttttaacaaggggtgaaaaaaagaaaaagccccgaacagacgcactttaaaaacatttggtaaccctaaatgaaaaagggaaccccccttta

SEQ ID NO: 27543 - DNA, 315 bp, Glycine max
  Clone ID: PAT_MRT3847_124873C.1
tcgtgcattcgagctatcccatatctggaaacatggaagtgttttttttaccggatttaaagctcaatcttagtcagagtctgattatgatgaagattccgatgattttgatgaagatattccagttagtgctgacaatggctaacctgcgattgaggtgacgaatggcatcactcctgatgcatatgaagctacacagaatatgatagcaaatggtgaagatggagattcatcctcatctgaatctgatgatgattcacgcgaagatcagctgacagcgaatggtgacatataaagtggcgcaggtgatgatga

SEQ ID NO: 27544 - DNA, 721 bp, Glycine max
  Clone ID: PAT_MRT3847_124874C.1
ggcccaaaaaaactgtattattttcaacattagctttccacaacaggaattgtatacgaaacaactaaaaaaaaaagtcagaattaacaacaccacaataagagaacgcgaaatccctatgaatcatgatcaaatgttgttcctaggtaagtactactaaatagaagaggggtaatcattgttattgttatagtttttgttgttgttgagttcatgttggagagcctcttcaagccaaaaccatgactcctccatcaagtcagggctcaacctgaacatcaagacacaaaactccatctgggtgagtgcaccatctccatcaaggtccccttccctcatcatactcacaagctcatcctccttcaagtcctgcagcccgagaagcgcggcgttgcgtcgcaaactctccaatgtgatcactcctttctccttatccaccagcagctcgaacccgttgcacagctccttcatcagcccctcccctcccagcttgttcgccatcacaggtagcaagtcctcaaatccaatcccagccattgtaaaatccaatgatgtatgccaaagagagaacaaagtgttgaatttgaattatgaataatgttcggtttttgtgactagtgattgggtttatttatatgtgggataagagaaatgggaaaagatgtcaaggaaggagaagtgaaagggatgtaagcaatgatccctgcttggatgacagcct

SEQ ID NO: 27545 - DNA, 331 bp, Glycine max
  Clone ID: PAT_MRT3847_124875C.1
accaggttgttctggtgagttttcttattaacatatgttgtagtttacatttgtgctgttttaaacttgattttctcgttatgttttgcttaatggatagttagcaatttagcatttgattgcggttgaacaatagacattagttgaaaatgtaaaaagctattcaaaatgttggtttggtctttaatcttttgggtttttgcatgggatactgatttctgtcgaaacacagttttaggcattggttccaccagctgctgaagtccaatatgaatgtattagttaaaaaagagattagccagatataatcttttggttagacttaaccaga

SEQ ID NO: 27546 - DNA, 300 bp, Glycine max
  Clone ID: PAT_MRT3847_124876C.1
agagcttgacgcctgcacctcgtagctcgatcgtggcgccacaccacacgctgatttgcgtcttatttgcggtctttttttacgctacctaacatttttaaaacatgttggagaggaagaaaccccaactaaatggacagtttgaggcaatgcttaatgactggagtcattgttctgaccagttgacagttaacagcatcatgccatgatagtttcagtttgaagcctgcagatggagctcaccgttaaaatcgagctgagcagtcagaattccagaatatggtggttgagtgggtctga

SEQ ID NO: 27547 - DNA, 352 bp, Glycine max
  Clone ID: PAT_MRT3847_124877C.1
caagggggacctaaaatttgaaaacacacatcaacccctatataaagggccagcacaagcttccagggtttggttggtccctccaattttggttaaattccactatgtggagggctaaaaaaaataaaatattcctggtcactcctaactatcgggtgaaggggcccacgctgggcataagccccgagcaagccacaggaaaactttgtcatcctaggatgggttaaacatttttgtcagtggactataatcccataaatgcaagttttggtacacgaaaagggccccaaccgcaaatacaacaaaaagaattggcacgcttttaatgcatccagggtttggggacaatttt

SEQ ID NO: 27548 - DNA, 344 bp, Glycine max
  Clone ID: PAT_MRT3847_124878C.1
cacaacattgcaccagctctgtatggcacacctggtgtgaacattaccaagaacgtgatgaccatgcccagcatcaaggttactctaattctaggaatatggggaggcaagggacaaggaaatattatgcaacgtgatcttaggctctgtccatataggaaacgagaccgtgatgatgagtgctggataaccgctgagggtacaagggatagatgcacgctggctaaaatgatggctgaccgtaaaactgcatatcagaacaagatcgcaagattgagtgcgtctatgaggcgctgatctgacgaactacctggtcgtgctgatgaaatcaataggtcctctga

SEQ ID NO: 27549 - DNA, 729 bp, Glycine max
  Clone ID: PAT_MRT3847_124879C.1
tccggtccggattcccgggtcgacccacgcgtccgctcaaatacaatttgctttggaacgaggaattcctgcaactctttctgtcattggaacacaaaaactgacttttcctgataatgggtttgatttgattcattgtgcacgatgcagggttcattgggatgcagatggtgggaagcccttatatgagctcaataggattcttagaccaggcggtttctttgcatggtctgctacaccagtttaccgtgatgatgaaagagaccagaaagtatggaatgccatggtggatataacaaaagccatgtgctggaaggttgtggctaagggtcatgattcatctggaattggacttgttatataccaaaagccaacctcatcttcttgctatgagaaacgtgaagagaacaatccacctttatgtgaaaataaggatggcaagaatatctcatggtatgccagactcgatagttgtcttactcctcttccggttgatggtaagggtaacctgcagagctggcccaaaccttggccccagaggcttaccagtaagccaccgagcttacctacagattcagatgccaaggacaagttcttcaaggacagcaaacgttggtctgaattagtttcagacgtttatatgaatggtctttcaataaagtggtcaagtgttcgaaatggaatggacatgaatgctggttatgcaggatttgccgcagctctcattga

SEQ ID NO: 27550 - DNA, 382 bp, Glycine max
  Clone ID: PAT_MRT3847_12487C.1
atcagcttcaacccgtcgaaacgactacagaagggactttaaaggaagtcattacatttgtggtggcttatgacaagggggggcactaacatcatgcgtagcttatggtgaataatggagtaatttggtaattttattaaacataagctattaacaaatttgtcttctccaggcttttcattgggaacaattaatataaatttatatttacttaatatgggaaagatgaaagaacgaaactcgagcaggggaaagtcctctgttagaataaatgccttttcaaatagaaaaagtttcttcccgcgcaaaacaaaaaaatatttgatgagtttcgatgcacttcccatgtatcttgggatgaccaaacaatggtatgaacttt

SEQ ID NO: 27551 - DNA, 337 bp, Glycine max
  unsure (1)..(337): unsure at all n locations
  Clone ID: PAT_MRT3847_124880C.1
aagtagcangcacgcgtacgtaagctcggaattcggctcgagtaaatgtgctatatttttttttagaaancaaaanatgaagaattactcgnttttnatgtcnccaaaatgatnaatttnataagattgaatcgactaaaaaatgaaatgaatcatttcatattgatagtattgctatgcttagtgtgcgactcgttagttttttagaacggttccaatttaacaaatttataaaccggttcatcgtataaatgaattnaaaaagnactaataaccaacgcatcgcttcggattatctagatctaaagaactagtcanaacanaaaanaatataaan

SEQ ID NO: 27552 - DNA, 328 bp, Glycine max
  Clone ID: PAT_MRT3847_124881C.1
gactacctcaacaacaatactacagcagcatacgtcgtcgtcgtcgtcgatgacctctcctccgccgcatcatcatgccttcggtgtccctcatgataatggtggtcgccgcttcttagctgctcgtcgtcggcggtagcaacaacacctccaccaatgataacatcgaagacatccacggctttgttataatagcagaagatgatcataggaatgaatccttgttgtctgatattgatggtgatgttattgatgagcttactgccggtagtgaagaacagctggccgcggcgtcttctggtggtagtggggccgttgtcgttgccgc

SEQ ID NO: 27553 - DNA, 448 bp, Glycine max
  Clone ID: PAT_MRT3847_124882C.1
gggaaaaaaaaaaaaaatccttttatgggggggtcccaacaaaaatttgttccttttttcaatagaagcccccccctccccatttttcccctggttaaagaaaataaaataaagcctcccccctcccccgtgccagggggggggaccccctttcttctttatgcttggcttggatttcttctgcccccctcagggccctttcaaggggggccccccctccaaggctaacttccctttttaaagggcagcaatagctttcaaaaaccctcccgtttacctgccatttgaaatccctcaagaaaggggattcccgctccaacttgttcagctcatcagttgttaaccccccaactcttccaaagtaggaatttctggggttcatgttttcaacaaacttggaagcaaccttgatggttgggatgaaaaccctttgcccatttttagcatt

SEQ ID NO: 27554 - DNA, 1528 bp, Glycine max
  Clone ID: PAT_MRT3847_124883C.1
cggtccggaattcctgggtcgacccacgcgttttgaaaaggtccgagtccccaggctaaaggtaaaaccacaatcacaaacacactctttttttttctttcctcacttcccttgttcgtttcactctcacaatggactccctctctctcttctgcaccggagcccttctcgccggcggcctctactggttcgtctgtgttctgggccccgccgagcagaagggcaaacgcgccaccgatctatccggcggctccatctccgccgagaaagtccaagacaactacaagcagtactggtccttcttccgccgccccaaggagatcgagaccgccgacaaagttcccgacttcgtcgacaccttctacaatctagtcaccgacatctacgagtggggctggggccagtccttccacttctccccctccatccccggtaagtcccaccgcgaggccacgcgcctccacgaggagatggccgtcgatctcatcgaggccaagcccggcaacaaaatcctggacgtgggctgcggcgtgggcgggcccatgcgggccatcgcggcccactcccgcgcgaacgtggtgggcatcaccatcaacgagtaccaggtcaatcgagcaaggatgcacaacaagaaggctgggttggactctctctgcgaggtcgtgtgtgggaatttccttaagatgccgtttgtcgacaacagcttcgacggagcgtactccatcgaggccacgtgtcacgctcccaagctggaagaagtgtacgccgaaatcttccgagttctgaaaccgggggcgctctacgtttcctacgagtgggtgacgacggataagtacagcggcgatgaccctgaacacgtggaggtcattcaggggattgagaggggtgacgcgttgcctggcctcagaagctacgccgaaatagccgaaacggcgcgtaaggtagggtttgctgttgtgaaggagcgggatctggccaagccgccggctcttccctggtggagccgattgaagatgggtaggatcgcgtactggcggaaccatattgtggtcactgttctcgccgctttgggaatcgcgcctaaggggaccgtcgatgttcatgagatgctcttcaagaccgctgactatttgaccagagggggtgactctgggattttctctccgatgcacatgatcctctgcagaaagccccatgacaaggacgaacaaaactctggttagggtttcgtttcatttggaaattggaaaacaaaaaccaccaccgccaccttgtttctttccggtactcttttttctcattattatcctgggtttaacttgttgttattagttattattactatgaacttggtgtaatttggattttgatcttttcaattttaattttagtttgcaatgttgatctttgagttgaggatgtctatttcttgttttcaatggaaattactagtatttagaatagaataaggtataaatgggaaattagtattaaggatgtctatttttttgttttcaaaaaaaaaaaa

SEQ ID NO: 27555 - DNA, 1393 bp, Glycine max
  Clone ID: PAT_MRT3847_124884C.1
aaagtccccgacttcgtcgacaccttctacaatctagtcacagacatctacgagtgggggtggggccagtccttccacttccaaagtcacaatggaccccctctctctcttctgcaccggagccctcctcgccggcggcctctactggttcgtgtgcgttctgggccccgccgagcagaagggcaaacgcgccaccgatctttccggcggctccatctccgccgagaaagtccaagacaactacaaacagtactggtccttcttccgccgcccaaaggagatcgagaccgccgacaaagtccccgacttcgtcgacaccttctacaatctagtcacagacatctacgagtgggggtggggccagtccttccacttctccccctccatccccggcaagtcccaccgcgacgccacgcgcctccacgaggagatggccgtcgatctcatcgaggccaagcccggcaacagaatcctggatgtgggctgtggcgtgggcggtcccatgcgggccatcgcggcccactcgcgggccaacgtagtcggcatcaccatcaacgagtaccaggtcaaccgcgcaaggatgcacaacaagaaggcagggttggagtccctctgcgaggtcgtgtgcgggaattttctcaagatgcccttccccgacaacagcttcgacggcgcgtactccatcgaggccacgtgtcacgcgccgaagctggaggaagtgtacgccgaaatcttccgtgttctgaaaccgggggcgctctatgtttcctacgagtgggtgacgacggataagtaccgaggcgatgaccctgaacacgtggaggtcattcaggggattgagaggggggacgcgttgcctggccttagaaactacaccgacatagccgagacggcgcgtaaggtagggtttgctgttgtgaaggagcgggatctggctaagccgccggctcagccatggtggagccgattgaagatgggtaggatcgcctactggcggaaccatattgtggtcactgttctcgccgctttgggaatcgcgcccaaggggaccgtcgatgttcatgagatgctcttcaagaccgctgactatttgaccagagggggtgactctggcattttctcgccgatgcacatgatcctctgcagaaagccccatgacaaggacgaccataactgagcgtttcattgggaaattccaaaactataacaaccaccaccttgtttctttccggtactctcttttttttttttcataattattattatcttgggtttaacttattgttattagttattattattactatgaacttggtgtaatttggattttgatcttttcaattttatttttaattttgctatgttgatcatttaaaaaaaaaaaatagggcgg

SEQ ID NO: 27556 - DNA, 626 bp, Glycine max
  unsure (1)..(626): unsure at all n locations
  Clone ID: PAT_MRT3847_124885C.1
ggattccagtcatctctataagtaatcgatcagtggacgccgtctcaatctccttttctggctacacactttcttcaacggtaaatccctctctgcacttcgtctctgttagggattaatcattattttccgcgcaccaaacagccaaagtcaattttcttctctcttctaagacacaccaatgccagagaagaagaacaagaaagtttctttcaccgaagaagatgctgttacgctcatgcagaggtacgacgcaactacggtgttcactttacttcaggaagtggcgcattaccctcaccccaagattgattggtgcgagttggtgaagaaaagcgcgactgggatttctaacgccagagaatatcaaatgctatggcggcacttggcgtatcgccattctttgcctgaaattttcgaagatggggatgaacctttggatgatgacaaggatgatgatagtgacctagagtgtgagctagaagcattgccccctgtgggttggggatgcgcctggggagctnnnnnnnnnnnnnnnnnnnnnnnnnnnnnnnnnnnnnnnnnnnnnnnnnnnnnnnnnnnnnnnnnnnnnnnnnnnnnnnnnnnnnnnnnnnnnnnnnnnnnnn

SEQ ID NO: 27557 - DNA, 453 bp, Glycine max
  Clone ID: PAT_MRT3847_124886C.1
gggaaaacctcggggtaggcccacataaattcattaaagacttgggaaaccccaaaacgggttcgggaacggggggtttccaaggccggggacccaaaattccaaggggaaaagggtaaaatccgggatcaaaaagcaataaaattctcccctcgggggaatcaaaattcaaaatcggcctccccggggatcaacccctgcatttgggggaaacggggggcaaaaaaattctccccccctcgggggaaaaaaaacccaaaatccgcctacggggggaccagcttcggggtatgcagtttaaaggggcccttgctttgttttttggccccccttttaaggtttccggcccttttttggttggggggaaacccccaaaaagggcccaacaggtccatacttcctccaaggggggccaaacaaaccaggtttaaacatcctccaaaagtttttttt

SEQ ID NO: 27558 - DNA, 240 bp, Glycine max
  unsure (1)..(240): unsure at all n locations
  Clone ID: PAT_MRT3847_124887C.1
ccacgctccgctctctctgttattttcttgcagcaccttcattgtcactcagacttgtgtccctaatgtaaatatcattttccaccctttacaaaatnacctccttaaacctcaaatgctattattattcactgtccacacttctttcctncaacttcaacctcaaccncaacctcaaaccccacttaccagttttcccaaattttcgttcttttttcctttccatgagtngatgcatct

SEQ ID NO: 27559 - DNA, 141 bp, Glycine max
  Clone ID: PAT_MRT3847_124888C.1
ttggtcatgaagctggagggaatggtgaaaagccgtaggtggaggtgtaactaatctggaacccagggaacattgccttccttgggttaaccgggaattgtgggacctgccttaattgcagtgaaaagaaaaccaccttgt

SEQ ID NO: 27560 - DNA, 372 bp, Glycine max
  Clone ID: PAT_MRT3847_124889C.1
ggaaagagaattatttggggctgtaagatttgttttgttgtcctcatccttccttccaccatggcgtattctactctttccctctcaatttcaaaagtttgaaacgcaccgtaaaaactaaacgtctaaacgctgcgtctcagttcccatggacgacgaagctattgctaacgctaacggagctccgtcacctccatgtgtcgtttcggtgtctgcactctccggttcccgccgccgcctctcgacgagcttcctggagctgagccgccgccctgtctcgtcgtcggagaagctcaagcctatggcgtggatatctctccagggacggctcctcaacgccgacgaagccagctcggcatcgaacatctgccg

SEQ ID NO: 27561 - DNA, 610 bp, Glycine max
  unsure (1)..(610): unsure at all n locations
  Clone ID: PAT_MRT3847_12488C.1
cttcgggttgggccggtggtggattaacattaaacattacattacattacctgccgactggggctcgctatcagcaatagcaagtcggtcgctcagacacgcacagatctgatctgatctgatctatctgaagccgaaaacgccgacggtgatgatgaagatggggtgttcacgttgctccttcttcctcttcctcatcctcttagtggcgctcttcccctcgtcgctctccgagatccgcttctccgagatccgaaacgacgatcgccgcatcatccccttcgatcagtttggattcacccacaagggtcgccttgagctcagcgtttccaaaatctcactctccaattccaatttggacctctcgaaggtcggcttctttctctgcaccctcgattcctggcttcatgtcctccagcaactcgaggacggtgagattcggtgcgcccttcaatccgatctggtcaagtccgtctattccttcaattctctaaacggcaaggactctttcagcacgctctacanagaggaaaccgacgccgatcagtacaacctcgtcttcgccaactgccactggcagcaactcaaggtgacaatggacgttaaatct

SEQ ID NO: 27562 - DNA, 393 bp, Glycine max
  Clone ID: PAT_MRT3847_124890C.1
ctcgagccgatcttgaaatacactagcaccgcttctcatagttaacattacaatggatgacgaccaggtggaggtctgcatcgacgacggcgggggggtcaaccacaagcaccacacgtaccaacgcccaactcgacgtaaacgttcgggcccgtccaaaaggcgtgcgaataaattggattaaagagcggtacgaaaccaacgcctacatcaagctcatatcccaattgtgatgaatgactatactcgaatcgagaaatcatcgtcaaacgccgtttcactaattgacacagctacgcgctacttttgcaacaacagattactaccgaactagatttatttcttccttacaccgattctttctgtacctcactactactggacctcctattg

SEQ ID NO: 27563 - DNA, 1340 bp, Glycine max
  Clone ID: PAT_MRT3847_124891C.1
tttgagtttgagttggtgatggtggtggtggaggaagagtgagggtggttttcttgtgatggtgtattgggcgggaccaggcgagaaaatgtaaaatattttccaaagatcagagacaatcagtgtcccacgttgttgcgattgcgactctctcttcctacgataaccgtttcctctcgccggaaaaccgacattgatctctctctccggcgatccccgcccatccctccgccatgagttccggcgagctcctccacatacagccccaggagctgcagtttccctttgaattgaggaagcagatctcgtgctctttgcagttgtctaacaagactgacaactatgtggctttcaaggtcaagacaacaaatcctaagaaatattgtgttagacctaacactggagttgtgatgcctaggtctacttgtgatgtcatagtgacaatgcaagcccaaaaggaggcacctcctgacatgcaatgcaaggataagtttctccttcaaagtgtagttgctagccctggggcaaccacaaaagatatcactccagaaatgttcaataaagaatctggtcatgatgttgaagagtgcaagttgagagttgtttatgttgctcctcctcaaccaccatccccagttcgagaaggatctgatgaagattcatcccctcgtgcatctgtatctgagaatgggcattcaagtgctgcggaatttacaggggcttcaaaaagctttcaattagcggggtgaacatcagaatgcttcctgtaaggcaagagctcttatttccaaggtaactgaggagaggaattctattgttgagcaaaacagaagacttcagcaagaactggagcttttgaggcgtgatgccagcagaagccacggcggtgtaccattcatgtacgtagttcttgttggcatcattggactcatcttgggtttcctgttgaagaggacgtgacctgagtgatggccaagttctccaaaatgagatcaattgtagaaagcaacaagaaatatgtgcgatgatgtgaaaaaaccaatttgttgtcttattgtcatgtattgctcctacaaatttggaatgtgtggtcaaaaaataggtacttgtatcagccatagcaatcatagacaagtggacaaatttgtatcatgggaagtgtattgttatctgatgtggtacatgtgatcaattctttagtagttcctatttcccagtctaattgctaaatcatggcaccatgatagtgcctttttgaagctataaaattattcgtcgtaacgtaaaccaaatatccgaaaaaagacaaatgaagaaaaaaaaaaaagaagggcggccgc

SEQ ID NO: 27564 - DNA, 807 bp, Glycine max
  unsure (1)..(807): unsure at all n locations
  Clone ID: PAT_MRT3847_124892C.1
ggagaattgggctgcagagcaaaatgcttgtggaatgggcttaactggtgaacaggctcctcatccatattcttatgctcaaaagctcataagtctttgtggatgggagccacggtggcttccgaacgtgcttgactgtgaagaacagtcagctgaatctgctaaaaatggttacagctctggtccagccaaaggctctgcacctgatcctgctccaagcaagaaggagtattcaatttcttccaggaaagatactggggataatgatgtactcggttcagagtttaattgcgagtctaggtcacctttgttggattgtagcttatgtggggccacagttagagtatgggatttcttgactgcctctcgtccagttcacatgactccctgtgggattgatacccctcaaacaagcaagaaaatagcatcaacacgaggaataagtgcagctagtggtatcaatgaatgggctgctgctgatggtgttgaaaacgagaggactggagatcgtgatgaggctacaacacctgataaaaggcaacttgtatccaataaaagtttagatttaagtcttaaaattgttagtgggccatcctgttctccaataatcttgacttcaacctcaggtcatgtgcaaggtgctggtgaagggaaagattaatgattgngcgaccttctggaagcgaggcaacttcttatgaatcacaaggccccaatgtatgtaaacgcaagttggatgatggtggaacaacatctngaagccacatctaacatgncacagcagacagtactgaaagactgtactga

SEQ ID NO: 27565 - DNA, 448 bp, Glycine max
  Clone ID: PAT_MRT3847_124893C.1
gaggccgaaaaacacaaggggaaggaacctccatggaaaacatgggctaaaaaaaaaaacaattgaccactttggaaaaaagggggggccggagggggcacacaacaaaacattcacattttgcaattcaggcaggctttaaaccctttcccaacaaattatgaaaggggagaatttttttcatgcaaaaaaaaaaattctgttcaagaattgcggggaaaaaaattgcataggcaaaattaaacattttaaaaaccccaaacagggggtacaaaaaaacctttcctttttggcattcaccacggccaaacaaaaatacttgaaaaaaaaaacggaaatcctctgggggaacaagggcttttaaaaagcggcaattttttacaagtttaaaagctggattttgcttaccaaattccaggtattgcattcaattatcatttatcggggc

SEQ ID NO: 27566 - DNA, 608 bp, Glycine max
  Clone ID: PAT_MRT3847_124894C.1
tcgggctttttccatgtgtttttcggaagcaccgtcattgagtagcccatcatttagccacctgaaaccaatcctcgtgcactcactcactaggcttcgtgatagctatcttccacgccgcctcaccccgtcgtcgaacatcttcagccgccgtcacttaccgtgatcatgtagctaggttttggacaggtgcatgtatagaacctaaaggttgagcttctaaatgagaaatagcgttctgcgttgaaatgaatgttccacaaggagtgaagcataattggttggtttatctagagaaccttgaattgggttgtggctaggcatttcatggttgagttgtgagttgggtaactcctattcttgtttcaattcatgaaaatgacagtacaatgtgagatggacaggcagggctatgaaggtagcatgaagcataggttagacaacgaaataatgtatatgagatgtagcagcactttattttctttttagcagattttttttcttgttgcgcatttatgatttcttttgctactttttttggaacgttacaatttaaaatattgtctataatcaattagattcgcatttctttataaacagataaaaat

SEQ ID NO: 27567 - DNA, 1182 bp, Glycine max
  Clone ID: PAT_MRT3847_124895C.1
taaaggctacacaccatgactgatagggttcacccttcggccaaaaccaccgccaacgccggccccaagccgacattccccgctacgaaatcccagctttccggcgccaaccgccccacctaccgcccccaaccgcagcaccaccgccgccgccgtagtcgcggatgtgcctccaccctctgctgctggctcctcctgatcctcctcttcctcctcctcctcgtcggtgccgccggcaccgtcctctactttctctaccgtccccaacgacccacattctccgtcacctccctaaaactctcttccttcaacctcaccactccctccaccatcaacgccaagtttgacctcactctctcaacaactaaccctaacgacaaaatcatcttctcctacgaccctacctccgtatcccttctctacggcgacaccgccgtcgccagcaccaccatcccctccttcctccaccgccaaaggaacaccaccgtgctccaggcttatgttactagcactgaggaagtggtggatagtgacgccgcgatggagctgaagaggagcatgaagaggaagagtcagctggtggcgctgaaggtggagctggagaccaaggtggaggcccagatgggcgtgttccagacgcctcgagtcgggatcaaggttctgtgcgacggcgtcgccgtatctctccccgacgatgagaaaccggcgacggcgtcggctgagaatacggcgtgccaggtggatgtgaggtttaaggtctggaaatggaccgttggatgatcagaagcttttagacatgcacacgtttgatattatatatgttgtggttcttgtgtttcttttttcttttacattttttttttcattctcatttggcatatttttctgaaatttgtttacaattaattgcatgcttgtaatttgtaaatgttacttcgcggcaaggagcatgaatcagattcaagctttagcgggacacaagcggtgaattgtgtcacacacccttttaaatttattttattttaatatcatggccatgctaataatgaagttcatatagtgttcacggcccctttaagtcttattcttttctttttcctacaaatgatgtagcattgtactcgtaataccatttttaatcttttttttatgtgcacataaattacaatcatggttggagtc

SEQ ID NO: 27568 - DNA, 394 bp, Glycine max
  Clone ID: PAT_MRT3847_124896C.1
tacggctgcgagaagacgacagaagggggagagagaaaggctctttggcttgtattgaaaggtaagcaattgaaggttagaggccgaaagagagtggaataacagactagtcttaggaactccctagtgaaggtgaaacttgctctaagtgaagcaaaatcacttgcttgtgaagaagctcacaaaatctcttgcaagttaagtttgtaggctctgaccttgtttttgggaattgcaagctaagctggtttagttagtagctagcccttctcgcccttcttatatatattccacaattcaacaatcaatcatcatgcctaattgcctcttgttgtgaagggagaaagaagattctcatcatcatcacattcatcattttaggttttgaaaaacc

SEQ ID NO: 27569 - DNA, 1138 bp, Glycine max
  Clone ID: PAT_MRT3847_124897C.1
agaaaaagcagtgaccaatcagaaaacttctgaagcctggcaggaagatggaaaagaatccatgtcccaggctccatccaagttagtgaaactagagtcgaacaagaaagtggactgtccagctaaggcagttgagcccaccatattaatgattaaatttcctcctgaaacatcacttccatctattgcagagctgaaggcaaggtttgctcgctttggtccaatggatcaatcaggtttccgtgtattttggaattcatcaacttgccgggttgttttcttgcacaaggttgatgcacaggctgcctataaatattctgtaggaagtcaatccttatttggcagtgtgggtgtgaggttttttcttcgagaatttgggattctgcacctgaagtctctgaagctgccaaggctagggcggatgatggtgccaacgaaacaccccgggtcaaggatcctgcagggattcaccgccagacactggtatcatcacagcaacctcttcttcaaccgatccagctcaagtcctgcctgaagaaatctacaggtgatgactcgggtcaggttacgggtaatggaagtagtagtaaaggaaactctcgtgtaaaattcatgttgggtggggaagaaagtagtaggggagaccaattaacgtcgggtagtagaaacaacttcaacaatgctagttttgctgatgctggcgcacctcctgttgcaacggattttaatagtaagaacgttcagaaggtcactttacaacccccgttgccgccaatttttccccttcctacccagtttataaaatccccccaacataatttgggtaattttgaattggcaatggcaccccgaaacagccccaattttattaaccccattgcatcagcagctactgcaaccccagttgatatatcccagccaatgataaaccttttgaccaggtgcagcgatattgtgactaacctgacgggtttattaggctatgtgccttaccatcccctttgacaaaaaaaactcgacaatactcatcgagttggatgagaaggcccggggtcatgtttgggccaaaaaatatcccagagtgggtttatgtgacattttttgggctccaaaaatgaaatgccctcatattttgtcc

SEQ ID NO: 27570 - DNA, 470 bp, Glycine max
  Clone ID: PAT_MRT3847_124898C.1
aacatggggaacactttattacgtattataaagccaaagatccaattgtagataatcaaccacatggcttgtgatgtccacgttaacagggtttggaagtaatgttctcctttgggacccacattaaatcctatattggatttctcacgaaagcgctacgagaaaatattatattagtatattcacagaatgtttcattgaactcacgcacactatacattgcgaacctggactctaggaaaagacaaccaatcctccctctaggacctttgccatatgctaaacgacttggctcatcacaatatttctttatccatgtctgtgataagcctaatgtctaagccaagcctatagcctttgtacgggcgaactgtctatacttgaactccctattatcggacaatgacatctgtgcaaacctgaggcataaccataatattgccatttattggggggttgtaaaaacacag

SEQ ID NO: 27571 - DNA, 238 bp, Glycine max
  unsure (1)..(238): unsure at all n locations
  Clone ID: PAT_MRT3847_124899C.1
taannantcnacnnnactcagtagncnnnggncggnannatngnnggtntanangngnngttagnctnttcgnattngacttaggngtnnnngcagaaggtaggctngagnagtntgtnnagtnntgctgtgngtctannggnaacntaggaaganngggagntcntgtgaagnanntgnngatgcaanagtnngnggaanntnttgggngancatanatnanntantgtnntnanat

SEQ ID NO: 27572 - DNA, 232 bp, Glycine max
  Clone ID: PAT_MRT3847_12489C.1
cgcatttatcgttaacatccggtatagcagccaacgaacatacgtgcaccagtattctaagttatatgagacctaactagtattataaataggaactagcatgaccatcatcaacatgcaataggcagtgtaaaccaaggcaaaacacaactaaatgccctaagcaaaaatagcaaatcttgcgaagggccaaaaaaagcgaaaaggcccaaactagagcgccaaccccaac

SEQ ID NO: 27573 - DNA, 526 bp, Glycine max
  Clone ID: PAT_MRT3847_1248C.1
gggtaaataaacttgtatttaccatctcaactctctctatcttacggagaactgcgcggcacctacgtagagcttgatgggttatataagctggacccttcacaggctttcacacaaagagaattttttgcccccttgaccaatgaagatatacgcttactggatagagtcttgtttttaacagagatggttctacgaagacagggcccagagtatggacaagaggagagcgaccacacggccattaccacactattttgacctatcccagacaggtcatactggatgctagacaaaaaatattttggccccccaggagcatccgctcttagctttttctgcggccctaccctatcccagcacccaaagtgtcattccataagatccatcctggaaggggtccgggccacactcgcatgacttaccaaacattggggaggatggggatgctaaccacagtagtggctgggcagctctccttggaggcaccgaactttcaacagaggacctggattaggagctgctt

SEQ ID NO: 27574 - DNA, 1122 bp, Glycine max
  Clone ID: PAT_MRT3847_124900C.1
aggaaacacgaaattggagcgaaattcattaatgggcaatcaaggatcaagagctactaaaaccgcaatccttgtcaaggtttttttttttacagtccccactttacatcacagatatattcaggactctttcctttccctctttttttcttttttttggtatttcatcttcgtttaattatattatatatcatcgtaaatttccgtttatcaatttctttctatagtaacacctgcgtcttaatctcagtacttcagttccagtatttcaatattccttctaaacgacaccgtaacgctgttgccagtggttcccgttgtggatcagataaacgtgtccaccgttcccgtggtggtaaccgtaccgcggcagaggaacattcctcccggaggatttcgatttctccatgccgaccggatacgccggcggctgcgacatctgatgtacgcagcagtctgaaaccagcgccggagccctgtatctccggccagattcaccggagccggtagggctgtaatacgatgaagacgacgacgatgacgaagcggaggaggaggagatggacgccgatttcgacggagcagtggaaaacttgttcggcgatctcggcggcgtgggcggcgtgggcggcgtgggcggcgagaggaaggctctgattttcagcgacgaaacacggtcgtattcctcgatgagatttgcgagatcttcgtcggaggttatggagacgagagcgtcgaggtcttcggagggtaattggcagcggaggtgcctcacggaggcgccgcagagctcctccagtttcagcaatagctcggagaatggaatggagcgatcgacggcgaggatgcgggtgtggccgccgaggtagcggagcttgccgtcggggtagcgagggaggattttgccgccgtagctacagaggaatttgagagtggatttcggaggttcggaagtgaattgggctggtccgaacatggttggttcgggttcggatttagattggggtaaagtgaggtccagttttggaataaagtggaaagaaaagagagagagaatgttgttgagaatttggagtttgagcccacgcgtccgcggacgcgtgggtcgacccgggaattccg

SEQ ID NO: 27575 - DNA, 673 bp, Glycine max
  Clone ID: PAT_MRT3847_124901C.1
gatagactctacatgctgagatccgttgttcccaatattagcaaaatggacagggcttcaatccttggggatgcaatcgagtatttgaaggaacttctgcaaaggatcagtgagcttcacaatgaattggagtcaacaccagcaggtggctcttcaagctttcttcatcatcctttgacacccactactctaccagcccgtatgcaagaagaactttgtctcagctcgttgccaagccccgagggccatcctgctaatgctagggttgaggttgggttgcgcgaaggaagaggtgtaaacatccacatgttttgcgaccggaaacccggactcttgctctctaccatgacggctctcgacaaccttggactagacattcagcaggcagttatcagctatgtcaatggatttgctatggatattttcagagctgagcaacgcaacgaaggtcaggatgtccatccggaacaaatcaaagcggttttgttggattcagctgctggcttccatagcatgtcctaattgcaaaaaacaaactactactgaaaataccttttcaattagtcaatttagcaatcttaatgtttttaacgctcaaaattcaactgtactatatacaggctcttttaacttctgctcagttgaattaggagaaaatttattttaccaatta

SEQ ID NO: 27576 - DNA, 259 bp, Glycine max
  unsure (1)..(259): unsure at all n locations
  Clone ID: PAT_MRT3847_124902C.1
tttttaaacaaaccttctctaaattattttcttcaatctancataaatgtgccaaagttttaatttaaaaaagaatctaacaactttttacaatcctttttttttccatacttattacacaatacttcttcatacttaaacaaactcttcctttaactttgttcatactcacttactcaatctacattacctttttctaaatacttatttaatactttctaattatactctttctacatttcccattattatattcatc

SEQ ID NO: 27577 - DNA, 117 bp, Glycine max
  Clone ID: PAT_MRT3847_124903C.1
atcatatacacttgaacagctttccgaaggcttcgtcatctagttcatattttgtataactgcctggggggtttccagccgaggcgtgactcctatgctcgcatcatctctatggac

SEQ ID NO: 27578 - DNA, 768 bp, Glycine max
  unsure (1)..(768): unsure at all n locations
  Clone ID: PAT_MRT3847_124904C.1
atccgcccccggaacccctgggcccaggacaaagaccttcttgactatgaggtagacagtgacgatgagtgggaagaggaggaacctggggagtctttgtcccacagtgagggggatgaggatgacgatgtgggggaagatgaggatgaggacgatggcttctttgtgccccatgggtacttatctgaagatgaaggcgtgactgaggagtgtgcagaccctgagaaccacaaagtacaccagaagctgaaggccaaggagtgggatgagctcctagccaagggcaagcgctttcgtgtgctgcagcctgtgcacgtgggatgtgtatgggcatcagaggcagccaactgcacgagttccgacttgaagctgctgcagcagttcactgcatgcctgctggatgtggcatcccctgatgagccagaacccggggcctccaggagggaaaagagggaccagcatatcctggcccagttgcttccgctgctacatggcaatgtgaatgggagcaaggtgatcatccatgaattccaggagcaatgccgcaggggcctgctgacccttccaagtcccaccccacacctgcagatgcccaacttggaggatgctgttgctgtgccatccaaggccaggctgaagcgccttatctctgagaactctgcctatgagaagcggcccaacttccgtatgtgctggtatgtgcacccagaggtgctcaagagctttggccagnagtgcctgccagtgccctgccagtggacctacatc

SEQ ID NO: 27579 - DNA, 326 bp, Glycine max
  Clone ID: PAT_MRT3847_124905C.1
tctaatcgcttgccgaaccgagtcttttgccgggcggcaagccccgatgcaaaggccaccaaggtccgccgctgaccgcatgaacgatcgcgtatccaacagttccgccatgacggagtcctccgccgtcgagattgagatcgcgacccgcaggctcatggcggcgctcgacgcgctcgagagcgcggtggagcgccggcgcgacgccgatcgcgacgagaacgagctcgccgcgcgaatccaggcgctcggcgcggaccgctcgcggcttgccgatgagctcgatggtgcgctggtgaaggcgcgcaagctcgagcgcaccaatc

SEQ ID NO: 27580 - DNA, 186 bp, Glycine max
  unsure (1)..(186): unsure at all n locations
  Clone ID: PAT_MRT3847_124906C.1
ncnacanngtaacgntananccnncaggganantccgagactncgaagactcgtatccgngccnaactctggcctggtncgaaaagggnnttgncgtcacgncntctcngggcagaccactngcnttcaagacngcccgtcanaatatgncnncaatanngacaccatnatnnnccncacnctcat

SEQ ID NO: 27581 - DNA, 249 bp, Glycine max
  Clone ID: PAT_MRT3847_124907C.1
aaatattaagatgctaaacattggaacacttgttgtactctttgaatttctcatacacaattatacctatgacacaagacacaacaacccttgtacctgcaatcataacttttagtaactcaaccgtagatgtagaaataatagactatcttcccacccttttcaaaactgattaacctacttatgaaaaggactttagctaacaccaacctactgagaagttttgcaatggaaaattaactactgatt

SEQ ID NO: 27582 - DNA, 1545 bp, Glycine max
  Clone ID: PAT_MRT3847_124908C.1
ttttagtctagcaagatttgctcagatgatgtggcggcttaatttctttgtggtgttcagttgtattgtacttaacaacagttacatgttatactacatctgccccatgcacactcttttcactcttatggtttatggggcacttggtattctccacaagtacaatgagattgggtcagtcattgctgtaaaaatcattggttgcttcttggttgttatcttagtatgggagatacctggagtctttgaatggctttggagtccatttactttctttctcggttatactgacccgaatcctgccaaatcacatctttctcgcttgcatgaatggcattttcgttcagggcttgaccgctacatatggataattggaatgatttatgcttattatcatccaactgttgaacgatggatggaaaaattggaggaagcagaaatcaagcgcagaatatcaatcaaggcaactgttgttctgatatgttcattggtgggttatttatggtttgagcatatatacaagctggacaaggtcacatacaataaataccatccttatacctcatggattcccataacggtttacatatgcttgcggaatgttacccaaagttttcgtagctatacactgaccctttttgcatggcttgggaagattacactggagacttacatctcccagatccatatctggttaaggtcaggtattccagacgggcaacccaaattgttgctttccctgatcccagactacccaatgttgaacttcatgcttactacttccatatatgttgcaatttcctataggctctttgacctgacaaatacactgaaaatggcatttgtacccagcaaagacgacaaacgtcttgtacacaatttaattacagcaacaacaatctcagttgttttatattctttgtccctcggcttccttagggtacctcagatgttggtttaaacatttgaatatgtatatatattgttgcaagcttcctgtggactcggaagaattttcggcagctgctacaattggtttgtcaggccaactctttaccgaaagatgcattcatctcttttttgtaagttaaagaagtaagaacttgtaccaaaaaaaaagaagcaaaaattaatcattctaataggctaatagctgcagttttagggggttgaaagttgtatagatataagagggtgggcgcatggcatcgcattttttcctctatattatgcaacatcattttttttgttagtattgtaaaatgatcaatcacgcccctatatccccatctactatttatgtcaaatagtcgatgaaactaggttatgaggaggaactaaaatttttgctagtttgtcactaaaaactgccttttgattaccgaaagttgtttcgggagctcaatagggtcaagcatgcttttaggctttgggattataaaaaaaaaaaaaaaaaattaaaacctcgactagatggtggcaaatccaagcttatattatttccttatgttgggagtctgggacaacttattactgctggctaag

SEQ ID NO: 27583 - DNA, 630 bp, Glycine max
  Clone ID: PAT_MRT3847_124909C.1
tgaaaatggcatttgtacccagcaaagacgacaaacgtcttgtacacaattttattacagcaccaacaatctcagttgttttatattcttgtcccctcggcttccttagggtacctcagatgttggtaagggttattgcaataacttgatctggtctactgacttaaattgtccttgcatctaagtaatttgcagtcaatttgttaagctcatacttgctttccatacacaacacttctggcggtaagaacataatttggtggtaacaatttttgagacaattgtgacgcttctggtgttgtatgggacaattctgagtgtataatatctagtaatatgccatgccacgactataaagccagatgcagcccacttgtgtagaacattttaaattttattgttttacatttgcatttgatgtgctatacatttatctaaatctagatactcataaattcgcaggtttaaacatttgaatatgtatatatattgttgcaagcttcctgtggactcggaagaattttcggcagctgctacaattggtttgtcaggccaactctttaccgaaagatgcattcatctcttttttgtaagttaaagaagtaagaacttgtaccaaaaacccccccc

SEQ ID NO: 27584 - DNA, 580 bp, Glycine max
  Clone ID: PAT_MRT3847_12490C.1
ggcggtcgttccctcgtcgagcgaatagaacgtgtatatggcgaatgtcgccgagcaggccgagcgctacctatagatggtggagttcatggagaaggtctccgccgccgccgacaactaggaacttaccgtggaggataggaacctactatccgtcgactactataacgtggatcgtagacggccggggccttgtgtcgcatcatctcctcgatcgaccagaaggaggagagccgcgggaacaatgatcacgtctacgtcatcctcgactaccgatccaagatcgagtcacgagctctccaacatgtgcaacggtatactcagactagtggactctcacatgatgctatccgctttctgcggcgattccaaggtctgctacctcaagatgaaggaagatgaccacagataccttgccgagttcatgagcggcgccaagcgtcgagaggctagcgatagcactctctctgcatgcagagtcgcacagcacgatgcgaatgcgcgatctgatgcaactgcttccgataagcgtggacatgcgcttgactatatgtatgagacttagacgtccttattctac

SEQ ID NO: 27585 - DNA, 520 bp, Glycine max
  Clone ID: PAT_MRT3847_124910C.1
gaaggcatgtagtggtactagggaagaaaagctagtaaaagttctctagtaagatcactttcaggggatattatagggaagaaattctagattaagaatagaacttgtctatagtttggaattatgcactcgatttgagattccatttgaatggatatgtcaaccataacaactatattgaattacaatatgctatctttgtgaattaaatatgcatatgacatggaaaatggaaataagtcatgacacatcctgacaaagcaagggtatagataatgatatcttctttctatgaatcctttgcaagaaaaatggaaagagcaaataatgattccttaggtaatgaaaagagcatgtagtggaatatcctgagtcccaacacgaaactattaagtaaaatacagagattccttaggtaatatttggatattgatgggggcataacaaactgtgttaactaccccagatctttctttcagagggcatttttttttgaaatagacatggtttcagatgtgtg

SEQ ID NO: 27586 - DNA, 278 bp, Glycine max
  Clone ID: PAT_MRT3847_124911C.1
aaacatgtcacgatgaagcgtatcgggagtgagagagaagtgtctaccagacatcttcaaacgcaacgagaagtcagtgcgtgggcgagagtgagcactattcggagtgagcggaggtatgattaattatggtgatagcataaggaacaccttggtaagagtttgaagttgggtacggtggatggggataagatgtcccggacaaggttgaatctgccccgtcgagggaatatgaatgtatccccgacgcttttgatggttatcactcggtcaggctg

SEQ ID NO: 27587 - DNA, 223 bp, Glycine max
  Clone ID: PAT_MRT3847_124912C.1
agttctctcccctgaacagtttcttattctcaagcaaaagggcaccagacttccctagaaacagagaaagtatgacaaagttctttaataagaggagtttacaactagtactaattataaaacacctctctacaagtccttaacaaaattcaattctaattataactaaccaaccttctataaagaaattcctaaagccataaatcacaatccaaaccctaat

SEQ ID NO: 27588 - DNA, 275 bp, Glycine max
  unsure (1)..(275): unsure at all n locations
  Clone ID: PAT_MRT3847_124913C.1
cgcttgatgtactgtttctgcatttaattaacatttttcaatcatgctagtnttttcntttctttccatcctttccaaatcaatggaatattttatgcattattatttaanatgataganatgcaccacttctattgtgctttnaatcaaacctgtttaatgttccaaaaaattggnaattagttgttnacaattttnatataaacatttgantctctctatatcttctgctcatgctattangtttgcntatttatctttatgtgaatgantag

SEQ ID NO: 27589 - DNA, 671 bp, Glycine max
  Clone ID: PAT_MRT3847_124914C.1
aagagactcacctcctcaacgaagctcaatctataggggtgtcacaaggcatcgatggactggtcgatacgaggctcatttgtgggataagaattgctggaatgaatcacagagcaagaaaggaagacaaggttttcattattttgctctctataatctttagtttaattttctgatttccttcgctttatatgatttattgtcatattaattatcttgggttggttgacaatggcaatggaaaacaactggatgcagtatatctaggggcatatgatgatgaagaagccgcagcacgtgcctatgacttggcagcattgaagtactggggccaagataccattctcaattttccattatcaaattatgaggagaagctcaaggagatggaaggccagtcaaaagaagaatatattggatccttgcgaagaaaaagcagtgggttctctcgaggagtttcaaaatacagaggcgtagcaaggtacttgaaccctgctctgttcactgcaaaatgctaggttttgcaatttttcaatctgttttacggtagatcatcatggtcaacaaaataaaccattgatatctttgttgaattcagaaagtggggcgtgcacgaatatatatatacacacacgagtgtacgaaatgtttttagaacataaaattgtggt

SEQ ID NO: 27590 - DNA, 4131 bp, Glycine max
  Clone ID: PAT_MRT3847_124915C.1
tagaagagactcacctcctccgaagctcaattataggcatgtcatagttttaggcatcgatggactggtcgatatgaggctcatttgtgggataagaattgctggaatgaatcacagagcaagaaaggaagacaaggttcttcattattttgctctctataatctccatatagttttctgatttccttcacttatatgattatttgatttattgtcatattaattatgttgtgttggttgaaaatggctatggaaaacaactggatgcagtatatctaggtatgatttgagagtattaattaattagcttgcatatataacaaaaaccttcattatttgttccccttaaattggcggatgggggacgatttaatgattgcaataaacttgggtttgctaggggcatatgatgatgaagaagccgcagcacgtgcctatgacttggcagcattgaagtactggggccaagataccattctcaattttccattatcaaattatgaggaaaagctcaaggagatggagggccagtcaaaagaagaatatattggatccttgagaagaaaaagcagtggattctctcgaggagtttcaaaatacagaggcgtagcaagacaccaccataacggaagatgggaagctcgaattggaagggtctttggcaacaaatatctataccttggaacttacggtaatttcattgtctatgatctaatgtaaagaaagcgcatgcatagatggatgctacttcttattgaaattttatgtgaatttcgttaaataaagaataaatttatatcattgagtgtgactcacataaaatttaggattaaatgtaattttagtcaattcataattttaatttttctattttaaaattaaaacatttatttttcttattttaaaaaatttgtaattttggtttttctatttcaaaatataaatatttaatttttatattttaaaaaattgacgattctggtttccttttttagaaaatctataattttaatttaatctttaattttgtatatgctttatttcttttatttcttattttgtaactaattaaatcaaattttgatgataccttaaatgaatatattagatttataattcaattggaccaaaagaaaaaaataaaacattgataaaattgagaatttgatcaaaattacaattttttaaaataagaagactaaatatctattttaaaacgggaaagactaaaattgtatattttttaaaacaaaagtactacatgtttcaattttaaaatatgaataaaataaaatagggaccataattacatttatttctaaaatttatataataaaaaaatgtgtacagaaatatattattaacagttttgaaaagtaattttcctgcattatattattgttattcaaatctcaagatgtctcaaaataagaatattgttagttattttttaaaaaaaaattgaatatgtgattttaaagtgtgcgtctatacatataatttgtcaattatatagttcaggggacgaaatgttttttaaaatcctaatcaaaaggtcattttctatgcatttgatgtacaattctcttagacagaagcatatggccttaccttagcatttgaatgcatttacatggttcatatatagcatttcattatcatcatttatatttggttatatttgctacgaattataaaacatgcatgtgatatgggcctatgtcagcactctaaataatgaacaaattaaattgtatgtttatgtattggttgaatataaacgaaataaagtagctaatataggtgtagcgatgtttaattaattaagagaggatgtacccatacctgaaattttgaaaatgtatttgaccattctttccggttctaacaagaaagtacctacttggtttcaacatggtcccgcggatcaaaatagtaggacaaatataaaggtcaacatatgcaatcagatcatattggttgtgatatagatcaccaaacttcaactgcttaatagagctatttaataatgatatcattcttttctagtcattttaatataaaccaaatcggaagaagaaaaagagaaatcctagaccgacatatgcaaacaataatacaattaaatttgcttacatgtgtgtgtccatatgttattatgtcgtattgtagctacacaagaagaagcagccgcagcatatgacatggcagcaatagaatacagaggacttaacgcggttacaaactttgacctgagccgttatatcaattggccacgtcctaaaacagaagaaaatcatcaaactattcctagcaatgaaaatgtaaactctaatgctgaacttgagctaggttcggctagtgatgagatcacagaagagggtgtagcaccatcttcagaatcaaatccttctcgtcgcacattccctgaagacattcaaacaatttttgaaaatcaagattcaggcatctacactgaaaatgatgatatcatttttggtgacctgggctcctttggtgcaccaatttttcattacgagcttgatgtttagaattggaggacttcttctggccaatacgttatttttcaaaagggggtaatcaaccaaaaaagatgataaagaaattagggggtaagagtaaacattttagagatcgagtggaagattctttaaaagtaacatacaaggggggaagagggattggatcattttatttgcgatagaacaagatgcatggcatacaagtacaactgcctcattttaacaatttagttttattatgtatgtctccacaagcgtgggtagatgtcacaacatttagttattataagcaataagaataatatttttttaaagataaatgttaaattattaaatcatatttaatttgttaagttttaaagattaataaaaatattttttaaatgtttaatgatgatattttgtgtgtcatttaattgtaaattattattgatataatttttaagataattttattaaaattaataatttatcctaaataataattttttattgaatgataatataaaattattttatattattaacatataattattttttttcatttcttaattagtcatatgatcacgattaattttaaatttttgcctcccacaattgtattacaaacacattttgtctttttatgcaaatttgcaacgaaataattgatgtgtttacggaatcaaacccaaaacaaaactaacatagtttcatgtcactttaacattaatttacacacaggcgcactaaagctaacacattttcatgttactttaacattaattttcatttttaactatacttgtttgtctttttttataaaaaaaaacttgtatatgtaattaccaatcataacagcattaatccttattcaagcgacaaattactgtcttttgacgaggtgattgatgtgtttaagggattaaacccccaaacagttttttattttattttatgaaaagctaactcattaatcttcaaaatttacacacaggaagagtcttaactcacgtgattactttttcatattttttatttttattttgtttaaatattatgatttgttggatttacttagattaatggctgagattttgtgtaagtcatgaaacttatacttggtgtgagatgatcttatcctatatatatatatatatataggataagtgtggtaagatgaagccatgaagagccgtgaaaaaggataaaataaaaagaaattaataagtgtggttttttttttcctcttaaattattcaaagacaagttgcgtaggtaggttaatagttgtggagatatattgggctcagcaatgagcagggctccgataataaggacaagtacaactctcccaccggcgaggtattgctttcactgggatcactgacgttgtcaaccaaaatccatccaaaagaaaaaatgaaatttgaataataagttaaacttttaacaagataaagaaaaataagaattaataaaaattgaaaacaaaaaatgtttgtataagaaaataatatatttatataagcttattatatgaaagtaaattgaaatataggaatgagacacagaggattagacgggatgaatatgaaagatgttg

SEQ ID NO: 27591 - DNA, 436 bp, Glycine max
  Clone ID: PAT_MRT3847_124916C.1
cccacgcgtccgattagggtttgcagagttgcactttccctttcttccaatggatgcgttttgttttcgagtccctttctctatcacgccaaatcccaccgaatcgtgcgacgcggtatattggaatctcacttgggctctaattgatgcattcacaccgttagcggttgggctccaattctccaagatgagcaattctcactctgaaaatcatgatgaagtaactgtggcgggatttgaagttccaaaatctcctgattctagttataacaatgtctaccctggaaatgaagatgacgcaagggatccacctatggtcccttcacatttacagcatactttgctaaattatcctgctaatagagacactgcatgaactgttccattgcctcagaatgtgattctaaatcatctgtacatcgagaatagagaatca

SEQ ID NO: 27592 - DNA, 169 bp, Glycine max
  Clone ID: PAT_MRT3847_124917C.1
ctatctcacacccatctcatagaaatatcttatttcctattatttccaccccccctcattttctccatccaccaccacctcatttttaataattccttacactcatctaactctcatccataacactatctctaacaacaactctattcaatttccaatcactctatat

SEQ ID NO: 27593 - DNA, 545 bp, Glycine max
  Clone ID: PAT_MRT3847_124918C.1
agaaaagtcattaagacaaacaaattaagtgatagtaggacatgatcatgccattagcttagtttgtttgtcttaatgacttttctgaaaataaatagaaaaagaatttttactggagattttttcctcaactatttaaaaaaaaaatgcaaaagaaagcaggaacccaaaaaaatcagcagggctatctagtcctatccatggcaataaccatggtatagccatggcccatgggcataacatcaaagagaaactgaaagcatactcctatccctaagattttagtgcagggagaccaagatacatgcattcaatttcaaccaaatgcaccaaagaacaacatttactggtcacttgttgaaaaatttgggtttcttgttattaccataaccttaaaataaacactcttaaggtagaatagactcagtgaccaaaattgcattggctaatcttctatatggttatctgataagtcagagctttatgaattgttaatttctattttttaatgggaaggtactacttactttttgccataaatgcag

SEQ ID NO: 27594 - DNA, 271 bp, Glycine max
  Clone ID: PAT_MRT3847_12491C.1
ttgtcgttttggtcggagaagtagcctcacaaaagcggagaccaaacaaaccggggccgggaacacaaagttgctcgaactcgcactacggttattggacgaggctttgaaggagaaaaagtgtcccacacggactgccaacagaatagcagttcatcattttccaaacctcatcgggcacaaagctgaacacttcccttaatagaacacgcgacatctcttaaaacataaacttctccagtacgtactcaacgaccttttctaaaaacaa

SEQ ID NO: 27595 - DNA, 268 bp, Glycine max
  Clone ID: PAT_MRT3847_124920C.1
gttacacgacaggttagtggaaagcaagggtgagggagtatgagaactcatgaatggcatatagagcggacatctatgtagacttctgcttcccaactaggaagagaggcaagaaatgtgactaagactggatcactctatattgtggatgatcgacgctatcgggtgatctggctgggaagaaaacatttcctgaactcttccacctatacctgctgggtttcttaccaccagacgaagaccatatcatcgtctatgggaggacaaa

SEQ ID NO: 27596 - DNA, 1742 bp, Glycine max
  Clone ID: PAT_MRT3847_124921C.1
gaatagcctagaatagcgaaagaaagtgttgctgctaattccatttcagtgacccctaattatgatggaggaattgaacaaaccaatggacggatcagcaaccagctggttatccgatttggtaagaaaaaaaaaaaaaaatcattttcattcttccattcttcaaatgcccaaatagatgatcataatccataaatcctttaacccttttgtgttcctcttttgttttgttttatttataggaaatggatgattacaatttatttccagatgaatgtcccttgaacttgaacttgtttgatgaccaagagtttctctcacaagacattgctagtgcccttcaagaacagacacagaccttgcaacaatctttgtcttcagagtgcccttcaaaaactgtgagcaactcatccaccgatgaaaccacttttgactttgagagaccagccaagttgctgaaaacgacaacaagcagtagttgttgtaactctgactcatccaccatcaccaaaagcctttcacccaaactttccccatcgtcatctttttcctcatttcagtctcagattctctcctttgacaatcctaacccaacctcatcttccaacaccaccacccagttttatgggtttgactgtaccttaaacccaacacagaacgagatggtgtcagtgtcagtccccaacatgagagaaccacggttcccaactcaaaccgcagaaggttcaccgaaatatcaaaactttgaaacaaaaacctctcatgctaagaggtctcctgctcatgctcaagatcacatcatggctgagagaaagcgaagagagaaactcagccagagcttcattgctcttgcagcccttgttcctggcctaaagaagatggacaaggcttctgtgttaggggacgctatcgaatatgtgaaagagcttaaagagcggttgacagttcttgaagagcagagcaagaaaacaagggcagaatcgatagtggttctgaacaagccagacctctctggtgataatgattcttcttcatgtgacgagagcattgatgctgatagtgtcagtgactcactgtttgaagtggaatcaagagtatcagggaaggagatgctgctcaagatccactgccagaagcaaaggggacttttggtcaagttactggctgagattcaaagtaatcacttatttgttgctaatagcagtgtcctaccctttggtaattctatccttgacattaccattgttgctcagatgggagaaagttacaatttgaccactaaggaacttgccaagaatctacgcgtggctgcattgaagatattgtcataacatgaacgtggcttgagtatggagaataccctcatggcatatggcatggatattgaaactctgaatcacatttaatgccccagccaccgagtaaatcacacccaaaatggaagccttgttattaatgtgtgatttctgctacaacctgcagtgttccccaatatgtagattcagcttgaccccaaatgatcttgtcttcttcgtgttatgttttggtttctgaggccttcagtgtgtgcctgctagagagggaaaaataattgaataattttgtagagatattaggaataatttcaatctgacatgtcttaattaagattttaattgagttgattaaacagaatggatgagttgtttaatttctatgaataaaaaaaatctgacacggcttaattaacattagcttaaaca

SEQ ID NO: 27597 - DNA, 381 bp, Glycine max
  Clone ID: PAT_MRT3847_124922C.1
cggctgcgagaagacgacagaagggtatttcgtcttttgcaagtatcaattcaaaatttcattcaaaaactaaattaaattaaagataatatttgctgattttgggttccctcatacgactcttcaccaacaagggttgcaatgatttcttccccattattgtaaccaaaaagcttcatctttgatttgaactgatgaaaccaaaagcaataaaacatagctagctccaattaaaggatctaaaatcgacaataatcagaagataggttcagcaatcttgtcttagattaatgaaagcctgccctaattaaagtttctaggtttgtatatcaccctctgaaacagatactgttattgctacacgatctgggcattatcatg

SEQ ID NO: 27598 - DNA, 360 bp, Glycine max
  Clone ID: PAT_MRT3847_124923C.1
gctagagggctgcgccacttctcatcatcacgaacccaatttccctctcctatatattttcaatcaacccacaaccctttctgggttttcttccataggggatggggggggatattccttcttcttctcctccaatagcaccatcatatactactcctttgggttcgagtataatcccctcatctaatccacttcaagacatattcgcccgcttcggctcccaatccaccatcgacctctcccaaatcaccgtcttctttagccagaacaacaacaagtccatcgtcctttaaacactcattggccgcaactttcttcccctctgcaacaaaatctttacactccttcccctctttcttc

SEQ ID NO: 27599 - DNA, 391 bp, Glycine max
  Clone ID: PAT_MRT3847_124924C.1
ttttgtttttttttttttttttttttttttttttttttttttttttttttttttttttacaaaacaaaccccctgaaattattggttttacaattacaaacaaaacccccatcggagcccataagaaagaaaaattttaaaacaaaatccgtaaaaaattcttcttcccccacattttatttggcccttggattaactttacaaacacatcctttcctttcctttcccttaccatcaccatatgggattttccaaggggtttgatttggatttttcatgacctcccttggaatcattaaatgggtattatttttggacaattttcacattggatttaaataaaatttggttttgtgttttaaaaattttggtttattgtaccgggaaaatt

SEQ ID NO: 27600 - DNA, 117 bp, Glycine max
  Clone ID: PAT_MRT3847_124925C.1
tgcgtttcatctcatatactactagcaccctcagagccggtgcccacttgcttgtcaattctcgtgcattgcccttttcgacgccctcgaagagttcaaggatttataccattaata

SEQ ID NO: 27601 - DNA, 367 bp, Glycine max
  Clone ID: PAT_MRT3847_124926C.1
tacaacaacacatacgggctgttcctaaaatacctcataatgtggaacatggttaagatggaagtgaattcaagattcatcctggtcaaaatgccatggatcttacatatccgacagacctattactactatccatatacacgagctctttcactataactagatccacatggcgtttctctagaagaagctaaagatcttctactataagttaaggatatgtcttatcacgccttaaatgtatacatgaaccacgctttccttctcgatgaattgacacctatctcctgcgcaagacatatatacgcttgatggctatgcgataaccttgattgactctctatacactcatactatacttggtgac

SEQ ID NO: 27602 - DNA, 216 bp, Glycine max
  Clone ID: PAT_MRT3847_124927C.1
acggtcgaccagcgtgcgacatgtggcgccgtttttacgacccagcttaatacgcgccatgcgacgtataggtatctatgagacccgaaatacaatgactgtccgtggttcagaacgaaatgactgggaaaaccatgtgcaacccaactaaatccctaagcatacattcaaatttcgcagtgggtaatagatagaaataggcccataccagatgcg

SEQ ID NO: 27603 - DNA, 243 bp, Glycine max
  Clone ID: PAT_MRT3847_124928C.1
ttaaggggttgagggattggataaggctgcgggctgataaataaacagaatcggatggacttgttaaacagaaattgaagttggacgaatcacttatagaatctgaggataaagtgactggtttggagtccactattcttcaattgcctgaggaatctaaggaatcctacagggtgatcatatcactgaatgaaaaggcagttgacactgttttacacaatctacatatgtttttatggtgta

SEQ ID NO: 27604 - DNA, 374 bp, Glycine max
  Clone ID: PAT_MRT3847_124929C.1
atttggggtaaggtcaccaggcctcatggtaacagtggtatagttcgtgctaagttgaggtgcaatctgccgcccagatcaatgggagcaagggttagagtcttcatgtatccaagcaatatatgagtgatatgaatggaataatcaatggaaataaaagcattatacttcagttatgatggggccgtggtagaaagtgatgaataatgcaagttctcaggactcgtgagtcgtggagcttgttttgtcagggtatttgataggaataaatattatgtttctcttttttggtagctcccgagcagggtcgtatccttgtttaggatgaaaagaatgtattgcatgttttctctctactctcactgacatggtta

SEQ ID NO: 27605 - DNA, 257 bp, Glycine max
  Clone ID: PAT_MRT3847_12492C.1
gtagtatttaaatatagcatttccattgtcgacttaactacttggggtagtagactcgtagagaccacttgtaatcatagatctgatctgccaggagatcgtgggaatggaatcggatctcaaattacaagtggttgttatactctactacacgaagtagttaaattgacaatggacatgtactacttccgtagagcacgaatgacgtggtttcctgcgaaggccacaaggagccttgatggggattcccctaggcc

SEQ ID NO: 27606 - DNA, 303 bp, Glycine max
  Clone ID: PAT_MRT3847_124930C.1
ctctcaccatggaggcgcaacctccatccccctcgaccgccccgccgcctccgtcgcattacctcaactaccccgactccgtgggatcctcgccacgctctcgcatcaccgactcctgggacgatcccttcgcgccggtgtcgacgaagcaccgcctcatgtgcagaatcgtggtcaaatcgtccctcgcccccatgataagtgcctctgctatgtcggtggtaacacgcgcatcatcgtctccgcatgcgccacctcagtcgcagatctctccacgcgcgtctcgaaaacattcctgaatgg

SEQ ID NO: 27607 - DNA, 678 bp, Glycine max
  unsure (1)..(678): unsure at all n locations
  Clone ID: PAT_MRT3847_124931C.1
aatcaagtaatatgaccctcattttgggattcaaggcttactatggtgtagaatttcatttaactagtggaattgtggaagggaaatctaaattcaaaatacaaacagatagagtacacatatctaaggcccttcattttttatgttctgtgtattcaactttggatggcagcttctcttgtgggtgagccatatcataagttgcatggaggccaaagaaaaagtaatagatcagcattaccacagtgcacaccccaaatcttatgaaggcatcatactccaaagaccccatgaggaatacatttgttgcaattgacaaagatggcacccatggaacaagtggaacaccccaaactcttggcaccctttgctgagtcaaaaaaagttgcatccctagtgttgccaagaaccagataggaacagtcacagtgtatccaatccaaccattaggactaagtccccaataagctgaaattccaattgaggaagcaataatgagcaccaaaaagataactagctttatcaaattctctctttggtgtgacccctctcacatagtacctcctcaccaaaagggcagncagagatcatcatgaacacgaagagcgcgctcaccgatatcaagcttgacaacacatccaagcctgtgaaaaaggctatggtggcactttgcatggt

SEQ ID NO: 27608 - DNA, 363 bp, Glycine max
  Clone ID: PAT_MRT3847_124932C.1
tgcatatgcggctatcttttttatatctcaatttcctctctctcttggcagatcgcggaggtggggaacagggttacccaccgtggaggtgctgttcacagattggcggggagaaggcgcagaagagactgagacgcttgctggctcagaagacatgcgctcctgtaatactacatttggcttcgaacgtctgatctagcctcgctcggtgacagagaggaccagtcggaccctttggacacatctacctccatgcggtactgattaacgagcatcacatcatcgtcagacctcgttggtacgactcctgaagccaatgaggcgaagatccgttggtgagctacacacatcggtaccagctga

SEQ ID NO: 27609 - DNA, 959 bp, Glycine max
  unsure (1)..(959): unsure at all n locations
  Clone ID: PAT_MRT3847_124933C.1
tttataacagcgctcgaacttcccctcctctctccctgcatcgccggacttaacagcgcctgctcttgttaaattcttctctaccttactactccctcactttgtgttagaatcatcatgggtttgcaaaaccaattaaacgacgtgtcgtcgggttcgattccgcttctggtgttggcgcagatagccacctgcgtcaactacctccgctccatgcttttcgcgcttttgcaaaccctaggtctcagccgattccactccgaccagatcgtcgacgagcgcttcctcgccgccgtcggatccggcctcgccggacttatcatgctctccgatcagctcaccctcagcagccaattcttccaccatcaccacggcaccgccgccggccacgaccacgaccacgaccaccacccctgcgtcgtgtgccaggccaccttcgaggacggcgaccaggtccgcatgctcccctgccgccacgtcttccaccgccgatgcttcgacggctggctccaccactacaagttcaactgcccactctgccgctctccgctcttctccgacgagcgcgtggcactcacggagcgccgcctcggccagcaactcatctcttggttctccctacactgatgcggccacgtttcgttttctgaacctccacttttacggttttacccctctcacgcgatcactttttacagagctgtacgcgggtttctttttctgtttttcttttccttgtttttaatattagttttttttttcccatagggtattaggctagatttatttatttttctctttttaacagtaatttttctgaaggtattttttgaagggttttcttccgtctgaaaatcctttttgagatgctgtaaattttggactctgtgtttatggtaataatcggagatagtagatgtaaagttttcatgaanacaaaaaaaaaacaccacnnnaag

SEQ ID NO: 27610 - DNA, 962 bp, Glycine max
  Clone ID: PAT_MRT3847_124934C.1
cgacacgatacataacaccgctagctcttcaattcttctctccctcactactctctattcgttagtgttcttcaattcttcatcgcagacttagaatcatgggtttgcaaaaccaattaaacgacgtgtcgtcgggttcgattccgctgctggtcttggcgcagatagcgacctgcgtcaactacctccgctccatgcttttcgcgcttttgcaaacccttggtctgtgccgatttcactccgaccagatcgttgacgagcgcttcctcgccgccgtcggatccggcctcgccggactcatcatgctctccgatcagctaaccctcagcagccaattcttccaccaccaccacgccggcgccggcggccacgaccatcacccctgcgtcgtgtgccaggccaccttcgaggacggcgaccaggtccgcatgctcccctgccgccacgtcttccaccgccgctgcttcgacggctggctccaccactacaagtttaactgcccactctgccgctcaccgctcttctccgacgagcgcgtggccgtcacagagcgccgcctcggccagcaactcatctcttggttctctcttcactgatgcgaagccgtttcgttttctgaactcccacttttacggttttacccctttctcgcgaccactttttacagagctggacgtgggtttctttttctgttttttcttttcctttttactttccctcctttttttaatactaggggttttttttttaattttttcctccccgtgtagggtattaggctagatttcttttcttttttttaacagtaattttgctgaaggtattttttgaagggttttctaccgtctgaaaatcctttttgagatgctgtaaattttggactctatgtgttcatggcaataatcggagatagtagatgtaaagttttcataaaagaatattcggtttaactttttcctttt

SEQ ID NO: 27611 - DNA, 393 bp, Glycine max
  Clone ID: PAT_MRT3847_124935C.1
agaaggagtttcaaaatggattacctctgacgaaatccatagcatgacatactctgaagggaacggaactggaactagctaaccagttcccaaccattgaaggatgcacgcactgatcccactacagacctgagaaatgcatcgcccactatttgtgcctggaaccagacttgcttcacgagcaacgcagaggtcgtggacaccaacggccaaccctatatacacaacaccatgctgatgacttgaatcatctacacagtggccgcgattgacggtaccttcaaggtctcatcacatcgaacctgctaattgcaggagcatgacggaataaactatactgctggcacctatgcagctcccgggggagagcgtgtgccattcctctttaccatt

SEQ ID NO: 27612 - DNA, 433 bp, Glycine max
  Clone ID: PAT_MRT3847_124936C.1
ggatttgtagagtgagcttttgagttcatcatcaacaatggtgacattgacatcaaagaagattatccctaccaaggtgttgatgttatatgtgatcataaagtcaattttaacttgattatttgataaattaacaaatgttggtaataatttcgttgtaatgcttatataatttttttttcttctttatataaaaatgctcgaattattacaattgatgattatgatagtcttcatgcctatgatgagttagtcttgtaaaaggcactagcaaatcagttagtgagtgcttgcattgacgcaaactttaagacatatactttaataaatttttaaatcaatttgactttaaaagtaaagttagcatttagcaatgcattagatctaaactaaatctaatgagctgcaagatacattgagaattttgatcaat

SEQ ID NO: 27613 - DNA, 279 bp, Glycine max
  unsure (1)..(279): unsure at all n locations
  Clone ID: PAT_MRT3847_124937C.1
cccacganaagagaaatgctcgcaattcattacgctattgataccactcatccgctacttgctgcctacgctagtgtgcacccctgtcttgaacctcttaccgtgcgcatcttctcaatccataacaacttcaccaccgatgcaccgaaaccaaccgccacaaactccgcatctccaattcgactctccaaaccatgtccaaggcgcgtgtcttacacaaatgtctatgtccttcgccctaaaaaagtttgaaattacaagctctctcacccttcaatg

SEQ ID NO: 27614 - DNA, 366 bp, Glycine max
  Clone ID: PAT_MRT3847_124938C.1
ctgagcatggtctagctatgtcgatcgaactgtccaaggtcctgtcaccaccagcacgagctgctgttgttggtgccgccaacgccgctgccattttaacaggcaccaacgccatgaaagcgacgggtgggttgttagagattgcggggaaaaatggaggggatgggacgtggggggaaggcccaggggaagtctagcagggggcggccagccgcaggtaaatgagggggtttggtcgagaggaatcacatgggacgtaggagcggagtgctcggaggggtaggaggacagccgagatgtaagacggagctatgggattgcgaccaaggaggtgcgtggcagaaagcatagagtgcggtgggacgt

SEQ ID NO: 27615 - DNA, 449 bp, Glycine max
  Clone ID: PAT_MRT3847_124939C.1
ctcgagccgtaatctggcttgagctccggctgtctcatcactaccaagttatatttcaaggggaccacgatatggctcccggggcaaagctctactagcttgtgaagataacgggccttcaaaaatatggggttaggcttgataaatcaattccatatggaaatgagcttggtggcctatgctaagatgaccatgtattattctgttctgctaatcattcactgcaagtaaacggctctggaggggatcgagcttgactatagctcgacttatgaagtcgttgaggaaggcattaatgccagtcaaagaggtgcactcgtgccggttattaatgatatggggcaggcaatgactggccactacgacggtcctaaattaatgctgtatgccacccggaaaatgtttcgggaccggcaccttacggccgcccagcttttcctatagagact

SEQ ID NO: 27616 - DNA, 221 bp, Glycine max
  Clone ID: PAT_MRT3847_12493C.1
aaacgaagagttcatagagaatacgtgcaggtttactaacaaactcgctatcaaaccgcaattactgattgcctgtccgattttttgcttctaaaaacactgtttgcggaaatcgctgtgcccagaactcgccgaaaccttcgcgaggactgctgtcgcatcctagcgttactattacttgattctgtgaacacttttctaacgacgacacatccgctcta

SEQ ID NO: 27617 - DNA, 404 bp, Glycine max
  Clone ID: PAT_MRT3847_124940C.1
cttcaacctcctcattatccaatctactctcttactcaatcttcgtagagcaacactacgatcgtgcacgcatgcccatggggggggcggggtgtctattcctgagaaaaggtcacggtgaataatgctccatcagaccctgaatacaatggaccaaatgcccaacaggccaagccaatgcgacagcctttctcgaaaagattcattggcgagcagctcttacaaacccattatgcgcaaggccaggacatattcctacatcgatctttcgctcgagatcgtccgaagcatgcgatcggatcgagaacccgattcacacggttagcctgactataatggtcctggagctgccaactgcgtcaagccgccttgggaaactgttggaaaggcgcgcccatgacgcc

SEQ ID NO: 27618 - DNA, 567 bp, Glycine max
  Clone ID: PAT_MRT3847_124941C.1
caacaagtaggatccttttattaaggtataaaactagatacattgaaaaggcacactgaatctgaaattctaaggaccttcagattggtccaagaacagtacaaacaggcaatgcaggtgcctatcaccggtaaaaagaattaaaagaatgatcattatccaaaaaaagaaagaaaaaaaatccagttcacacaaattcaattaagtacaaactctatcacaatggatagaacacactaagtataaaactctattactttaactgatattcttcttcataagctaacagcaatatgggcacaaaatcaatccattctcattacactgaaggcactgattgctctctccattttccgccataaccttgtggcttccattacacttgaagcacagcacaaaccttatccctccacatgcatcacaaggaccattagaataatccattggaaccccttcaaagattttcctcagctttccctgctcatgcaaactcagaacttcttctgctccaccaatgtacctgcccttcacaaaaagccttggaggcactaatttccccttcaaact

SEQ ID NO: 27619 - DNA, 425 bp, Glycine max
  Clone ID: PAT_MRT3847_124942C.1
atgtttataaactttggtcacaggttgccgcaccttataaccgggaacaaaagctatcgttgcttactttcaagaatctctgactttcttggtactactttgtgtactgattacttaagggaagagcaaatcactctctgtgctggccacagacttcgtgaatgattttgttttccattcttagattatttgctgaacactctgctatttgatataggactccgtgtcagaattagacttcttgtgattctttaccagatctctgtttaatgtcaagcttaagctggtgaaatcttggattagggctgacactctgctatctggtataggacttcgtgggtagacatttctatttgtgtcctttctttgactctctttttgttactgaaccgcattgacgttcaaagtgcgtctatttgaaaaac

SEQ ID NO: 27620 - DNA, 118 bp, Glycine max
  Clone ID: PAT_MRT3847_124943C.1
gggtgatttcagtgagtgatcggtgttcacttgactaatcatgatcggccgcggcaattgcagaggatgcagcttaggaacatcgccgtcggatggcctgatgcagcgagtcccgccg

SEQ ID NO: 27621 - DNA, 358 bp, Glycine max
  Clone ID: PAT_MRT3847_124944C.1
gctcgagggcatgttgttcaatgggtaatggacactttaaagcaagcaaacaaaaattgttttgctcattcaatggaacacgagtcttatactaatcaagttcgggcactcacggtaaagacagatccatggcgctcatgtggaggacttacacctgatggcaccctatttgttgctggtggttgacgcaactgagagaaaacctgcagatactatggctgctaacctgattgccaacactgtgactggagggaataccccagtgaatagcaagagcctacatggtatgctactgaagcaacacttgccaatggagagcatattgcgataagaggacgatgatctttcacttatgagc

SEQ ID NO: 27622 - DNA, 396 bp, Glycine max
  unsure (1)..(396): unsure at all n locations
  Clone ID: PAT_MRT3847_124945C.1
cnnnttcgcnaggtntnncgtgcnnnttnncnactgcgtctntgctntngngnctngncnccgncnnggcnccgnngnnntgngcgnacagggttgtgagttnccnnnanagngttcgntcgcacncngcnggnntgntgnctnncngnctngtggggngnnnncncgcgtcagtnttngnagncgncangtnggtcagtgcgctgngncnntncnngncnagtaaaaggntgtgtcnnctgntgntcacgcancggtctnngcgagntgctnnngctannctgntgcagtnnngctgtnnanagnnngaggtntgnnnncactggngctggttgntcngnggtcgtgtaggngtgnngcgngngacngtnntntgtgcngnggtgangccttgnt

SEQ ID NO: 27623 - DNA, 954 bp, Glycine max
  Clone ID: PAT_MRT3847_124946C.1
agacgacagaaggggagaccaagaattggtttgtagttttcatcattactccgatgaaataaagtccggaatataccattagactggtcaaagcgcgtgagtcacttgtctttgtttcttgttgagtaacaactcaacctgtgacagtttcaaatgagtgaagcaacggcaagattcgaacggcgggtcctggtggcggtggacgaaggcgaggagagcatgtacgctctttcttggagcctcaggaacgtaattttccaaaattccagagatacccttatccttctttacgtcaagccccctcatgccgtttattcccccttagattccactggcaggatagatgatcctgaaactccaggatggttaatttcaggatatttgttttcgccggacataagtgcggccatcgagaagtacagccaagaagtggcagattgcgtgttagagaaagccaagaaattgtgtaaagatctccaaaacgtcatggtggaaacgcgggtagaaagtggagacccaagggatgtgatctgtgatatgtctcaaaagttaggtgctgacttgttaatcatgggtagccacggctatggagttgtaaagagggctttccttggaagtgtgagcaattactgctcacagaacgtgaagtgcccagttttgatagtcaagaagccaaaaccatctgctggtgctggaaaatgatctgccacttttgttctgtttttgggctttctatgtagaattttgttttgggtatgtgttgtttttccctatggcgtagctagttcttctaggaggatcttgtcatgtggttgatattaacgcaggaagtacaggctttcttttcattgtggatgtccaagtgcatagagttaaactaagcctaatgcagtttgagttagaaaattattgaggtaacttcagataaataaataagcatattaactcgtacgt

SEQ ID NO: 27624 - DNA, 972 bp, Glycine max
  Clone ID: PAT_MRT3847_124947C.1
agacgacagaaagggattggaagaaatgctccgttttcatcattactccgatgaaataaagttactcatataccattagactgaaagctcgtgagtcacttgtctttgtttcttgttgaggttaacaactcaagctgtgacagtttcagatgagtgaagcaacaacaagaaacgaacggcgggttctggtggcggtggacgaaggcgaggaaagcatgtacgctctttcttggagcctcaagaacataattttccaaaattccagcgatacccttatccttctttacgtcaagccccctcatgccgtttattcccccttagattccacagccaggatagatcatcctgaaactccaggatatttgttttcgtcggacgtaagtgcggccatcgagaagtatggccaagaagtggcagattgcgtgttagagaaagcaaaaaaattgtgtaaagatctccaaaacgtcaaggtggaaacccgggtagaaattggagacccaagggacgtgatctgtgacatgtctcaaaagttgggtgctgacttgttaatcatgggtagccacggctatggagttgtaaagagggctttccttggaagtgtgagcaattactgctcacagaacgtgaagtgcccaattttgatagtcaagaagccaaaaccatctgctggtgctggaaaatgatctgccaattctgttatttttatgtagaatttagttttgtcagtcactgttttgggtatgtgttgtttttccctgtagtgtagctagttcttctaggaggatcttgtcatgtggttgatattaaagcaccaagtagaggctttcttttcagtcttagagaagatctttgagaattgtggatgtccaagtgcgtagtgtctcaatttgggtcaattcgaactcattgtatcccgagttaaactaagcctcttgcagttagagttagaaaattatcgaggtaacttcagat

SEQ ID NO: 27625 - DNA, 1576 bp, Glycine max
  Clone ID: PAT_MRT3847_124948C.1
gtaatttagggtttggtttgaaacatttaggctaggcggggcgtggcggagctgaatcggaggcatgaagctcaccgtgaagactctgaaaggcagccatttcgaaatcagggttcagccctcagacactattatggcagtcaagaagaatatcgaagatgtacaaggcaaagacaattacccatgtggacagcaattgctcattcacaatggtaaggttttgaaagatgaaactactttatccgacaataaggtctctgaggatggttttcttgttgtcatgcttagtaagggtaaaaccttgggatctgctggcatttcatcaactcagtttgctagcaacccacctacaactgtatcaacaccaaattccacccctccttctgatcctccagtgcaaactcagtgagtttatcttttttgaggttgatttctatatcagccgggttttttccttaattatcttatctggttttgcagagctgcaaacaacagtacatctagcacagatgccccaactacaaatgtgtctgcagatacctatggtctggctgcttcgaatttagttgctggtagtaatcttgagcagactattcaacaaattatggacatgggtggtggcaattgggacagagacacagttagtcgtgctcttcgagcagcttataataacccagagcgtgctatagattacttgtattctggaatccctgaagcagcagaagttgctgtgccagttcctcaaacagctgggatttcttctggagcagttcctgtaggacctaattcatctcccttaaatatgtttccacaggaaacaattctggtgctggagctggacttggatcgcttgactttcttagaaacaatccccagtttcaagcattacgctcaatggtgcaatccaatccgcaaattctgcagcctgtacttcaggaacttggaaagcagaatcctagtctcttaacactaattcaagagcatcatgctgaatttctccagttgattaacgaacctgttgagggttctgaaggtgatatatttgatcaacctgagcaagatatgcctcatgccatcaatgtgacgccagcagagcaggaggcaattggaaggcttgaggctatgggatttgatagagcctcagtcatcgaggcatttttggcatgtgaccatgacgagcaattggcagccaactacttactggaaaatgctggagattttgagggttaaatcactaacctacattgatttgtagttttgtttgaggctttatttatttatttatttttgttggggggagcatttttttgtacttaatgtgtcttggcaaatttacgtggatagagttttggatttggtttgacgtattaaccgagacaatggacaaaagttactcttgatattagaatggtttagtttacacaacagtgtttctggttatcttcccagatgaaatagcgaagctctaattgtaagttgatctattggtagttggtactatcgtttcattttaattagcaccaatgttagatttctgcattgcagcagattctgataaaaaaaaaaaaaaagaatg

SEQ ID NO: 27626 - DNA, 305 bp, Glycine max
  Clone ID: PAT_MRT3847_124949C.1
tttatgatgttccaccaccggcggccacacttgggcttgttgacattacaggtattgcattagcctgtgctctgaatagttactttagggggcatcgccctttcttcatattaaacccatctgctctaaagactgtgaattctggtttcctgcttgcacaaaggcattgactatgcgatttaatccaaaccctcgttctgatgcatggagtttggcaattctgaagcgtcccggatttcattgtattatgatgtgtgtcactggggggactgccactcgatcgcaagactgcttaggtaacaatt

SEQ ID NO: 27627 - DNA, 570 bp, Glycine max
  unsure (1)..(570): unsure at all n locations
  Clone ID: PAT_MRT3847_12494C.1
cttcgttgcaagaaggtttcccgtcatcactgtatgacgatcctccgtctttgggggggggggggggaaatagcaacctataatggccagatgaccgaccaggcgctaaatgctagtaagtaatgaggaatgggatagaatgttgcgataaagaaaacgcatgcgcataatatagaaaccggggaccgggacacgatttaaacgcaatggttgacgatcgtgatgcgtgatcacgtaaagaaagtaaatgaccgggaagatatgcgcgaagcccgtaaacnagaaaaaaggagggacccggagttttataagatccagctgagcatcgagatatagcgatctataggtagcgtaccgttttaccggcgagttagaagcgtgtatagaacaagctttggcctgccgaatatcaccgtatatcgtggaaatgcaagccgagccatatgcattaggtagaggtattatagcggccgcagcgtagcaaaactgcaggcgagacacccagttggtggtaagaaccggggtcacataccgccgaccgatttcacgtattaagacatgttttgaaat

SEQ ID NO: 27628 - DNA, 227 bp, Glycine max
  Clone ID: PAT_MRT3847_124950C.1
acattccaaaccgacgtcaatggcagcctgattctccttcttgaccctcttctccgtcctccgtgggtacaaagccacggcctactggcatgatcactcgcttaccactccataagctacatgccaagcatcagtaccaggaccaccactcgtcggcagagctgtccgacgaggctgacccgtcccacgcgcatgctaacacgctcttataccagtcgtcgtacaac

SEQ ID NO: 27629 - DNA, 447 bp, Glycine max
  Clone ID: PAT_MRT3847_124951C.1
cggcggccgccctcaaactttttagttatattgttttttttttttgagagagggaaaaggttttttccggggaacgtttacacagtgttttaaacaattcccctaccccctttgatgagaagatcgcaagaattagagcggagcccttttttttgaaccttggctttattcatgttcaccaacaagaggcacgtagccgtgaaaaccctaagaattctgcacattctctacacaaattgttttctcccctcaacccgaaaatggttatttttgaacccggggtgtacctcccaaaagaaatatgctcagagattaaggggattcaaattttggctaagacacagagaaccttcttctttggggcttggttaaattcacgttcccattttccaaatgggtttttttcttcgacccgtgttttaacggggttatcttccccaggggttt

SEQ ID NO: 27630 - DNA, 441 bp, Glycine max
  Clone ID: PAT_MRT3847_124952C.1
cggggggagccacgcgtccgcccacgcgtccgaaggaacacaaatttatattagatctgaaagaaaagagaagagtggtaggtttgtgggagaagaagaagatgaagaagatgaggcagttgtcctcttcacttgaaatcaaattcaagaccgctttgccttccttttcagtacattccatttcgaatggaaacagtgctttgctattttcatttttaaaatagacattgggcttcttcttgttcctcttttttccttccaattccgatttggtcctaatgcctattttaaaatgaaaacaatgatacactgcttttgtttgaaactattgttaaggaagataacgccgacgagttcttcaatttgattttagctgacgaggacttttttattcatccacagtctctgaatctgtacgactaaacaagcaaagaaaaacac

SEQ ID NO: 27631 - DNA, 1240 bp, Glycine max
  Clone ID: PAT_MRT3847_124953C.1
ctcttttatatataaaaaaagaaaaggatctataactttgtctacacaacacaattaaaagcattcttgcaccaaccagaaagatgttgtttgaggcatgatacctgctgtaaccgttttcttgtgcaaaaagcaaattttgtggcacatatgatcatagttttggaagtttcaaaataaccatgccatgcaattcttttaagcccgtgtcaatactgctctgctttagtgtcactctatgcatgttctctgattatggaactgtatgtttgttcattgtttcattgtgttgtgctaaatttcttgttttaatgtgtagacacaaattttttatatgattgggctgcctatgttactaaatgtactatttttagtttttgatctccgcatcttaaattaacccatttccaatctggatggtagtctcatatatcaacttcagctgtgtccagtgtcagttacatttaagttgcagatagagcattactggctagaagttcttatgtttatttgaaagaacgagacataaataaaacataacaaacatcttcatgcttgatgcctttagttcaaccatattgagagagtttcttgatatattttttttggtctagttgtgactttagaataaataattagagaatttaggtgttctcaaatattttctagtccattcttttcttagagagttaaaaaatttgatgaggtaaagctttatgtgctttgttcagttagaattttcagagtgtcctctctaatatgatgacacttcaagcaaaccatagtctttttccattggcatgtttagctgtttatcacatcagctagaatggtagtcttttccattggcatgcttagctacctactacatcagcatgaattgcaagcctcaccttcatatacttaccttgcttctcataaaaattagtataaatatcaagttatttttctatggattgatttagaactctatttttttggagctgattgtacgcagaaagactactctctgtctctagtcaataattactcatatcttgtttgagtggcatcttggctaccactttcttaaaacatttttgctatcatttatttgaagtatctcctcaatatcttgcttggagttagtcttcatctcctcatctcttgaagaacaagcttggatttgacttcttttattccagactattctcaataacatgcttcttatcttcagtctaaaaaaaaaaaaaaaaaaaaa

SEQ ID NO: 27632 - DNA, 241 bp, Glycine max
  unsure (1)..(241): unsure at all n locations
  Clone ID: PAT_MRT3847_124954C.1
cttcgccgagttnaaagancggcggtnncccggaaagnaggccgccncgagacgcttctnccggttaccaaagccnttcaaggacattgataatancgagttgnctctcaactcaacnctatcnggctgggtttgctctgaattctccgtgtnttactatganattcttaactctcntgatcgggcttgcagacttgnaaaanaggctttgntgaaggnattgtgattggatacntgggag

SEQ ID NO: 27633 - DNA, 286 bp, Glycine max
  Clone ID: PAT_MRT3847_124955C.1
catccgtcaggaaggcagtaggctaccgacggggagaccactggcaatttataaagttgcgtttgacgatcaacatgttggtgctaaaggtgtgtttgttgcttcttttctctgtgggggttacatctgcacgcatggaactgagcttcttcactagtgcttagtcatccaattatgatgatgatgacttttctaaatcatgctgtgatctctgcatgtgcacacgctcaatgcctcctcaatgcaactgtgaatatattaggctgaattcatgccactcagattg

SEQ ID NO: 27634 - DNA, 775 bp, Glycine max
  unsure (1)..(775): unsure at all n locations
  Clone ID: PAT_MRT3847_124956C.1
gttgtgttctctgattattttattgctaacacaattcttaccaatgtacgaggacaatagaagtcactgttgatttattgctacatatattacatgtttccatggaatctaaattatactacccccggtcctatatataagaaagaaaagataacactttcttggtcctattcataagaaacattggattactttattgttatttttttctttttacccctaatggttacacttatttttccataaaagtggtgcatttattgagctatcaacaaaacaaggtaaattcattgtttgaaaaattatcttttcaaaatcaaccataggcagtcttggaataaaactaaaatttatgactaattaactaatttaactacttatattggtctcgatgaattaagtaattgtttcctatatataggacgagaggtagtattaaataagattcctaaatctgacaaccatcacaatttagcattctaacttgcaaccattgaccacttgatgcctgccaccattactttttgtattaggctgttacttgaaacaaaatatcgtcgactacctgtggtagatgatgatggaaagctggttggacttattacacggggaaacattgttaaggcagctctactatcaaaacgtgctggatagtggtgattgtctttgtgaaaagttattcaaatagatttgcttgaaggttgtgctggcgacggtncagcgtaacctctatattattagctacggnatatggttaatgtatgtagttatatct

SEQ ID NO: 27635 - DNA, 292 bp, Glycine max
  Clone ID: PAT_MRT3847_124957C.1
ctttattattatgcatcaaataacgattcttgggcttgtgtttgataatcggagcgatatccagttttgaaatcaagcatggtgtgctgatctttcggctacttatgttgtttaatagtaaaccatccgaattcgaaaacgaaattcattagaagataatcaattttatgctgaaaagaaaagtatgaattataagacactttgtaaacactgagtgtgccagataaacttgtgagattattttagcttaatcatgagttcaaagtggaaaaaaaaaaaaccacaaacaaaa

SEQ ID NO: 27636 - DNA, 254 bp, Glycine max
  Clone ID: PAT_MRT3847_124958C.1
agttcggagccttttggaaggatgtctcacggggctcatttcgttcatcagccccatttgaaagatctgctggagggaaataaaaacatggatcttaaaacaggctctagattgaaaaaagtgtcctctacaagaggacaacttgttaggggaaaaaccttgcaatatgatataaccggagactgatcacattcttcagaagattttcctgaaaaggaagatcatgaaaaacccaaaaagattgatgccagatt

SEQ ID NO: 27637 - DNA, 497 bp, Glycine max
  Clone ID: PAT_MRT3847_124959C.1
atccggttttgtaaaaactatagcatctgatggcttaagtttcgcgggcttacataaaattcatattttaggacactgggacacatgactgcgtacattgcctgcaaagctaacaaggaatcttacgctttaagcttatcattaagatgcacatttaggacgttgggagaaactaccactgctatatagtccttaccttcgatcgctgatcaacagacttggcttgcattagtgtgaatggactatcaccagtcaccacctaagaggatgagtacttatcaccctataatgggacatgtggcctgtgttgattaactcactgaaatatactgccttaagctaacattgatgcataatgcgctggtctgccttgagcactcatcgaagagtggtaccctccagctggaccatgagcctgcggcgatgagtgggaccctctctgcagcagtttctcgttatctaacacaccgatatgggacgcaattgctgatgagtgc

SEQ ID NO: 27638 - DNA, 106 bp, Glycine max
  Clone ID: PAT_MRT3847_12495C.1
ttctcacccccgaagagaactccaagaagagggagtttctaaacgtattgtgggctaacacacccacagcgtgtgagcttctcatacatccccatgaagggacacg

SEQ ID NO: 27639 - DNA, 373 bp, Glycine max
  Clone ID: PAT_MRT3847_124960C.1
caactcctttttttaccttttcacattctccatttcacaggggactgatcatgttgaagaataggcaccttggacagtgatccgaaagttgattgactatattgtcttcatatgccccacagaagaatattacggacactaccataagcactagaggtccattaaacctgacaatgattcaatcatgaccaccaggcgtataagaaccactatcttgtgtgtgtcctgattggacactcattatgctcgcgtaaacttctactagtgcgctgacccctacggcttcaactaactctgcctaggcactttctaggtgctctgtctcggtctaatgtagtcttatctctaattacacccacattaatttgatgtg

SEQ ID NO: 27640 - DNA, 1016 bp, Glycine max
  Clone ID: PAT_MRT3847_124961C.1
ctctatcttcttcttaaactcctttggattttcattccaagcgtcaaacattcaccgcagtttctccactccatgcctccccctaactacaatgctaggaggggaagacttcacgtcttcttctcatccaagggttgagattgttggtggaagtgaagctcctccagtgcatgctctagttgttgaggttgccatagccatggcctcaggtgttcatcctatacccctcccaagtggcctaggtggtgcctatgttttccccaaccaaaacggtaacaacattgctgtagcaaagccagtggatgaagagcctttagccttgaacaacccaaagggcttagggggtcaaatgctgggccaacccggcctaaagaaatcgattcgaatcggggaaaccggtatccgagagttagctgcttatcttcttgaccatggaggccttgctggtgtgcctcctactgctttagtcaaattctctcatgctgcattctttggtgcagcttcctcttgttcttccaatcacatgactaaaattgcctaccccctacgctttgttattcatggttttgatgcagcccttttaggcccttctttcttcccagtttcttctgtacaccaaattgggatcctagacattaggattatgaaccttgatagacatgctgggaatatgcttgtgatgaaacatgaccacaacaacagtggctatgttgatggtgttgctgatcttgttcccattgatcacggtttttgcctacctgagtggcttgatgatccttatttcgagtggctgcactggccacaagcctctattcctttctctgagtatgaaattgactacatttccaagcttgatccttttagggatgctgaggctttgagaaacgagcttccttcgtcgttgagggagtcatccattcgcgttcttattgtttgcaccatcttgttgaagcaagctgccgctgctggcctttgtcttgctgaaatagggcaaatgatgactaggaagttttgtg

SEQ ID NO: 27641 - DNA, 536 bp, Glycine max
  Clone ID: PAT_MRT3847_124962C.1
ataccctgtgtgaggctgcttacgagctcttttctgattggctcctggtcttcgtggtcaccctcttggtgcttcacctcggacaaatgcctgctgtgacagtgcggggtattactatcagacagtgaccgatcgtcattgcagtgactacacgatccacaagccttaattcagggccttgttgatacaggaaatgacgccttattcaagtgaactgcactttatggggaggcattgtgtccctaaagttgctcttttaactgggaacgttgacattattcacaaaatggatgattcttattttggggaaggttaatctctcctcactagcaggctcttgccagtaacctgtttgcggaccaatggtttattatatgacccaacacttgtaatccaaattgggacgtctagtcatgatatgaatgatggtcggggacaggaaactgatggagaagactcgtttggacgtgatggctgaccaacattgtctcaagcgattactactgatcctgagacatggatcgctgcatcactac

SEQ ID NO: 27642 - DNA, 398 bp, Glycine max
  Clone ID: PAT_MRT3847_124963C.1
gtgcatgatggtcgcagacactgaacgctcagcactgattactgactcgtacatggaccattacctgctcacactctatcatttcgacgaccacctaagccttgagaagcacagccttcgccatggcataccaccaactaacacactgctaccaaggtggctaccgtcatcattgcagcatggctgacgagatcacatgatctggcacgacatgctgcaccgaccaagacctcctcattcgccgaggagagctcgtaccagtcaatatcaaaggcgccattttggtgggcaccatgaacgattatctagagactacgctttaatatacactgatttctagatggagagagttgatgatcatacagaacggaatgctagaaccactgctcgagagcaga

SEQ ID NO: 27643 - DNA, 143 bp, Glycine max
  Clone ID: PAT_MRT3847_124964C.1
ctacttctgacgtcaaaatgaacctttaccattagacaatgccgccgcgagcgttgaagtgaaataaacagtgttgctagagagataccttgatggtattgtaattaacttagtctatcaaggggaataactgattgttgttg

SEQ ID NO: 27644 - DNA, 394 bp, Glycine max
  Clone ID: PAT_MRT3847_124965C.1
gggaaggttctggggtgcaactgtcctacggatcccctgccccccaagacaagtccaacaagtttctaaaattagatagagtccacagatatcattgggattggataagtttctagaaatggaaagttccaagaacaatagagtggagaagagagggtatgagctagttgaggagggtgatgatgtacagcaccatcttacacagacaaagaaaccaaaactacccgtttttgccagtgtgattgtggaagctttaaaggtggatagtatgcagagactttgctcatctttggaaccccttctcagaaaaattgtaagctacttttgctttccttgtattaaatcctgcataatagtagactgtagaccctctgggcaattcttcacaaaagaa

SEQ ID NO: 27645 - DNA, 347 bp, Glycine max
  Clone ID: PAT_MRT3847_124966C.1
gctccgcaacgccgtcctcgacgcgaaattcaagtggggctccaggctcaagttcttcatcaaatcccccaaagacaaaaccgactacgactccctctccaagcgcaaaatcaaaaccatcctcaccaccacacaacccgcgccgttccaggacagaatcgttcatgaagttctccttatgatcctcgaaccgatctacgagccgaggttttcgccaaagtcgtatgcttttcgacccgggagaacaccccacactgttttgagggttattaggagaagctttgctgggtacttgtggtatataaagggtgattttagtgttttgttggatgggatgaaggtggggt

SEQ ID NO: 27646 - DNA, 575 bp, Glycine max
  unsure (1)..(575): unsure at all n locations
  Clone ID: PAT_MRT3847_124967C.1
ttctttttatctatttatttttggcaatgtaattaagattgaacatcaagacttctaccttaattctacccaactttcactgcttgagttatgcttagtggcacattgatctataactttagattaaagataaatttatttcctcaaataaactagaagctgtaaaactaattgtctaactgcatgggactctttcactgaaaatacctattcttctcatttgaatatttttctagggaaataattaaattatttttaatttttagttcttggttggaatggcattctatctaggtgtacttggtattccatataaactcggaaatatcctaatcttctcttctgccagtcttgctctttttttggagagaattactatttcttgatgaactaatgaacttatttatgatgaatccattatcctagtggtgaattccatcataaaatcattatcgttcaccacttcataaacaatttcatcacacttgtgttttagaattatagcctttattttgccttggatgttatttacttttacaattctcaatggatntgatttatgacactctgattaa

SEQ ID NO: 27647 - DNA, 254 bp, Glycine max
  Clone ID: PAT_MRT3847_124968C.1
ctctctctccctctctctctcacactctctctatcatacttattctacctctagcgaggggtttacacatttttaattgcaactaatctgaactgtctaatctgcatacaaggatgcaaatggaatacttttagaaaaaaatcctacaattatatttgtgttaagtgtcccacactatctaaactgtacttaataagcaaatatagtttcaaaatcttggtatactcatcttattgcctgtgatcttcttttat

SEQ ID NO: 27648 - DNA, 376 bp, Glycine max
  Clone ID: PAT_MRT3847_124969C.1
caagcttagcacaagtgggtaaaatattttaatgacgtgttgataggaatctatctgatcttctcactctgccccatttcacttctttttatatttttaagtttttttttttataaataatatataatgcaaccccctattattattatcattattcacctttcaaatttcaaaatgctctctcttgtctaaacttggaagtaacaattatggtatggtagaagtagtagtcgaaccagtatgggctgcttcttttcgtacttttcgcaacttaaaacaagccgcgaacttcaattcctggaattttcccctttttcattttttttcccctaaattttaacgacaccttcttttttttaatttttgccctaaccct

SEQ ID NO: 27649 - DNA, 300 bp, Glycine max
  Clone ID: PAT_MRT3847_12496C.1
cattgccaccccactaacacatatcatgcaatccatagacactctaaacaccaacgggtgaaaaatgcaatgctttacaataacgtaaaaccaccataacgtctcaatacagatacaattatacataacaatcaattaattgtatccaaaagacacaccaacagacacgttgaatccatcagactatacgacatacacatctatcccatactacaagaagaagaacatttgaacgaaaactgtagcaaaacaacactacccaatatcccaaatcaatcttacaccaacctacaatgacaa

SEQ ID NO: 27650 - DNA, 1119 bp, Glycine max
  Clone ID: PAT_MRT3847_124970C.1
gatcaacaatggcgagaaaaatctgatacccaggtgcgtctttcatttcatttcacactgatcccttccctttcttcattcttctatcgtctctgcgcaaaacctttcattttcacactcaaccctttcttcatccttttatctcgtctctgccaaaacgatgccgtttgctctggagaataacggaggagttacgatcggacggtcctccttcgcttactgcgtcgcgatctgcgatcgtgattttccggaggatgattccgactccagctccgactcctccatcggaaggaacagcatctcgtcggaagattcctccgaccgggaagacgccgtcgaagttgaggttcagagttccttcaaaggccctttggataccatcaatgatctagaggaagatttacccgtcaagaaaggcatatctaagttctatagcggcaaatccaagtccttcacaagcttagcagatgctgcagctgcaagttctatggaagagatagtgaagccagaggatccttatgctaagaaacgcaagaacttaatagctcgtaactcctcaattgagaggagtcgcagttgcgcaaacattggtggaatatcaaagcgacccagtaacataggtggaggagcatcttgtctcactctgaactgtagtgaagagggtagtagctccacttcaatatcgcctccatgccctcttcctcctcttcatccccgtgctattaatcggtcatcgctgcctcaaccttcttcaactggacgaaatcctccttggagatcatattcatggactgatctgcactctgttgctgaggctcatgatatatctggtttggctatttgtagtggaagctaaatgcactgaatttttgacaccaatataagcttttagttgatagccagtgcccatgagtttggttcacattcgagtttgtttgtaatggcacagtactttgtgaacttctcaatgtcctatgtgtacccacctgacttgagtgttgtatattattatatctcagctttggttattttttacccatgatacaaccctactgctctaagttgagcataatccccgttgcaggtatgacatacttatcaggttgagaataataacaa

SEQ ID NO: 27651 - DNA, 295 bp, Glycine max
  Clone ID: PAT_MRT3847_124971C.1
cagtacatgtgggatatgatccttttcttggtggaattcaaaaatatgccactcccatgatgcccctagatgaagaaattctttctaaggttgcacaagacatggttgaggaatggtttgattgtgttgatgaggaggattcctttgaggaagtttctttaagtgcagtacttagtggtgttgagggtttggcctatatggtaggaatttctgatagccttatcggagggttttacttatgagctcttacatgagatattgtgcagttggttcttggatacctgtttttgtgtat

SEQ ID NO: 27652 - DNA, 640 bp, Glycine max
  Clone ID: PAT_MRT3847_124972C.1
tccacgcgtccgggctcgtgcggggcgtcttccatttcatttcacactgatcccttccctttcttcattcttctatcgtctctgccaaaacgatgccgtttgctatggagaataacggaggaggagttacgatcggacggtcctccttcgcccactgtgtcgcgatctgtgatcgggattttccggcggatgattccgactccagctccgactcctccatcggaaggaacagcacctcgtcggaagattcctccgaccgggaagacgccggcgaagttgaggttcagagctccttcaaaggccctttagataccatcaacgatctagaggaagatttacccgtcaagaaaggcatatccaagttctatagtggcaaatccaggtccttcacaagcttagcagatgctgcagctgcaagttctatggaagagattgtgaagccagaggatccttatgccaagaaacgcaagaacttaatagctcgtaactcctcaattgagaggagtcgcagttgcgcaaatattggtggaatatcaaagcgacccacaaacataggtcgaggaggaacatcttgtctcactctgagctgtagtgaagagggtagtagctccacttcaatatctcctccatgccctcttcc

SEQ ID NO: 27653 - DNA, 181 bp, Glycine max
  Clone ID: PAT_MRT3847_124973C.1
catagcttcttttctcccgatggtaccaagttgagggtgtttgttggctgtgctgagggctggaatactattgagtgatactttctatctttgatcagacaatggatgaaacccttcttgtagtagagataccatattgcatcttacttataccattaatatctggaatatcacacttatc

SEQ ID NO: 27654 - DNA, 371 bp, Glycine max
  Clone ID: PAT_MRT3847_124974C.1
ctcctccaaattgcgtcttcctccaatttccagtttctactttctagcttctttccttttctttaatattggcacaaactttgccttctctctaattattcccaaattcataatcgtcctttgccctaaatcgagtataacaatcatcctttgccctaattccatctcacttccattattaatagcataaactcctccccaatttgtgaatttcccttctgtcatatgtttgctttcatctctctcacctatctagtctcactgtgcttatggtttctgtattttgctggaatcaccgtgtctccacctacacgctctgccaaagggtttctcttcacaacaaccagtttggagtctcttcactatgcttt

SEQ ID NO: 27655 - DNA, 713 bp, Glycine max
  Clone ID: PAT_MRT3847_124975C.1
ctgaatcctgaggtcttagataataaaattgtgtttgatgaaatacaactatgaggaaatcgcttacaagtatataattaccaaccataacaaagttttatcctactagataaaatctattacattaattatacatcaatcaactcaattgaaaactaaatcttcagaaatattatttataaaataaaaatgcatgattgtctattataatgggaaatagaaaaagggaaacgaaaaacccggataacacataatctccaatgtctacaaattagtagacaaaatgctgagcaactacaagatttattttcattgtgaactgaataacgctttgctaattatgcctgtggcttcaatatatcgatcaacgcatctagagatgcaactgctttcactcccaccgaggcttgaacctggttttgtaacacacttctcaaaacactttcttcccacagtctcaagaaattgttgagcatactcaatggcaagttggttcttcaactggtttttgagatcctgagcagataattggcgcgacgacccactggattgatttgagaacgaatccattgcttccccgactgtatagtggagcttgtgcgcagataattggtgcaactgtgaagtgtagcttagaaacgcactctatgtttgccccccatcagaagcagccaagctatcgttaaataacccctaaagtaatgccctttcct

SEQ ID NO: 27656 - DNA, 316 bp, Glycine max
  Clone ID: PAT_MRT3847_124976C.1
gcccggggtttaaaaagggtggggaaacctgccattaacatttaacaatttgaaaataaccccttcatttcccaactaaaacccctggcaaaggcaatgtttgtgaacccccaacaaagcttttggccgggaaaaagttccccaaccccacaaattttgttttaaaaaaagaaaatttttattataaaacgttaacaacatccgggggcaagtccattatcacgggacccattagcaacagattataaccgagttttctttacttttttgcagcacttgcaggccttaaatcccccctgggggcaaaaacctttcc

SEQ ID NO: 27657 - DNA, 487 bp, Glycine max
  Clone ID: PAT_MRT3847_124977C.1
cccacatttccgtccatgcgcccggccatgggcatggccaagagtacaccttacgcttaggatccgctagatatgcgttctcgaagacgagaacaacaacatcgtgacaacgccaagtactcacagtccaaatatctcgctccctaacgccacagtgcctttttactcctcaacgagagccccttctctcaggaccgacccttctttggctctgctggacaacgccccagacttgctataagagctcatcgaaccgacgcaaaaaagcaagaatcagctcaccgtaggaaaaatgaaagtaccagcaagggcattctcttaccgcccaattctccgctggagacgatcttctctttctgtgacgtgaaatggcgcacatcatactcaacgatcgaaatctgttatccggaaagaaactcgctctctccgctgtgcctctgctgggaatgctaactagatcgcttggaaacttggctctggtttcata

SEQ ID NO: 27658 - DNA, 785 bp, Glycine max
  unsure (1)..(785): unsure at all n locations
  Clone ID: PAT_MRT3847_124978C.1
cgntatcgaagctacttcatactcgtttggtacaataaaattgtgggatgatggaatatggagtgcaatttaaggcttctccttctacagcatcaaagtgagttgaaagtgattctccactctaccaagtagcaatcagagaaaatcaaaaccttcccatcccaaatcattcttagtttgctcctcattttacactcaaattagcagagtcctaggcatttgtttttttttgatcggcaaacaataatgattatattacttgagtaccagaggtaccaaaatatacagattaagttagaagccacacaaatggttccacgcaaaccacaggttggtcaagctcggaaccattgcctagctagagaggtgacaataaggtgtaacattcaattaacattaagtccacaactactaactgaatcctatactaagattgctggaccagtggttgtaatgagtgctgaagcccttctccaaattcctaagccacgtccaaagtaagaaaagtgcatcgtccaacactttgttggcatcaaaagtagcgtttgaaaaaatgacattatttctgtgtttccaaattgtccatgtgagtgcaagccaccacaccttccacctgttagccctcactccgccctccagtccacctatatgatagaggaaatgctgctttgaatttagcggaaaagcacccacaatattcgtccaattcagcgattcccaccatacaggaagaattctgctacactgaaaaaacaagtgacctgcgctctcctccggacgcgtgg

SEQ ID NO: 27659 - DNA, 455 bp, Glycine max
  Clone ID: PAT_MRT3847_124979C.1
ccaccggataaaaatcaaatgaaaccaaaaccaaaaccaggggttatgatccttttgcaaaacaaacttttgctacaaaagtcatttttcaccttattttcaaacataacaaaacttaattttttttttcagcatacctttcaacaagggatgcttctaaatgatattatttcattttttacatacaaaatacaaaaaacttgtaatttttttttcccataatgctaggttgaaagaggtgttgcccaatgagcgatgcaggatgggggggtttgtttgccataaaaagcaccctcgactttaaagcaattatttcttagtagaggtcttcccttgccacaaacaccataacgccacaaattaatgttgcccaaagttattttttgacacggtttatctttactgcagttaaaattgactgcaatatcagtttcgctgcttcctcaaatatttct

SEQ ID NO: 27660 - DNA, 210 bp, Glycine max
  Clone ID: PAT_MRT3847_12497C.1
tttattacgagggcgacataggcgaccaagccgccgttgataaagacgggaccaaggggggtcaacgctcccgcgctcgacagctcaaactggctgcgcatagtcacctagcctttctgacagattacctgtgggagctgttgtggcagaggactgcgtgggagtccaagccatctatgtaggaacgaagatgccctgggaattcaggaa

SEQ ID NO: 27661 - DNA, 271 bp, Glycine max
  Clone ID: PAT_MRT3847_124980C.1
gcgcacagcctgtccgcagatgacaaaacggcaccatggggaactacagaatgacctgaccacccgtcattgggaaaaccctgatctgaatcatattttctaatcacatcccaacattggaacatgcattgaccacaatcttttgataccttctgatgcaatccttattggagaaccttatgacaccgatagccacgatttaagattcaacgatactagtctaacaccaaatctactaaatacttaaactgcttcctatacttatgactct

SEQ ID NO: 27662 - DNA, 157 bp, Glycine max
  Clone ID: PAT_MRT3847_124981C.1
gcgtacgaaaaaaggttcatagttgatatcttctttttaacgatgaagtttgaagattttccagggggatgcatggcaaaaatactggcctacaccactctcgctgatgtattctagctttttttgtattacaaagcctttcatttcctatttaaat

SEQ ID NO: 27663 - DNA, 398 bp, Glycine max
  Clone ID: PAT_MRT3847_124982C.1
gtacaatactatgggatccaaagaggtggcatcgccccactctagaacctatcaggcaacttgactcggtcaaggaaagttcgagggttagcacattgattgagcaggtggttgaagatgaaagtcaaatggagggcttaatgcacaactgctcgagagttatggtctggcagattgatcttgaatcatcttattcatcctatcctcagaaatggattgcaaagaacaacctagatgccattgttcatcttacacttgtgtagaaatcctcagatgcagaagtggagagcagtaaattttcatcctgattggaagattataaagaataggaagtcgcctgctaatgctgttatttatctttacatgctccagtgcctacttcgatattccatttaacg

SEQ ID NO: 27664 - DNA, 221 bp, Glycine max
  Clone ID: PAT_MRT3847_124983C.1
gctcgagcacacactccctctcccaaactattaccctttctccccaaaaaataaacacagctaaagaagcttattcaaggaataaccccacccatacccctctttcatttaaacatctccacaccactggatctaaggaaccctattaccaactcactcctactcaatatccacaaatcccgaccaaccctctgcaagcatacttcatcaaactttatcac

SEQ ID NO: 27665 - DNA, 655 bp, Glycine max
  Clone ID: PAT_MRT3847_124984C.1
gatatgtactacagcaccggaggaaacgttgtggtgtgatgcgagagagagatggccggtacctaccataaccaccagcggcacgtgctacagctggtgatgtcgtgccggaaaatcaccgcccaggtcacaaacaccaccacatcctccatcatagccatggcttcatcatcggagcaggaattcgtggctcactaccgcgctcagcttaatcgcttccccagatcgcaccgcttctgggacgctaaagtggcctctcgcgtcggggagaagctagggttccgcctcagagaaatcggcgtcaccaccgtccaaatcgaccctcgcgaggaacagtcccgtcccgtccattaccgcgtcatgctctcccccttgttccattccataaaaaacgccggcatccacgtttccggcgttgactaagtcaaattacctttctgacctcacctgtaagcttcaattttgagtgctgtaatttggggattttccatttttgtgccaataaaatttgaccctattattattattatttgttgtgctgcctgcgcaacggaaactgcttatttgtttgtatcaacgttaataatgtgcatgtggctgctccagtcgccagaattttatttatttatttgttggttctggagttatttggtcc

SEQ ID NO: 27666 - DNA, 275 bp, Glycine max
  Clone ID: PAT_MRT3847_124985C.1
attagagaacatgaatactataagccttactttagtggatctaaattgaaaagctatctagctggtcataatatcaccattactgatggtattgacaagactagtacaactttgcaatttagaaagttagcagatcgagattctcacaagagatactctaaacagatgtctaatgtgttgaatgtagactcttgaggacaaagcgaatgtacggtcacaatggcattatatttcttgtaacaatcaggctaagccagatgcttatcatggcaatg

SEQ ID NO: 27667 - DNA, 181 bp, Glycine max
  unsure (1)..(181): unsure at all n locations
  Clone ID: PAT_MRT3847_124986C.1
ctgcggcaatagagagtagagagtaaacataaaatctgatgcgcgagtggctggtgaaggcagctactgcganggaaaggaaacatttttaacctccaaatccattgccggttccttaagcccatccaaaaaacttggccaggttctttttccgccttgccaatttcgtcggtcttaggtt

SEQ ID NO: 27668 - DNA, 251 bp, Glycine max
  Clone ID: PAT_MRT3847_124987C.1
gccgcctcaaccacggttctccctcacccctttgcttcttctgctcagtctggcagccgagtccctcattcatatatagtgaaaagaggatagttgaatgaaaagtgcactgtttatagcttgagagagtgcaatcaatatacctgaacaactaacatgggacatatagctactctgcaacataatattttcagcttccattctttgaatggtctgcatatttgtaacaaacaagagagctgtattttggg

SEQ ID NO: 27669 - DNA, 264 bp, Glycine max
  Clone ID: PAT_MRT3847_124988C.1
gtcgcggtcgcgaggggagaccgagggcatgcggtcaggatctgtttgcagaaacaacatctgcagatatcctgagacaaatatgttgaagcaatggtgcattaattgaaaatggttagtatactgagggataccgacattggtgtttagtctggcaactataatcataattatggtccatacactcatattaatggaatttacgttataaactgatagaataaatttatttcattctaaactgcaagtaatctgttttgaatt

SEQ ID NO: 27670 - DNA, 338 bp, Glycine max
  Clone ID: PAT_MRT3847_124989C.1
tcgacggctgctagaagacgacagaaggggagtgcatcatcggatagaaataagggaaaaatggggtcgttgaaactgcagaagcgcctctcctcatgcgtgctcaagtgctgcagaagaaaggtttggcttgaccccaatgaattcaacgtattcttcatggccaatttttggcaaaacatcatggaagttggttaaggatgggtttattatcaggatgccaactaagattcacttcctgttacgtgcttgttggatgaaggaggcttataggatgggccgccactcctgtatttgtaaacataagggtacaagggaggcaaggtttcccaccaaga

SEQ ID NO: 27671 - DNA, 233 bp, Glycine max
  Clone ID: PAT_MRT3847_12498C.1
gcacgaggaatgttgtgggtgactcaccttctggtgatctggtaatattagaaaatcagtccagactactagatgagaattctgcttgtgctaatgatttggatgttgaatcaactgaaaatcatattgatgatcgtcaaaatgtcaagagttctgatgaagaaggaatactgaaaaacactgatagagtggaagggattcatgtatacagaagatcaataacaaaaaaaaaa

SEQ ID NO: 27672 - DNA, 615 bp, Glycine max
  Clone ID: PAT_MRT3847_124990C.1
acgaggttgcctcaacatgttagatttacaacaacattacaaactgtcccaaaaatcgaccacaaaaaatgaggcaaaaaaattgattaggtttcgggaaaaataagaaaaatagtgtgcttggaatagattcgtggtggaagataaaaatgacacttttagtcttccataaaagagaagtgtcttgggaaaaaagaaaaatcacaaatattctcataaataaagaacaaatccagcaaagcgtcgtcgccttcagcaccgcgattagcctgtcccaaaaatcaccacaaaaaattagacaaaaaaaatgaataaaatagataaaaatggaatctttattcttcaacaccgtcatgtgaatcatattgttgcgaaaggtcacactttttttctgtccaaggggaaaataaataaaaatggaacctcatcaaaatcagacaaaggtcacacctttttcccgtccaaagcaacataaaaaccaaagcgaaaaaaaaaacgaacaaagaagacccttgcatggcaaaacgctgccaccttcagcaccgccgttagcctgtcccaaaaatcaccacaaaaaattagacaacaaaaaggaataaaatagataaaaatgga

SEQ ID NO: 27673 - DNA, 283 bp, Glycine max
  Clone ID: PAT_MRT3847_124991C.1
tccacatcaaccgatagctttcttaatacacaattcttaaattaaaatacaacaaaactcaccaaaaaaacaataagattttcatctccctattcaacgtacaattacacataccacctcaattcttattccaaaccactattaaaaaaaaagactttatcctcttatttaattagtacaatcttcaaccattcacctttcccttcataaaacaaataatttctacaacaaactatcactttaaattcctatactttttacataccacgaaaaataatcatac

SEQ ID NO: 27674 - DNA, 538 bp, Glycine max
  Clone ID: PAT_MRT3847_124992C.1
gaactagtctcgagtttttagtttttttttacaagtttacaaatatttaatcaaataaaagtatttgacaaacgattttttcttattgacttataagattttcttttaaacataacttaaatttaggattatcatttttattttcaataaagtttatcattcgatctaaaattaaattatttcttttgattttctcattcttatcatttgttaactaaaaaaattattttttcagattgacttaattaagtttttcatacctaaaaaatagaccgttttcagattactacctaaaaatttattttttgtcaaataactacctgaaaaaaaaattatttttcaactcactacccgtaattagtcagcttccacattgagtgatgacgtgacagacaaagtgtcacattatcatgtccaatcattgacacatcattgaaggtaatgatgtgaaaataaggtattcatgacaaagcactctatctgtcatatcattacggaagacgactaacgatatatagtaaaatgaaactgaattttt

SEQ ID NO: 27675 - DNA, 352 bp, Glycine max
  Clone ID: PAT_MRT3847_124993C.1
aaaaaaaaaaaaaattaaaaaaaaaaaaaaaaaaaaaaaggaggggaaaaaaaaaaaaaaaaaaaaaaaaaaaaaaaaaaaaaaaaaaaaaaaaaaaaaaaaaaaaaaaaaaaaaaaaaaaaaaaaaaaaaaaaaggggcggccccccctttttaacctttcccccccggaaataaattccggcccggtccctgagggcttcccaattttccttttagggggtcgttttaaacctgggcgaaaaaatggcaaaagcttttccctgggaaaaatttttttcccctaaaaattccaaaaaaaaaacaacccgaaatcttaaagttaaaaccctggggtccctaatggggggcct

SEQ ID NO: 27676 - DNA, 397 bp, Glycine max
  Clone ID: PAT_MRT3847_124994C.1
actaagaaaatatggtccaattgattaactaggatcaaaatacccaataatacgtcagggggaactggacggaggctcatgccttcctaaacatatcggtgacctgaaaagacaggcgcgagttgataaaattggtgatggcaaacgtttagattctgatgcacggattaatcgattacttaacacttagcagggctactaggtggaactgtagcttaggtttcggggcctccttcgccagttttttattccgagcgttggggggtgctgtctccctgtcggatgccgctaccacttttttgacacctgggatcctgagggggggttctttggtgggcccccggcaacattgacaggtatggcctaatctaccagtttcttgatggtctcttccggg

SEQ ID NO: 27677 - DNA, 292 bp, Glycine max
  unsure (1)..(292): unsure at all n locations
  Clone ID: PAT_MRT3847_124995C.1
tgacaacccaaagtgcttctctcctctgtctttttctctctcttggtatccttttggctagtgccagtgctgcaagtgcanatccaagaagcgcagtgccaagccaccatgtttcaacattcaacagaagcctttttccctccacttttctctttgggcatggttctgctgcttacgaggcagaaggagcagcaagtgtagatgggagaggaccaagacatatgggacacctacactagacagcatactgaaaagatttgggatcatagcaccggtgacatgggagctgatt

SEQ ID NO: 27678 - DNA, 923 bp, Glycine max
  Clone ID: PAT_MRT3847_124996C.1
tgcagggaaaattgaaaatgtggaagataaggcgcagggacacaacacaaggaatggtcttggtgtgaaccatagccatggctacttcatcaaccacattattgctatcatcactcatacctgcaagcatcccatcattcaactctggaaaccattcagtttttttgcttcaaaaccgttctttgaatcgacccaagaagagagtttccttcgttgttcaagcagccaagccccctattggtgtggaaattccaaaggtgcagcctcaatttaagcctccgtttcttgggttcactaagactgcagaagtatggaactctagagcttgcatgattggaatcattggagtttttattgtagagtttataataaacaagggcatacttcaagtgattggggttgatgttggcaaaggccttaatattcctctctgaacattatttttggctgtgctcgtaaatgttgtcatatataaagtcaatgttttaaccttttttcttattgatctcaagaacaatttttcaaattgccgtgtcatttgaaaatcttctgtaatctaatatctgtattgaggtatatttctgatattcttgggttgacttgttggtttggtatctggaactcgaaactgcctgtcaagctatttacgaagttattcatcaatttaaaataataaaccaaatgttatgcaacgaaaagagatataagaagcgaagacagagtatgagatgagatgggatatgaatttgttatataaataaggggtctctaatttattttttcttacctctcttttttcttctcgtccgtctcctaactcttgtgccattatcctcttcatacctcttgactttcaggaatctcagggtaagcaaggcaaatagaaaagaatagggttttttttttttttttttaaaaattag

SEQ ID NO: 27679 - DNA, 598 bp, Glycine max
  Clone ID: PAT_MRT3847_124997C.1
gaatggtcttggtgtgaaccttagcaatggcaacttcttcaaccacgctattgctatcatcactcacacttggaagcaccccatcaatcaactcccgaaacctttcattttttttgcttcaaaatcgttctttgaatcgacccaagaagcgagtttccttcgttgttcaagcagccaagcccactgttggtggaaattccaaaggtgcagcctcaatttaagcctccgtttcttgggttgactaagactgcagaaatatggaactctagagcttgcatgattggaatcattggagtttttattgtagagtttataataaacaagggaatacttcaggtgattgggcttgaagttggcaaaggccttaatcttcctctcggaacattatttttggttgtgctcgtgaatgttgtcatgcataaagtcaaccttctttttattgatttcaagaaatttttttgaagtgtcatttagaaatcttctgtaatctaatatctgtatcgaggtatgtttctgatattcttgggttggtatgtggaactcgaaattgtttgtcaagctatttacgaaggtattcatccatttaaattttgcaacg

SEQ ID NO: 27680 - DNA, 509 bp, Glycine max
  Clone ID: PAT_MRT3847_124998C.1
gccctttttttttttttttttttttaagtagaaccatttagaaatttattttacagtaaattgaattccggtaaaggctgtgagagctggaagtttatacaaacagtttgtctttgaagtaacattaacatttctttttttttacaacggactttgttttgataaaaactaaattcattgtccaataatttaaaataaggtgttgcaccccagttccctgaaaataagcaatacttgggggatttaaacagtaaaagagaggtttctttttattttttaatggaaatggggaatctataagaacattttgtttgcccagaaagcattccagttatacgaagctgcagtggtaagaaacttccactgtatctttacatattgttgaatcccatgatccccttggtgctgccaactgctccttgttggaactgtcgcatcattgattgaagtcctgccatgttaccgctgtgctgcatatctttgtggtctataattttgcacattggtcg

SEQ ID NO: 27681 - DNA, 251 bp, Glycine max
  Clone ID: PAT_MRT3847_124999C.1
aacgcccccacacacagcctcagaaccgcagcacacatatattctcaggtttgatctgctgccactggcgtcggatctgctccgtcacagatttctgccgcctgcgatcctctactcaaataggtacgacctctcttccttttttttctctgtataatgctccgacactcggttctagctgccataatcttcgaattccctcccagcaattgacactctgctgtggctttttcttgtttgcattcttagtc

SEQ ID NO: 27682 - DNA, 176 bp, Glycine max
  Clone ID: PAT_MRT3847_12499C.1
cccacgcgtacgcccactcttgcggaaagctcgctcgtgggtagccccggtacgaaccagggtttgactcggagagcgaatcagatctcgattattcacggctctgctaacacgacggattgtggtcttatttacctgcaataatggctgctggctagtgcttaggttctctcgct

SEQ ID NO: 27683 - DNA, 416 bp, Glycine max
  Clone ID: PAT_MRT3847_1249C.1
gtccccccaaaactaatccccccagaaaaaaaatttggttaaaacatttccgggaacggggggaccccgggtaaaaatttgggggcccggggaaaaaggacccccccccttgggtaaagccattaaccaaaaaaaacaagggccggaaccaatttcaaaaaacgggggggcccccccccaaaatcccccctccccaaggtcccccttggccccagaggggcccccaagattctttttaggggacaaaaatgggggtaaattttaaaccccaaaccggggcccccttttgccccccccctttttgcccctctgggcccgggaacaaaagggggttccagagattttgccttatcgccccgggtgtccgccgcttttttaaaaagctggggcggacaccgttttttttttaaaagggg

SEQ ID NO: 27684 - DNA, 333 bp, Glycine max
  unsure (1)..(333): unsure at all n locations
  Clone ID: PAT_MRT3847_124C.1
tnctgcncacntangcaantcggaatnaggcncgngtttnncttctgcttcncnnnttcgtgccgnanncnntnctgcaaatgcgacaaagtacccaaattgaggttccaaattgganttntcgganngacaatcngngnnttntacgggnntnnccactgggcattgnntnagggggnattnaacnngngaagcggtnttncangatggagntgcgcatngnaganctaccatntncacnangnnccattgtcaggnagcnntgtttagctacttgaaggggctaaggatnaacgggntcngngcagncacnnnaggtannnttngttccnc

SEQ ID NO: 27685 - DNA, 132 bp, Glycine max
  Clone ID: PAT_MRT3847_125000C.1
ttcggccggcccttatttgtttgcgttggagaatgacacactagagacatacattaccacgagaaaaagaggtgggggaattttcaaatacgcctgagcatactcaacacaaagggcctgcctactggcctt

SEQ ID NO: 27686 - DNA, 314 bp, Glycine max
  Clone ID: PAT_MRT3847_125001C.1
agataattacagagtactatcctcatggtagtaggggtccggttgtggctctccgtctggctcccagacacgctgtgctgttgcctgaccttattactcacgttgacgaatatgcaccaccggtgataaatccgaaggctgctaataagatctctaatgaaggagggagcgagaataataaaaagcgcacgaagaagagcgtggagacctacaatatctacattttttaggtcctcaagcatgttcaccccgacatttgtgttttcagtctggccgtggtctttattaacagcttcatcaacgacattttttag

SEQ ID NO: 27687 - DNA, 547 bp, Glycine max
  Clone ID: PAT_MRT3847_125002C.1
aaacaggaatgggaaatcatacatgggaaccccctattttggaaggggatcctatggatcctacaaatggcccaaaaatataaatccatttaccctctgctaaaaaattcggggaggctctaaaggcagttataaaaaaaaaacatgttctgcaaaaaattttctatataattttccttttctttccggaaaaaaaagggaaccatacaaagaatttcccgaccacgaatccgaaaaattagcttggggaaaacaaaccattgaaagcagggggatatattcgtttttcagctaacccaatatcaaaaagtttcaaattcccctcaggagccataaaccttttaacattattagcatatagggggggatcattcatctcctgcggggggggagggaaaacagggactcggatcacctccatataattcacaaacggacacaggaaaaatattacatggcgcaccccaaatatggaatcccaggcggggctaaatctcgggaaaggatatcttaaaatcacaggaagtactggggcctttgccaaaaa

SEQ ID NO: 27688 - DNA, 486 bp, Glycine max
  Clone ID: PAT_MRT3847_125003C.1
gtgagaagacgacagaagggcgaacacaaatataacgttactttatatataattcctcgacaatatctttacctggggacaagattgatggaataaaatacaggttactgatttgattgcatcttgatcccattttttcatttatcattacacagctggtatgcttatagatcccatgtcaagtagtcttggcaggatctaacccaatcgtgcatttattttcaagggcacaaaattatcaccacgcgtcacacctatgttcacaattgcagtagcagcaccagcttcatgagctgccctgacaagtccaaaagcagacatggccatcagagatgacccaagtacaagaaaagcatcacatcttttaaacgctttcattgccatatatgctctgtccttgggaacattttcaccaaagaagacaacttcaggtttgtgaacttcattgcacttgtgacaagttgggatgtttaaatccttcttcca

SEQ ID NO: 27689 - DNA, 190 bp, Glycine max
  Clone ID: PAT_MRT3847_125004C.1
cgggaccggctcggaaagaattaccgggagggcgaggtaaatagttagggggcagccctaatttttagtattgagagaataataattggatatatgaaagacagccaaaatgcaggagctatacaagtcaaagctgaaaaaagaaacctaggccaaatagattactattatttcagtatctaagaaagcc

SEQ ID NO: 27690 - DNA, 235 bp, Glycine max
  Clone ID: PAT_MRT3847_125005C.1
gggggtcaaagacttcactgacaggcagctttctcaagtgggctggcacgaatactatgattgttagctgtgccttcatcacctcatccctaccttcatccatcgatcatttcgtgctcgataatgaaggtagccttattgaaaatggtgtcacatattatatcttgtcagacataacatcatgtgctggaataagatcatccccaacttgaaatgaaagatgctctctcactgt

SEQ ID NO: 27691 - DNA, 240 bp, Glycine max
  Clone ID: PAT_MRT3847_125006C.1
atggttgcagggtcgcttattgttagtcgctattcacgacttagttttgcattgaatatttgcacaaaattagcgccttaccttcaatttatgaaagttcaagtagctgatgtttcgctaagcgagacagattcactcagtgagtggcatccgctaagcgaggcatacaactcgcttaacgcgttgggaaaccctataagaggattagtcagagaggtgctcgcacagcgcagcgagtag

SEQ ID NO: 27692 - DNA, 487 bp, Glycine max
  Clone ID: PAT_MRT3847_125007C.1
atcgggaacaggggggaccccaactatgaccccgttttttaaaaaaaaccaacaaaggttatgccccggggggtaaggggtttccccccaaaaaaaaaccccaaaacccccgggttaaaaaagggggccacaagcccccttttaaacattcttttttaaacacattctttttttttaggggaaatccaggggccccccggggttaaaaaggggcccccccaaggggaaaatgggccaacattttgggggggatccccaggaattccccccaaaaaaacaggggggtcccggccaaaaattttaaaagaggggtttacatgggatttccctggggggaaaaaagaccccaaccccctttccaaaccctgggggggaaaaaaaatcaatttttgggcaggggggtttaatccaccttaacattcacccccccaaatggggggcaaggggaacccctgaaattccctcaaggggggaaaaaccccctcgg

SEQ ID NO: 27693 - DNA, 158 bp, Glycine max
  Clone ID: PAT_MRT3847_125008C.1
acgcgttgtgaagttggatagagatttctgaactatgaggagatacctctttctcctgttgctgcctgtgtaggactagaaatgggagtttttacaaatgatagggaaccaaaagtttccattttaactgggactcgtgctccactggattgaaaggc

SEQ ID NO: 27694 - DNA, 171 bp, Glycine max
  unsure (1)..(171): unsure at all n locations
  Clone ID: PAT_MRT3847_125009C.1
aatcatcaaaggtgtttacggtnnctggtnntngnnttctctgnaaacatttggtagcttgtagagcgtgtntnggnaggaaagtggtatgngcgaaggangntganggttggtgagcgtgggttncttttttggggaaaggggttagccagggagngcntngtaagnaag

SEQ ID NO: 27695 - DNA, 438 bp, Glycine max
  Clone ID: PAT_MRT3847_12500C.1
gggcaagaaatttaacgggcctctcagctttatagatataaacatttttggaagataaatttacacaattaaagaccaatttagcatatatggtcatttttcccagaaaacaaaattgcaaatgaactggcttcttttgaggttcacgaaactgatccatcacctctaaagcaatcttcaactcgcagaagcagggtatgcattgttatttgcaaccccaattgcaattgcagaggaacattctctgttcttcccactgcaattgtttcccagctgcagttccgagacacaagggactacatttgcggttttcccatcaacaccatggtcatagagaaaccctttgaacacatgcccactaatctggaccgttgccaagtatgcaaactcattttcaccattcccaatggcagaaactttatggcacttgaacactgg

SEQ ID NO: 27696 - DNA, 200 bp, Glycine max
  unsure (1)..(200): unsure at all n locations
  Clone ID: PAT_MRT3847_125010C.1
gaacaaggggancccccgggcggcaggatttttccccgaggagaggctattgaaggcacttgcaaaccaacccctcaggggggccatagaggnttcagggagagatttccaattttacngggggggngntttcnacgggnattggggaagngacttanatnatggtgtggcagctggtggatacngaactgcnaaagggg

SEQ ID NO: 27697 - DNA, 317 bp, Glycine max
  Clone ID: PAT_MRT3847_125011C.1
gtaaaagcaaaggatttttcagtctaaggttccaatgaccgacactcacctaaaacacattaaaccaacataccccacttgggcccaattaacgcttattccggggctgaggcactttattcagttttcaacaattgaaattgatggaattaaggttcaattaacccccatattcatcaattttaatttctaaaatagcattactggagaaaaccttgagctaaatttgatgatttaattgagcccctaaacaaggtaaccgtcaattttttgttaaccccaacagccaattagaacaaggtatgaccttaaggaat

SEQ ID NO: 27698 - DNA, 328 bp, Glycine max
  Clone ID: PAT_MRT3847_125012C.1
aaatgaaattttgggggggaaggggatttttcactcgttttaccaatttgtgaaacagttggcatgtttgactgctttatacttgctgacggagttttgtaatcccggtcccagaccccggagggttaaaattgggggggggggccaaccctccatatggaaagacgcaccgcaaaacttaggaggtccatcctccctccctaaaaagggggggcgctaatttgagacattcacgcatggggtaacaacagcagggggctaggaaccgttgtacacgaaagagcgagaaaacaaaatacggccactttcttcagtgcaaacgccttaa

SEQ ID NO: 27699 - DNA, 216 bp, Glycine max
  Clone ID: PAT_MRT3847_125013C.1
ggaggcgaagtgaacggtttgaatgggacaaggaaatgacagcctggaatttcctcaaacagttaacgtgcaccgttggcgctcattctcccaccctctcccgtcgcctcatacactactcattacttgttccctctctctccgctcatcacaaaattgttaggtaccaatggcttccccatttccgtgtcaatctttatgccgcagttccaaatg

SEQ ID NO: 27700 - DNA, 189 bp, Glycine max
  Clone ID: PAT_MRT3847_125014C.1
atggagaatctaatgatcaacttcattttgctatccaccattgttgtcgtcactgttggccaagaggacatccaccaactcagtttcagggagggcaaggaactaggaagtaagagaataagcaacttacatttagcaataatgcagtttccagggcataagcatcccggtaagtcacatatgcagtag

SEQ ID NO: 27701 - DNA, 995 bp, Glycine max
  Clone ID: PAT_MRT3847_125015C.1
cggaattcccgggtcgaccacgcgtccgcaaaatctaggtatctaaaaccccttaatttagtggattttcaaggtttgagaagtgaaaatgagaatggggtgattttggagtaaactctcatctcaaacaagtctataacattaatttaaacttgcacaaactggttttacgacgaaaactccaccgattcaaaatttgacccctcaacacccaatttaccctagaaatggctcttgctttcacctttgtcactcatttttctcatttgctcagcccaagctttcccacaagtcctaaatgacattttaaactaggattaactcactttagcctccaattatcactaaccccaaatttagcttttcaaaccctcaaaacctcacacttttcaactcacatcactaccattctcacatttaaccctaggttaactctccccatcatctctaccagttttctaccaacaatttcagcacacaagcatcacaaagcatcattataaaaccataaaacagaatgggtaaatttggctcacatcaaacatgtcaagtttagcatgctttcaacaaattccttcacaaataactaccataaggcattaacctagtaaaactacccatcatatctcccaaaaacccaatacccacgaaattcatgtgagaagaagtctacccaaacctgaaattcgaagtcccacaacgtagaggtgcgcttcacgactccaaaaatggcttccttttgcaatttggagtagaaatggtgagcaaagtttggagctttaatggaggcttcaatggagaggaagaagaagagaaaagcaacgtgggagatgagaagaagagcttctgaatttttttctgctgagtgaagagagagagaacatgcctttttattttaaaaagacttcctctttccttttcctgaaagctatgtcacatgtctccttttgagtggagcaaaaaggggcccactttttctcttgatgtgactcata

SEQ ID NO: 27702 - DNA, 289 bp, Glycine max
  Clone ID: PAT_MRT3847_125016C.1
ggtccggccttcttctccactcctttactaggactactttagtatttagctctttttttaatgtttccaacatatatatatatatatatatatatggtaatgtgctttagcttttcatattggttgataaatgttaaacctttaaacctaggacccgtaattcttgtggtggtttaagaatttggattttttttttcattaagggactttgtttcgaatataatttcagatgataatagatacatccaacgactttgtagtatgtaggatgtaacaatccccagggtac

SEQ ID NO: 27703 - DNA, 218 bp, Glycine max
  Clone ID: PAT_MRT3847_125017C.1
cccacgcgtccgcacacgcgtacgaccacgcgtgcgcatacgcgttcggcatacatggcatgattcaccatgacagctagcatccttggcagaccagccgtcaccaaccgctcggctgttgaacccataggagatcactcgtacagaatgctggcaaagctggcgaagcagactacgtcagatatgcctatgacatggatggtagcacatggatggag

SEQ ID NO: 27704 - DNA, 567 bp, Glycine max
  Clone ID: PAT_MRT3847_125018C.1
tttttttttttttggctgactcattcttcaatggcacactcaacgaacgcaatcaggagacataaataacacacaccaaattaaaagtaaatctaacaaaaacatgaagatctcataagtaatatgatcatcaccatcatcacttaataaagatagtaatgataatgatcatattaaggatgactacatttggcataacatttaaaatacatgtaatatacgaaaaacatattatgacttttaatactctttacatgttttataaatccattgcacactatatgtgtatatatgaaatctgcaagaaagaaaaattgtagctattattgctgatgttttcacaaaaattagtgggaattttgacttaaactataattttttcctacttcttgtgaatttaaaactaaccaactaacaacaataacaacaaaaggaattgcagaaatctcttatgaaattatttggtagcatatatacacaaaaaggttcttgtaaacttacttggaaatgttttttttttcaaatttggctgcaaataatttagggatttaactgcagtttttcgtt

SEQ ID NO: 27705 - DNA, 1613 bp, Glycine max
  Clone ID: PAT_MRT3847_125019C.1
gaaaagcaccaaagaaggggaaatttaagaataaataaataaaaatctgcggatttatccgttcgcaggactatagaacaagggcctgatagagaatgggagtatggctctcagatatttctgcactacaaatatttcaacccaacatcatcatcatgcttctgttataactcttgtttcttcttctctttctctaacaagcacacgcatgcagaattccatacctgctgcgagaaacagcaagaacaagtttattactgctgagaacgtgaagagcctcgttagcacggtcgtgcttccttccatttcatccactccactcgagtctctccacagaggcaactgggtcaagctcatttgtggtgcaagctttgaggatgttgttgatatcagaaatctcagtctggtttacactcttgctggagttgactgcattgactgtgctgctgatgcatcggttcttagtgctgtgaatgaaggaattgaagctgcaagagatattgtatgccttagaaggccctgggtgatgatcagtgtcaatgatgataaagatcttcattttcgtaaggctgaatttgatccagaagactgtccagcagactgttcacggccttgtgaaaatgtgtgccctgctaatgcaataacattccaagggaaatctacttcagtaatttcacataacactgaagcaccaagagtactgaaggatggagtcataacagaacgttgctatggctgtggtcgctgtcttccagtttgcccctacgataaaataagagaggtaacatatgtaagagatgctattacaactgctgatctcatcaagagaaatgatgttgatgctatggagattcatacaagtggaagacagagtactttgttcaaagaactctggagtgctctaggagaatcagtaggatatttgaagctcatagctgttagcttaccaaacggtggtgattcaacaatatcctctatgaacaaaatgttctctattatgaaacccaatcttcaaagcttcaacttatggcagttagatggtcgtcctatgagtggagatattgggcgaggagcaactaaggaatcaattgcctttgctgttcaattggctaaagcaaaagaaagacctcctggttttcttcaacttgctggtggaactaacgctcacacaattgatgggttgaaaaaagagggactctttcaaacaactatttctgaatacttacatgatgatacgtcaacaacaagctcatctgattcatcacatgctttaattagcggcattgcttatggtggctacgcacggaagattgttggaagaatattgagatcaatgcaatcccaacatggtgcagctgcttcaattgaggaacatccccagcatctcttgatggctcttaaggaagcacttgcattggtggggcctattaaatgtctatgattgatgacaatttcacaatcacccttgatggttgtatttgcaagtgtagctacctaggaagaatagaaacttgttagaaaatagtaataattgaggacaattggatcatatatggctgttaataatggaggaagaatagaaacatgatatatttgttacacttaataattag

SEQ ID NO: 27706 - DNA, 337 bp, Glycine max
  Clone ID: PAT_MRT3847_12501C.1
atttctcaatctctgtgtttgcggttgaggattccgaacgagtgaccttgttcgtggctcgcaacgatgaacttatcatgggaaaagacaacgttcacatcaacattgtcgacattgcacatgtcgactctgccaagacaactaccactggtcacttgatctacaagcttgtaggtatagacacgcgtcagatagagaggatcgagaacgaggctgcccagacgaacaagaggtcattcaagtatgcctgagtgctcgacacgctcttagctgagcgtgacacaggaataaccattgatatcgctttgccgaagtgcgaaaccaccaagaactactg

SEQ ID NO: 27707 - DNA, 308 bp, Glycine max
  Clone ID: PAT_MRT3847_125020C.1
gacctggcaaccaatcaaccttttgttagggtctgggagagagaagcaaatatgtttctttttgatctattgggcaaatggatacagtggactacgtggcgtttccagaataattggttgattatctgcactataacccatggttgggttatccatgaccaagacttacgcttactttaccttcattgctatgaacttactttgagtgccacgcatgcatgcatgcacacgatttgtgctaaaaaagctggagactgtatactacctgtcggaccttgttcatgcacaattggcaaaggaagtagaat

SEQ ID NO: 27708 - DNA, 522 bp, Glycine max
  Clone ID: PAT_MRT3847_125021C.1
aaaaaaagggacgggccccgggggggcgggggggcttttatttttgggtttcaacccccccccggaacaaaattttttttttggcttaaaaaaaaaaaattaaaacaaaaattacctggacaaaaaaaggtttttccccccctaaagggggaaaaacgggtcttcaacatttttagttaaagccgccgaagctgggtaaaaaaaaaaaaaaaactttttttttttgggggaaatttttaaccccccttttaagttcttttggaaggggggggccccacctttccacacaggggaggggggggcaaacatcccggggcggttaaaacccaggggaaagatttggaaaaagaaaccccaccccccaaaaaatgggaaagggaaccctggtgaaacccctcgttggttttaaaaaaacaaattagggggggcccccggaagcccaaattttttcttcccggcccctttggcactttgtttggaaccctccaaccccctggtggtaagggtttgttaaaatgcttt

SEQ ID NO: 27709 - DNA, 255 bp, Glycine max
  Clone ID: PAT_MRT3847_125022C.1
actgtcatcggcagctatctcgatcgaactgtccaaggtcctgtcacgttaatggtaaaaggctaagcccacgccaacagatatagagggcgagtagtaaccacttacagtagctgtcgatgtgaggtaccagcctagggtgtagcaggtgccagagcaactgccaacgccgatagctaagaggattcatcgcagcgcaataaagcaagcacatgatgcaatagtcgattgtatatcagctcatagcctaagagc

SEQ ID NO: 27710 - DNA, 170 bp, Glycine max
  Clone ID: PAT_MRT3847_125023C.1
tgttttacaggctaagaggagttaattgcagggtttgcgcacgaaacaaaaccgaagactaaaaccctctgtaccaaacttcacagggctccgagataagggcactagaatccccaaaaatgacccaggcaaaaaaggcccgaaccaacctttggggtgttgtccgaaaa

SEQ ID NO: 27711 - DNA, 180 bp, Glycine max
  Clone ID: PAT_MRT3847_125024C.1
tggggctgaaggactgtgacctagttcgagaggcatcatggcgacactggattccgacgtgaccgtgttttcagccggagaagcctctaacaacgccggttcttctttgaccaccaagaaactctaaacgtttcgagatcaagaattggaatgcgggttccctctgggcttgggatattg

SEQ ID NO: 27712 - DNA, 569 bp, Glycine max
  Clone ID: PAT_MRT3847_125025C.1
ccacgcgtccgatttttattgttatagttgtgaatttgtgggaatatataatttgatttttgatagaatataatttaaaccctttaattggaggttaatcattaattagtgaccatgttggtgacttggctagttcttggttttgaagcaaatcatatccaagtctcttctactaatttagtttttcctttatggcagatggaaaatacctgttgggcttgcttggtcttatgtttgtcggttagtttgttattaagaagcctatgaacaactattaagtttatgaaacttaagtagctgcatgtccaagaattctgatatttctcattaagatcctgtttcaatacaatttagaagagctcttctaactcacctgtttaggttccctgtactgcttccaaacttaaaactgttctaagttgggaaaatactaactataatttagatatttaaatatttaattcctttctcttcctctgacaaatgttcttacattgttcaaggaagcatttttttttaggtgaaatatgccatactgtaagagtttattgttgctgttttaggtatga

SEQ ID NO: 27713 - DNA, 328 bp, Glycine max
  Clone ID: PAT_MRT3847_125026C.1
tggggttctagtgtgtgattgtttggggatgtaactcgttcttcttctgatgctgttctgtgtttgaactagttctttctctcaccctaaaatgtcttactgcagtggtaactgtggttgcataagctcctgcaagtgctcaaacactctgacagatgctgcactatgtacccacacttgatctacactgattcaaccaccaccgataccttgctcatggtagtgtcacctgttaatgctcaatttgacggtactgaaatgagtgttctctataagaactatcgctacaaatgtggaccaaactgctcctgcaacttttgcactttca

SEQ ID NO: 27714 - DNA, 193 bp, Glycine max
  Clone ID: PAT_MRT3847_125027C.1
tcctaacttcctccttttccttttctcacttcttataaagtctctcaaagacacattgtacctcacattagaaaaaattaaacaaatcatagtgatatagtgctatatcaaccaaccattcaccacatatatgtataacagtacaaataaaatgccgactagtaagaacatattcattataaataacccattc

SEQ ID NO: 27715 - DNA, 880 bp, Glycine max
  Clone ID: PAT_MRT3847_125028C.1
tcctctagagcggccgcttttaattttttttttttttttttttttttaggtcacaaggtgtttgctgttgctcctacgtatgttgagtaatcgagtgtgctacagataaaatgaatttttaattattatcttcccttgagaacataaattatgtttgttatatttttgtttatttagggggaaaagaaagcaatatttttagaaaatagaagaaattttatgtttttttttagttttttaggtcaacaaggtgtttgctgttgctcctacgtatgctgagatgcaatgagaaaatgagacttacgtagttttttttatagaaaaagagcttgtgtgtcgagttaattattttattattattattattattattattattattttggaaagattttgattttgtggtaaactttgtgaattcaagcaagtcgaagaccaagcatgacattcacaaaatttactcacactttattgaaacactgccaagcaagtcagagacccatcatggagtctgtgaaacgtgaaaagggagaattaagtgttcatttatgtgagaattttactccttttagaaaagactttagttttggggtagattttataaaatcaagcaagtcggagacccaacatggagtaaaaagagcataagcgtgtactaaagaatgctaatgcggattttcaaaaataaataaataattgaagtagtgctaggaaatcaaataaataaaatgagaataaagatgaatagaatagaagtggaaagtaaacttagtaattaagaatgcaggattgaaacatgcccttctgtcgtcttctcgcagccgtaccctcctgtcgtttttcagcagcccgtacggacggcgtgggtgcgaccccggga

SEQ ID NO: 27716 - DNA, 288 bp, Glycine max
  Clone ID: PAT_MRT3847_125029C.1
ttttgtcttaatcgaggatatgacattaacataagagcgtaaacaaacatggggtaactcattcacttattataacacccaatcactcactagctgccataaaacccaactctaaaaatccatggttaaaatttccaaaaaaccatggtaggtagcttctttgtctaacaagctcgtgaaggtcatgtacaatcttgaacataacccacatttcataaaaatcataggttggcacataaaatataatgctctttttgtgacatgtgtttcagtccgagggggggggag

SEQ ID NO: 27717 - DNA, 160 bp, Glycine max
  unsure (1)..(160): unsure at all n locations
  Clone ID: PAT_MRT3847_12502C.1
tgttgcntgctcnctnncgtnnnctcggnnttnggctcgcagttcttgggcttctganatagtgngactnnncgangcngngatgtcntccatgctgcncttccctnnctcgttncntcagncncgnnggnntncantgccggngtcccnntcncgcgnt

SEQ ID NO: 27718 - DNA, 726 bp, Glycine max
  Clone ID: PAT_MRT3847_125030C.1
ggggattgaaggtgctaatggacttcagactaagcctcagtacatagcacgaaaagttgttgctgctgctcaagggggacctggtggtaattggtattgattttgaaaatgctgaatttgtggcctgcaactgctttgtgccatcatatcaggtttcttgtcctacacggaacccagctcaatcatatgagttgaacaaagatatgagtggccatagcatcgacaatgttgaatgacgggagactaaaaggattaaaatctaaagaagtctctagctgatgtgttattagattctgcaattcgctccaccaatttgaaatttgcaaggttcaacatggtgcaataatgattatcttgctgtctagttcgttaataacagagaacaaatgatctgaaaagcatgaaatgaaggcagtgctgctgctgctacatatttgtgccgttctcttgcagaatataagtcattgccttgccttcatattttgggcaccatccataacaggattgacgttttataacctactggcttgtagtcaatcacttctttttctgtaatgtctctgaagtttatttagaatacaaattttattatggtcaaatagttaaggaatcaataaatagaaagcttttattagaaattatgctgtgaagcattgaaaattgtgggagtatattaataatgttttataaatgtctttaggatcctggataagacttaaaaaaaaa

SEQ ID NO: 27719 - DNA, 325 bp, Glycine max
  Clone ID: PAT_MRT3847_125031C.1
cccacgcgtccgctctctgtgtatttccctacctctcccttcaagatgcagatcttcgtcaagaccctcaccggcaagaccatcacccttgaggtggaaagctctgacaccatcgacaacgtcaaggccaagatccaagacaagggaaggatccccccggaccaacaacgtcttattttcggccgaaaggaacttgaagaccggcggacccttgctgacttccaccttcaaaaagggaggtccttttaacttggtcttcggcttccgggtggccttgcaaactttcgttaaaacattaaccggcagaaccttaaccttagaggtt

SEQ ID NO: 27720 - DNA, 783 bp, Glycine max
  Clone ID: PAT_MRT3847_125032C.1
gtcgacccacgcgtccgactcgtatctcctctcttataattattaaaaaaacaaaaaagtaaaatatttacttaaatcaaacggtctaaacactttaacaagaggttgatataattgcagtggattttcaacaaatattttcaaaattccatcattcctttaacaactataaaataatgttcatagaactatacaataattgtcatcaattttaaaacactttggttttaaagggtttgagcttcttttcgatgataatgacattttacataatataatatttgaggtgattgggtcagcatctaatgtctggttaatttagattaagtaaagcatcaaaacatacttactatgctacttttgacataatatattatagacaagaatcaaatgagcaatatgttgatgtgtgtgcattcttatggcatccagcgatggacgaattacagataaataaacttaagtattatcatgtgtggaagttggaattgacatctaaataatagtgaaagaagtgatttcgcatgtcaaaggaagaacagcaaaaaacggggtaacaaaataccgacgagacctatttatatttgtgaattgtgacgaagggtggagagaaaagggaaatacatgcagtacacgatacactcatgactatttttttctgtttttttttaacaaatattattatttaaggtattttgaataaatctatctacaagtacttttaaaagaaaaaaagtataaaacaaaataaacgtctctctgaggtaaacttaacttatgtat

SEQ ID NO: 27721 - DNA, 1214 bp, Glycine max
  unsure (1)..(1214): unsure at all n locations
  Clone ID: PAT_MRT3847_125033C.1
ccacgcgtccgtctaatagctattctacgtttcacattcaccccttaattcaccaatttctaccttttaactgccctacgtaaactgtaaccttagcctgttgagtcctagctcttctgtcatggttggattggatgttgcatagattacagtctcagttttactgctatgaactttctgaaaagtctttgaagcgtcacctaataaaacttaacattatggtacagaggctgaagtttcgacattgttgacttaaacaatggggtctaattcgttgaaggattatctgaaaaggtacgaaagtaacactgaagaagaaaagaagaaaaataagaagaagaagcagaagaagaaaagtcaaccacaagccactggcttattagttgtggatgaagatcccacatggcagaaacccatagatcttggagaagaaaacaatgataactcatcagatgaggagaagccactaattgatgaagacattgaagtgaagcgtatgaaaaggcttgagcaggtgagggccagacgtccttatcatgctatatctgaggatggaagtggttggggtttcactttcttctaactcagaaaatcctattaactcaatcaatgatatgtctccacctcgtaaaagaaagggtgctgatttatcgcctcatcaacggctgaaacgcaatgacaccccatcaccagattatgggacttctgatttgcaagacatatctccacctcgacgacgaggccgtcatgattctccctctcaagatgctttacatggatctgtggcatcagacctttcacccccaaggaaaatccagaagaatgctccaagaccgggtttgtctaatatttctcactctcgttcacctcaacatctctctccacctcgacgaggtcgtcatgattatgagacttctgatttgcaagatatctctccacctagacgaggtcgtcatgattctccctctgaagatgtttcacatagatctgtggcatcagacctttcaccccccaggaaaaaccagaaaaaggttgaaagattaggtttatctgatctttctcaccgccattcacctcaagatctctctccgccacgacgaggtcgtcatgattctccttctcgagatgctntacatggatcatcagtatcagacctttcacccccaaggaaaattcagaagaatgttgcaagactgggttcgtctgatctttct

SEQ ID NO: 27722 - DNA, 1173 bp, Glycine max
  unsure (1)..(1173): unsure at all n locations
  Clone ID: PAT_MRT3847_125034C.1
ctgaggtgcaggcatggtacggtatcaaacagtggtgttaattntgaggaaagattgatcnnaananatccattctatgaacttcttttgtcctcacttgaataaaagccattggtttccctttgttttcacatgcaccaacttcgtattcatcgccgccttagagaaagccggccttaggaaactgctcgacttctatgctgactctctttaaattgttttgctatgacaaacgcgcatcctctacccatttttagcttctaaaagagatggtgaaacagaaacattcagagtgcataacaactttgaggtgcaggctatgctgaagcgtgtggttcactccttagacctggtagagcaaaaagagaaggattccagaaggaagaaccgtctgagaggaagagaggctccgccaacgaaggactttgttgtgagtataattcatgcagtccctgtgttcaagttgacgagaaagtatccggggatgtgtgtagcgcggccccgatgtgttcaaatttcctcatcaatcagtgttttggcatgaagatgttccggtgccaggccacaagtacatcttgatctcgtttcgagatgtcgataagctgaaaagtaagctcttggaggaagagaggagcaaagaggctaatggagtggtgctggaaacaaagaccaggtctcctagtggacacaaggacaaagtgaaagtgtcaaatggtgtagcaggccatgaggcactggagacaatgatcacaagtggaaatggaaaaatgaaagagccaaatggagttgcaggccaagagataagtgtgtcgttgtctcccaaagacaaagtgaagagtgtagagatggtggatacagacatggaaggttctctaggtgagggaggtgtagaggaatcttttttctctgcaaaggacttctatgcccctaaggagaagtccacaagcacaagactttcaagaagaaaaggactaaaagggaagaagccttttgtggcacctcttccaaaggcaaaaaaactatataggagtttgggatggcaacccagcctcccaactgtgaaggaaccctctccatgattttgtactgggttttcctttgtataactcttgatctgctatgaaacttgagtgccaaccaattgctgatttttcttcatggatctaatagata

SEQ ID NO: 27723 - DNA, 292 bp, Glycine max
  Clone ID: PAT_MRT3847_125035C.1
ggctcgagcggctctagtttgccacatccactggttttcgttggctaacatttagacctcatctcacactcaccgtgttgaccgtttatggcgacatacttctgtgcgtttaccgtgtacggtggctgccacactccctcactgctaatgtattcatcgaccttcttcatcttgttctacttcctcttagaggtggagctccggataccacatgctgcagcggggcattgcctgactgatgatgaggtacctcagtattcatatggtgtgaagccgatcgatgttggggctg

SEQ ID NO: 27724 - DNA, 472 bp, Glycine max
  unsure (1)..(472): unsure at all n locations
  Clone ID: PAT_MRT3847_125036C.1
ttaggttttctcacctatcatatataccatagcaagggaaaggtaggagagatcgatcagttactatgaacgttgaaagcgagaggaaagatgaacaagaggtgaaagggtggagaaaagctttaaaaagtgtagggaattggctggcacataaggataaggatgaatggttgaaggacatgaggggagtgctgagtttggtgtctacggtgatcgcaacaatgacctttcaaagtgctttaaatccaccaggtggagttagacccggaaacgagagtggagttgttcaatgtccagaaaacagtgcagataataatccatgtcccggagaatctatcctagctgttctttaccctgatgaatataaaatattcctcatttggaacacaacatgtttcatttcatctttagcagngtgtctcttgcttgtaagtgggatccctctcaatcacagattcttcacctggctttt

SEQ ID NO: 27725 - DNA, 263 bp, Glycine max
  Clone ID: PAT_MRT3847_125037C.1
ggactaaccaccacatatccgcttactacgtctaacgagtgaggaaaaatctcgcgtgagaagatcaaagcggatgacgttatagagggagaacaaggaacactgctacagactctctgacaaggactggccccacacgaccgaacgaattaccgcataaactgattggactgagctacatgagaacggaccctggctatcatctatataaattggccgtcgaacctgacatgttatatggaaagcgtggcaaaagtggtatg

SEQ ID NO: 27726 - DNA, 302 bp, Glycine max
  Clone ID: PAT_MRT3847_125038C.1
aattcccgggccgacccacgcgtccatacaggtgtcagaacaagactcaacggagacttctgtacagctgtgatattattatatgacggggtagtaatcttatcttatctctctgattcactccacactgcttgcaaatttcatactatttttcacatggcctcagcacatcttaagttccgttgctttggtggcgagcatgcttggatcacagtcagcgatgaccttcatacacacttttcaatctaccgtcacatcgttgaattttgcgttaacacctagcgttatacatggtagtcaac

SEQ ID NO: 27727 - DNA, 162 bp, Glycine max
  Clone ID: PAT_MRT3847_125039C.1
acagggggggtttttatgctttgtaggcttttggagcatttgcgatacatactcatgaataaaactgcttttcaaaggctttaacatgttcttgatgcctcaaataggccatctctcagggctatgaatgactcataggtgttgaggcgcaacgcaccatac

SEQ ID NO: 27728 - DNA, 310 bp, Glycine max
  Clone ID: PAT_MRT3847_12503C.1
cacagcgacatatttagattcggcatagataacaccgtactctctaatatcccatactatgaatgacatcgatatggggtggatgaatttaatgagaccttatatgattaatgggttaacaagggcgacgcaccggcattgccaaagactcttaagaattacatcatgctgttgtctcttggcttcaatattggattcctgtcacgaagatatcttgacagaatggccgtaacataatcaaaccttaagaaggctggcttccacacatgggaacacttaactctcaacgatccacatcttatcactctaa

SEQ ID NO: 27729 - DNA, 661 bp, Glycine max
  unsure (1)..(661): unsure at all n locations
  Clone ID: PAT_MRT3847_125040C.1
ccacgcgtccgggacgactatggcctattcctgtggccctgcagcgtagttctcgccgagtatgtttggcagcacaaacatcgattttcaggagccaccgttgttgagtaggtgctggaacttccttgcctgacttggttgcagcaaaactcggtgcctgtgtcactcttactgatgactccaccagattagaggtgcttgacaacatgagaagggtgttgggattgacatggggagtttgggattacactattaccatccaatttttattttatatacttttataaagctttcaaataaactgttgtcaaccaccaagcacgtggatcaattggtacatgattgttttgatttaatcagtcatctttagtttgagtcctgccttgggtttngcagctgtgttgcgatgaataattggggagagcacttacatgtgatttttacagataaaaaacntggttgtcaatgactcanttgatttctattaatagtattcttatatgatttttataagctttgtgtttaaattnaatgggtgggatcctaaaaagttaatatatctagcagctgattgcttcttgttttggggttgggccttgcaggtgcttaacacatganaagaagagttgtgacttgaacaaccttgaggcaacgtatgcta

SEQ ID NO: 27730 - DNA, 409 bp, Glycine max
  Clone ID: PAT_MRT3847_125041C.1
tgccacaaaaacacactcatgaactcatggggggagaatcacaagactggaagtgctcatacgtgtctacaggctggagatcagacccaattacagaacatagcacacgaattatagacgaaccgcgctctgcgtgccctccatgaggtggtgacaacacagaaagactgagtgcgaaacccgggaccaaaagccgtggatgagactcctgctatttgatacacgccgtctgctgaccgagaagattcaaagtcaagacactattgcctgcgctgacgcacagcagacggacatactctatgaaagaccttacggatcgcatactatacattgaatctgcactttccagagaagaccatggggcttgcgctagctttctccgaaacaacagctaccgttgtggatgcta

SEQ ID NO: 27731 - DNA, 327 bp, Glycine max
  Clone ID: PAT_MRT3847_125042C.1
gcactctctgtgcgctagccttcctagaacgctgaaacctagaagagctgttttcccttaccaaagaagaagaagctaacattggcctagcaacttaccgatgaacatatctccgtattcaaggaggccttcagctcgttctccaaagaacggagattgttgcatcacaacctaggagctagtaactgttctgccttcattgttgcataacccaactgaggcggagcgtcctgacatgatctattacaaggatgctgatgggaaaggtaccattgactttcctgagttcctaaatctcttggccaggaagaacaaggacactgattc

SEQ ID NO: 27732 - DNA, 583 bp, Glycine max
  Clone ID: PAT_MRT3847_125043C.1
ttgaaatgttaattaaaattctttgtttaagtttagaaattttttaatgttttaaagtaaattggattgttgccaagaaaataaggtaaatattttatggtttaacaagtttaatttagggcatgtttggataagcttctttagaagcacttctaggagaaaaaataagaagaaaagaatgaaatgagtttctctatgggctaaaatgaggtatccattagttaactattagctaacttgtagatgtcctcatcttttagagaagttacatgagagagtttctacaaattaactaatggagagctcattttaacttaaggagaaagctcatctcattactttcttctcttagaagtacttctaaagaagattatcaaaccaggcccttagtccccatagtttccactgttcagtgttggttttggttcctataattgagttttagtccctatgattttccttgtttggttttggttactaaaccttatatttttcaattaattgcattggtccctgcaaagaaaatgatcctgattctctttttcattactatactctaacctgatggtatgaaactataggg

SEQ ID NO: 27733 - DNA, 510 bp, Glycine max
  Clone ID: PAT_MRT3847_125044C.1
attggtttcttcttctgggtgttgcttgaatccgtggaaagttcatttattttcgattttcatgcgaccaggttgtgcaagatcgcttatttatttatttatttatttatttttacccttttggatgtcaaatttcatgtgcttcccttttgcaagtttatgttgttcagctttgtttttataaggtggaccttttattttcattttgatgctgcagaggttttggttttgagttccaaaattttgtctttgtttcaaacgggtgaaagtgatgctgtcctgtagttttttttttctttctgtttttccaacacatattttggtgccaatgttataacaccaagttttggggctgttttgtcttgattcttgtttcctgagcttgccttttagaagcttgttaaattgtggttttcttgttgataattatgtgtgcttgagttttttgtttttgtttttagttattctttttgggacgtttgactgaagtaatcgtgtgctttgtgaaat

SEQ ID NO: 27734 - DNA, 138 bp, Glycine max
  Clone ID: PAT_MRT3847_125045C.1
attcgagtggagctcaaaaaatcattcaggagagggctcgatctgctgaaggataaaaattgaaggaggtcgaaacatgaggagaggtatggtcattggtgtataacaacaccaacgtgtttgctgcgctagatactt

SEQ ID NO: 27735 - DNA, 492 bp, Glycine max
  Clone ID: PAT_MRT3847_125046C.1
cgagaagacgacagaagggacctagtagcttacacaaccctgcctgggcctatcttcttgctggtcagatcactggtgattggaacattaaatctgcaccaaatacttctataaaacactggattagtgcaattccagccggctacaacagtcagttcccaagctgatttgacaaactcaacctcagcctggaactgtttcggctcatgcaaggacagatgatattggtaaatcagtgatgttagaacatcctctattgatcatccactaaggaatagaacatcctctaacagttgtagactctgacgctacatttacaagatttttcttctggaaccgttattgcccttcactgatgtgccttatacggtttatttcaacattaaaggtgctgctatatgggactgatgtggcttaatcattttgtgcattatttaatttatcaaaatgaattaagcattcaaataactaaattcctttgatacgaccact

SEQ ID NO: 27736 - DNA, 474 bp, Glycine max
  Clone ID: PAT_MRT3847_125047C.1
aacctttggtctgatttatgtgcttgcatggtcgtgagaagatgatagaccgggaacaaccccctcgctatcatttatctgccctgtcgctcttactgccctgtaccgtataagtatctctctccctttccatttccccctaggccctaatgtcttaatcacttacggtaaattgtcggtctagatttgaggcgcacttatcgcctgtcgtggccggcgtcgtcgccgggactcgcggaccttaatcggcctgcaacactcgtactaatttcgaagctagggcgagtaaggagggaaggaaggtaggagccccggagaatcccgtcgagggagagaagcacgttgagtatccttcgaggaagcacgcgtgtaatagaatcttggagaccacgtttcttactaatagtcctcctgtcgatatacgctgtaatcaagccgtcccgaacaaataaaggccaacgcgagacaccaacc

SEQ ID NO: 27737 - DNA, 368 bp, Glycine max
  unsure (1)..(368): unsure at all n locations
  Clone ID: PAT_MRT3847_125048C.1
caaaccaannactttctataaaaacaacggccaaatttttaaaaaaagtttttgcaccacaattcctcaaaaacccaaacataattttttaaaacatcattttttatcaaccattttttcacatttaaaaactatagaaactttaactaaccaactttaacttgaccctcaacaaataacacatcctttttcacaatttatcacaaaatttcaccccccaccattttttttattcttttttaacaatcacatattttttatgccacctcaattcatctatacacacatttaccaaaaaaacttttttccccccctccctaacttttaactttttccccctttttaaaacccccatattaaattttttt

SEQ ID NO: 27738 - DNA, 309 bp, Glycine max
  Clone ID: PAT_MRT3847_125049C.1
cccgggcgttcgggtggagacatgacaaattctattcccagagacactgtcatcccaacggagatatcttaggagttcaccacctttcaagacctgcagactaccttcttcattcgagttttcgattgctaacggatgctcacaatgcatagccggcttctgtgcaaattggctcctcctgaactttttacacttcaagggcgtacgcctcatattgtagggaccttcgaagctgatctcaactgcattctggatgcgactgcagacgacatggtctctgggaaatcacactagatcaccattacatac

SEQ ID NO: 27739 - DNA, 328 bp, Glycine max
  unsure (1)..(328): unsure at all n locations
  Clone ID: PAT_MRT3847_12504C.1
ttgatccatgcaattttggnnctcatnngatcatgtacttgagtgacactctaaataacataaactgtgaaaacctaacaaccggaaggactctcaacccaagcgtacggccacactcacataacctctacttaacccaaacttaacatagcctacagcaaactttggctttagtgctnngtagacaccatgcttgatatcctccacaggtgnntcacgccccagagagggaaccccgcccttggngngacctgtcatggnccctactgactaggcaacatgcctggtcgcaaacatgggtgctccatacttannagccacggtactt

SEQ ID NO: 27740 - DNA, 427 bp, Glycine max
  unsure (1)..(427): unsure at all n locations
  Clone ID: PAT_MRT3847_125050C.1
cgcgcagacctagctttctctttctcttcatcgctcagactcgcaactccgtcatctcgcgacccaacaagtacaactcgaccgtctacaatccactcgtcagacctctaaaacccacgcgatccgcgcaaactcatacatcaaaatgcctgcctccacaaactccgtctcctcggccgctggctctatcgtcaagcctcagggggggcaagtgcagctgcatcagcacagacgactgcagttgctgctgcattccttgcacggtcatgtaaacgcgacagtaaaaataccacatacggcggtatatgagtcccatcgatgacagcgcatgcgtgtgcgaaagcggagacatgccacacgcggnctacaacgcanacgataagggaacagcgatcggattaaggtgttttgggacattttgagcgag

SEQ ID NO: 27741 - DNA, 426 bp, Glycine max
  Clone ID: PAT_MRT3847_125051C.1
aaacacaattaccacctttgctaataaaaaatatctccttttttccatcttcattttcaatttccttgcatattctatatgttattgtcattgctactcaaataatacttaacaccatcctttaaccgtttgcaacggttgctttgaacgaatggagcatcaacggcttatgttaaaaacttctgagcttgtgtttgagagagatattactctctgtggaggtcaaaatggtttttacctacgctttatgacgtccttgggaccttcctttatgatatttattggttttgaaaattgagcttcccattcttgttcaaacattcccaaagaaatattgttgttacacttacctccaacaaggattttgataggtattggaattccttttctatgtgggttcaacaagattatcattccttttttttt

SEQ ID NO: 27742 - DNA, 318 bp, Glycine max
  unsure (1)..(318): unsure at all n locations
  Clone ID: PAT_MRT3847_125052C.1
ttcgnattctctaacgccnanncgnnnnananagagcgggttagtttggaacaaccaacccacaccacggccccancaggggaaaccagnaacngngaagccaagcaccnnaaacaggnngaagaagagcaaganggngnaccnnccgccaggaacaagaggncgaccacggcgcacccgcccgcggcccggaccgcgacagagaaagggaccncggacaccacaacgaaagccggcgaaggggcgaagccaccagcagaggagacnacagagcaaccgggcacaaagaacccngaagcgcccacgacggcggaccgg

SEQ ID NO: 27743 - DNA, 519 bp, Glycine max
  unsure (1)..(519): unsure at all n locations
  Clone ID: PAT_MRT3847_125053C.1
nnnnnnnnnnnnnnnnnnnnnnnnnnnnnnnnnnnttttttttttttttgtacacaacttaatcagataattggatcgctcggaaagcggaggcacgatcgattgtttactgtcaattgcttaaatgcatacatatctcaacaataaagccgatgggcatttattttccaaataagacaaaagcccataaggttgaatcaacaatgatggcgacagataaaagaaaactaggtataccgaatatttacatatttgcaagtaagcaaaacttgacctaagctttcttggccctaagcttaatctgccaggccgtaaacagggcaccttcagacgtcagtagaattagtctgcacaagtatccattgaccatacctctggtctaaacatccaagaaaacagcatcagccatctaatgatggccgactactagataatgatattggcatcagaggaggagaagcaatattctcagatatagatgatctatgagaggattctagtgttcttggcatatgtaat

SEQ ID NO: 27744 - DNA, 279 bp, Glycine max
  unsure (1)..(279): unsure at all n locations
  Clone ID: PAT_MRT3847_125054C.1
gcacaaggttatcgcattctgcttttgctgcttcttcgttcaaccctttctgagcccgtgcatcggcatgggcttctcgctagtttcaaattcaaattcaaaagcctaggctacggttcgtctaggttccaggctatgccgattttgtagtctgagttgattgattcacatcaccgagctattgtcacagacacaagnntatgaaacattgttcaatatcttttgatttccgacaaatgtgagtagcttctgatttcacctcatttatgcattcctttt

SEQ ID NO: 27745 - DNA, 2559 bp, Glycine max
  Clone ID: PAT_MRT3847_125055C.1
gcaggcgtctaatttacttgtagaataatagtaatagaaataataaatgataggtgtgtgaattgtgagttgttggcgtaagcagaggaagcggttgaagaaagaaatggtctgagatggagatttgacttctcctcctggttgttgatttccattgcgcactctaatcgcaattgatttgattttacaaagagagagaagaaacaattggaatttgcaaggatgaagagctctctgaaaaaattgcgaggtctggcacttcacaatcacaagcatgtctcctccaagtccattcggcctctgggccagcttgacgagctcgcccgggcaacccgggatatgcaagacatgagggactgctatgacaccttgctttccgccgccgcagcaaccgccagcagtgcttatgaattctccgagtccttgcgggacatgggctcttgtcttcttcagaagactgctttaaatgatcacggagatgaaactggaaaacttctcctcatgcttggcaaaatccagttcaaactccacaaactcattgatcattatcgttctcatatattccagacaattaccattccctcagagtctctcttgaatgaacttcgaattgtcgaggagatgaagcggcaatgtgacgagaaaagagacttgtatgactatatggtaacaagatatagagaaggaggcaggtctaaaggggccaaaggggagactttttcattgcagcagttgcaaactgctcatgatgaatatgacgaagaggctacattgtttgttttccgattgaaatctctgaagcaaggacaatcgcgtagtcttctaacacaggcagcacgccaccatgctgctcagttatgtttcttcaagaaagcagtcaagtcccttgagacagtagaaccacatgttaaatcagtaactgaacagcaacacattgattaccacttcagtggtcttgaagaggaggatggggatgaaggtgattatggagatgatgttggtggtggttatgatgagaatgatgatggggagctgagttttgactatggacaaatcgaacaagaccaagatgtttctacatcacgaaactcaatggagttggatcaggtggaacttacacttcctagagattctacagctgaagctgctaaggaaaacttagacaaccttgtaaggaatttgttttccttcaaggttagggcagggagccaatctgccccactttttgctgataataaaccagatgcaagtgaaaaactgagacaaatgcgcccatctttatcacggaagttcagttcatatgtgctacccacaccagttgatgctaagagttcaacctcttcagggtcaaataatccaaagccttccaaaatgcaggcaaatttaaatgaacctacaaagaacttgtggcattcatccccattggaacaaaagaaacaagaaaaagatataggagatgagttttctggttcaattgtcagaagtgcacagtcagtactcaaggaaagtaatagcaatactgcctccatgagattgccgcctcctttaatagatagtcttttatcctcaaaccgtgattacatttctgcttactctaaaaagattaaaagacatgccttttctggcccattgacaagtaatcctgggcctaccaagcctgtctccatagaaagtgttcaactgttctctggacctcttttgccggctccaatccctcagcctccgtcatcatctccaaaagcatctcctagtgcttctcctactcttatgacttcacccaaaataagtgagcttcatgaacttcctaggcctccaaccagtttcccctccaattcaaggcttttaggtttagtgggtcattctggtccattggtgtctagaggtcaaaaggtgactgcaaataatttggttgcatcaagtgcagcatctccactgccaatgccacctcaggccatggctcgtagtttctccataccttctagtggcgcaagagtggcagcattacatatgccaagaacactagaatcctctcatagatcatctatatctgagaatattgcttctcctcctctgatgccaatatcattatctagtagtcggccatcattagatggctgatgctgttttcttggatgtttagaccagaggatgtagggatgtacatgttttgactaatattatgcgatgaacccaggtatggtcaatggatacttgtgcagactaattctactgacgtctgaaggtgccctgtttacggcctggcagattaagcttagggccaagaaagcttaggtcaagttttgcttacttgcaaatatgtaaatattcggtatacctagttttcttttatctgtcgccatcattgttgattcaaccttatgggcttttgtcttatttggaaaataaatgcccatcggctttattgttgagatatgtatgcatttaagcaattgacagtaaacaatcgatcgtgcctccgctttccgagcgatccaattatctgattaagttgtgtacttttcagtaaaaaaaaaaaaaaaaaaaaaaaaaaaaaaagag

SEQ ID NO: 27746 - DNA, 1159 bp, Glycine max
  Clone ID: PAT_MRT3847_125056C.1
ccgccctccacgcttttcgcccacgcttttttttttaatatccaaaattcttgcagcagcaggaagaaaataatctatctaaatggagatttttgcccaagtttgaggctcaaagatagtgactatttgatgcctagaaaggactttccattgtgtgatttagtttccaaaaattctaataagataaaggcagaggtacatggttggagagatgggaaagagcttgagcatgttctgctacatgttatcaacaaagctattggggaaggaagcaacattaacaattctactcagaaagtctcagttgattgcaagatggggcccattcctattgacactcttcaaccattgcctaaagccctatcagttcctcagtaactagtcagctatagttacaatttgcaagggagaaattattaagtagttctatatcatccaccacgtatatgatagtaatctctataggacacatattcaagtatttaagttatgaaaaaaatactgtgtcacataaaaattagtttaaattataatagtctcaaatcaccaaataatttgtcaaggatgttaatttgttactaaagctgttatactctcttgtagccctcaaaataaaaaataagggccattattgtgtcttatcaacttctgaattattttaagtactgttgttgcattctcaggcaatgtatgagaccatgctttggtaataaaatatattatgttgaataaaagtataaaaggctaaagtaatttgtggtgcatgcccattgttaaacaacctttttctcttaataaaagcttgaattgttagctgaaaaagttaaaaaaaaaaaaaaaaaaaaaaaaaaaaaaaaagacccataatattaaatataggaaacaacctgtaaaaaaaaagggggggccgccccgagaatccaggctcccgtccgggccgggctttaaaatactttttttttgggggaggggaaactcaatttaatttcctttccttggggtccctgggactgggaaaacccccccctattttaacccaaactaaatggaatccgctccccatccccaaaaacaaagggatcccaaaaaggcccctccctcccccattttgcctctgtggcaaaggcccctctgcaaaaggaaaaccccttggacccgc

SEQ ID NO: 27747 - DNA, 882 bp, Glycine max
  Clone ID: PAT_MRT3847_125057C.1
agcatcatggagtgtggaactgtttctcagatgtcattgccaacccccatccatgttaatgaagggaggctcaatatttgtccataccatgattatcttaaatcttctcatggatgcaatctttgcccaccaaaacatgtgcaagggattggtgatagaaaggatcaaaaaccccctcgtgcagcaggaaagaagaaactaatctatcttggagatggaaatggagatttttgcccaagtttgaggctcaaagatggtgactatgtgatgcctagaaaggactttccattgtgtgatttagtttctaaaaattctaataagataaaggcagaagtacatggttggagagatgggaaagagcttgaacatgttctgctccatgttatcaacaaagaaattggggaaggaaacaacattaataattctactcagaaagtctcagttgattgcaagatggggccaattgcaattgacactcgtcaacctttgcctaaagccctatcagttcctcaataactagtcagctacaattgcaaggaagaaattattagatagttatgtgccaccacatatctatactccagattaatctctttataacacatgttcaagtatataagttacgtaaaatataataatacttaattatgtgtcatgtgaaaattggtctagattataatctcggatcacgtaattaatgatttgtcaaatgctaattttttactaaagctgttatagtcttttgtagccctcaaaataaaaaataagggccattattgtgtcttgtcaacttctgaattattttaagtgctgtttcattctcaggcaatgtatgagaccgtgctttggtccttcccgataattaaatatattatgttgaat

SEQ ID NO: 27748 - DNA, 121 bp, Glycine max
  unsure (1)..(121): unsure at all n locations
  Clone ID: PAT_MRT3847_125058C.1
cttcacagacaaggtnacagatactgcgatcggcgagtacatgtcccatgtctgcagtcagccgaccttgtatggaacacactcaacaacaggtgctgatgcattctacagtatgcattta

SEQ ID NO: 27749 - DNA, 446 bp, Glycine max
  Clone ID: PAT_MRT3847_125059C.1
aattgcccatttcttcccattcctataaaggggttttcaaattcaaaaccgaacaaatctttctaaacgggcaaaggggaaaaacaggggggaaacaaaaaagcgggggggagggggccacaaaaacccccaccaaaaggggaaggggaaggctttaaaaaaaaaaaagcaaaaaaattcattacaaagaaagggaaaccgaacaaaccaaccccaaaaaccaaccgggaaaacccccaccaaactttccccccccaagggggggcggaaaaaccaaaaaaagggggtcgggcctgggaaaaaaacaacgcgggggccccccccggaatccccccccggcccccgcgggcgaaccaaatttccctatagggggcccaattagagcgtgaaaaaaaaaaggggagaggggggccccgggaaaaaacgggaaccggtcacaacccccc

SEQ ID NO: 27750 - DNA, 280 bp, Glycine max
  unsure (1)..(280): unsure at all n locations
  Clone ID: PAT_MRT3847_12505C.1
gccggaattcccgccgacccactcatccttccactcttcctaacctcatnattttttccacaaaaaccccacacntaaattccagactctttataactataaacagccttaccaacatcaacttccttctcttcttcatttatacaatttttctaccatcttatttccatgcgtacgacatattccctcttctaatgaacactacctatcttacccattctccgcatattaaatactcaattttaacactttctattcaatcactcaacatctttctctt

SEQ ID NO: 27751 - DNA, 240 bp, Glycine max
  Clone ID: PAT_MRT3847_125060C.1
agaaaaaaaacaccccttatttcccgccgccttttttaaaaaaaaagcggctctccaaatgatccccatattctttaaaaaacaaacctgctgttcaactttctcacaatgggactacaagaattaattatgcgatgaccaaaaaattaataatttacatctaatgaagaccccggtctgcactttcaaaatgatcgaaaaaaacgctttaccaaccttcaaaattctgacccccctcct

SEQ ID NO: 27752 - DNA, 263 bp, Glycine max
  Clone ID: PAT_MRT3847_125061C.1
ggttaaccaaagcacacgtaattcaaagttaggggatattttacaggagtgtggcgctaaatttatgaaaaagtctatatgcaagtatctgaaaatgtcttcatcttattgaaaagtgataaccaattatttgcaatcaaaatgatgtttttgtgtcaaacaatttaaggtattaacttggccacataatttcataacaatattcattttttcttcatgattatctttgtctattttatcaaccattaacaattatcatactt

SEQ ID NO: 27753 - DNA, 432 bp, Glycine max
  Clone ID: PAT_MRT3847_125062C.1
gagggaagattggtcagtctctctcaccaaaagtgtcaaacatgagagcccacgtttaatttgcttcttattttcctattcttaatttgagctagtggttgtggttgtaggatccaaacgcatcaaagtcagaatataagagagaaaaaaagactccttttgttcatggagaggaaggagactattgatttttcttcttatttttatcttgaagcctctggtgactctgaagaagctgattttgatcacacctttgcttgtgaaatggccaaagcagatggtggtggcgaagttgttgatgataatgatgatgctctatcttgcaatggatctggtgcttgtaatgttgctgaatccgatgggtgtgacgagtcttgtgatgagcatgatggtgggattgagaagaaggaggaggaggatggtgtttatgga

SEQ ID NO: 27754 - DNA, 860 bp, Glycine max
  Clone ID: PAT_MRT3847_125063C.1
tttttttttttttttttttttttttttttttttaaggacaacaaacattgccgtacctcggccactatacatgatagaatcactcttaaaagggctccggcattgcaatggttctccctgccattcataaactataatataaagcacactaaggtggttaaaccactctaaacaaaagtattattaggtgatgcaatcacactatacttaaaggaagtgcaactactatattatagcaaactataaagcgacccgaaatgataactgtggccagtttacctagcctttactgctgtgggcccatgcccagaagagaatgcatgttttgattcacatctcttgcagtgtgcctttcagtattttcggagttggtcgagatgtttccatcaagcccaaacagcttgttgttaactcccgagagagctgcagccttcatttgtgctattgcctcccttgccctgtttggtgttttggaggtgacctcatagaaatcaaaggcataacgggctaactctctatctctcaaattcctcagtagtccatatctaggcatatacggactttcagaatttctcatctcaatgtaagcttctgctgcatctgagaaatggtgcatgatttgcctcaaagttggttttgcattttcaacgatgggcttcagtgggtattcaatctgttcctctccatccatcattacccatacaccattggcatctggagacgtgccattatcaatgcaccataccatgaaaccattcatgacgacacccatctgctcatcatcaaagtcatattcatctttaactgcattgtaccatgcctcaaactgtgttcttgttgctcgagtattgcacataaat

SEQ ID NO: 27755 - DNA, 462 bp, Glycine max
  Clone ID: PAT_MRT3847_125064C.1
gcagggtcccagggcagtgctgggtgctttatttacacaagggaagggtggagatgggtgtcagtgtcccttaagacctgagagctttctgggtgccgtgctcatttacccggaggccgggagatgctcttctccacgtggtgattgggcaaaccctcgtggaccacggagcaaacgaagggcgctctgctatcccacctgctcctttccacattgagcttgctgtacatgaagaaagaaccgtcagagtccatcactggctcggtgttcttgaagttctttttatatgcccgttgctggtccactccacaccgatgtcgttagggaggaagcctgaggtcaaccaggtcaaactgaccgtttgctcaatcaactgctctgtcgggggacccatgacgtatacctggggttttctgactagccctttgggttttgaaatgggtttctctaaggggcttggaa

SEQ ID NO: 27756 - DNA, 481 bp, Glycine max
  Clone ID: PAT_MRT3847_125065C.1
gatggccttcatcaccgcattgaccttccggctcgatcttcgtccgcctttcccactgcgactgactctccgcccacagaccgtccgtcgtctgtccgtcgcttagccaatggactcccagcagtgtcccatgaaagagacggatgagcaccgtcagatgcgccgtatcgctttcgttgcggtcgttgtttcgacggttgctgtgattgcttccgtcgttactttgccaatgctttacaattacgtccagtccttccaaagtcatctgatggttgagacggattactgcaaagcccgtgctcgtgacatgtggctggagatgaccgccctccaaattggcaagggacatgtgaaccgcatcaaaaggggctggttgttcggccaatgggtgcccgagagcggcgccgatgcttacgctgcgggaggtgggccatccggcggtgctccgtcgggaggtgctccgtcttctgcttcggcaccc

SEQ ID NO: 27757 - DNA, 435 bp, Glycine max
  Clone ID: PAT_MRT3847_125066C.1
ggcacgaggtagaacaaaggatactctgactgcttcttcactttctgtcgtggcaatcaaaaccaaaacaaaaacatgggcaaaaaattcttcgtcggtggcaactggaaatgcaatgggaccactgaggaggtaaagaacattgttactactgtgtatgacgctaacgtccctggagaagatgtcgtagaagttgttgtgagccctccttttgtgttccttcctgttggagaaagactgctgccccctgatttccatgtctcggcacaaaactgctggatacccaaaggtggcgcttataccggtgaggatagcgctgaattgctatgttaatttgtgaattcctcgagtttgactcgccactctaaacggaagcatcttttacatgaatcagacgagcctgtcagagataacactaacaatgcgcttcaagga

SEQ ID NO: 27758 - DNA, 498 bp, Glycine max
  Clone ID: PAT_MRT3847_125067C.1
tcgcatgcccccgaccgaaggccttgaatccttaaaagcggccgcccttttttttttttttttattacaaaaaagccaagaccatattgcctgaggagtattacactatttgagaaacacagatcgtatataggcaaacacttaaaacaactctactaattagctaagtttaaagaaccgactttgattaacttaaaactcaacctattgaatcttacacatgagaaatgtcttgatgctttcctacaatctgtttcagatataattataacaacacaataattgaaccctccacaaacatccttatacgaaggaacttctaaaaaaatgaaattcgctacatttgaacaaacatctgctacatttttcatcactgtcattccaccactgattagacaaaatctcctaattaccatctttgttacacttcgaaaaggccttcctaaaattatttccattatcacatgcttcttatttgaaggcacccattgctgaaaa

SEQ ID NO: 27759 - DNA, 236 bp, Glycine max
  Clone ID: PAT_MRT3847_125068C.1
cccttccttaacctgggatattcggttgaaggccaaaaggacacttcttggcaaaaacaatggaggaccttgcaaaacgggggtttccttccttcctttcctttttttgccttaaccttggatggaaggtttttcattattgggcggcgaaccagggttgattattttggttttaccggctgacctttgaattacaaagcaaagggaaccgggaacatggggatgcataaaaacgg

SEQ ID NO: 27760 - DNA, 425 bp, Glycine max
  Clone ID: PAT_MRT3847_125069C.1
aaacattaattgctaatttggattatccaaactttctgcactttctaccaattcccccactttccaaacattaaaaaagaagcagccgtgaccttgaccctcccatccccagtccaaaacccttgaacttgctgtaggggaaaagaagaacactttattttaatgatgggggtgtaagacaaaacaccagagcgcgcgagcacgataaccgtcataagacttatgcttttggcttcacattcacagtatatgattattcctaatccaagactatggctgtttgaagttggatcttgcaacaccaaaatttcaattgcaagggctggaggagcaggttcggtcacattcacattcatagttatcagtggtcacacccatttcaatttcatcaaattgaacttgaacatgagcaagtgccattacca

SEQ ID NO: 27761 - DNA, 329 bp, Glycine max
  Clone ID: PAT_MRT3847_12506C.1
gtttttagtaatagacgcatatctcctgatgtcgttgcttagagcgctcatcaattgcaaaaacatcttgattatgaaagtctctcagatcatatttactttgttgacaacgagtattctactgaaggaaatacgctctctgagctgatcaccctcttacagagtgatgttgttgaccactctcagcttactggctggacactgtactatgggaaatacaactctgtgtctaatataaacgctgggtgaatatatgtcagccatatgcccttaatggagcacagagcggatgaaagtcttgtattgcaggtgacactctaccatgctgg

SEQ ID NO: 27762 - DNA, 124 bp, Glycine max
  Clone ID: PAT_MRT3847_125070C.1
gttagactagcacagatgccagcatgggaggagccgatcgacctggtcgagcttccaagagatgacgcacttggtcacttgcagtcatccaattcactcgcctatgggatccaatctggatccc

SEQ ID NO: 27763 - DNA, 299 bp, Glycine max
  Clone ID: PAT_MRT3847_125071C.1
cacgatactctcaccacatcactcactaaaccctaaccaaccgatacattctccaccatgaccgccatgaacgctagcaatccattctcctacaacgccatctactattaacacacccaccaacataccaacaacaacattccttccatactcaaactcaaccccattcacaacaacattcccaatctgatccacattaacaaacaacattccgaatttacaaatatccagaactacattaacaaactctcgaatcataaagctgccacccttccctctaaccctaataatatagctct

SEQ ID NO: 27764 - DNA, 127 bp, Glycine max
  Clone ID: PAT_MRT3847_125072C.1
cgctgattttcccggtcggaaagccgctgaatatgattttggacgacggaggcgacctgaccaaccttgtgcaccaccaacacgccgaacttctgcccggcattatcggactgtccgaggagaccac

SEQ ID NO: 27765 - DNA, 397 bp, Glycine max
  unsure (1)..(397): unsure at all n locations
  Clone ID: PAT_MRT3847_125073C.1
attttatttttttttttgttaaattgaattagtattttctgcattttacgaaacaggaggcccttcaagcatgttgatgctcaacaagacattgccttataaaagagagaaaaacacagctagtttaacgaattctaaaccaattgnnntttttatttatctttggtccataataacaatattaaatatgaaatatgtggaattaatcaatatcctccttaagaaagcatgtttaatgcaagataaatattaaacgtgcgtttttcatgtaaacttaacggggtcccacatctccggtaacataaactttcgaccgtgcaaacctaacgctttgtatctagcttccgttacgttatccaccaaaacgttatcccttttacccggattcacccttttt

SEQ ID NO: 27766 - DNA, 358 bp, Glycine max
  unsure (1)..(358): unsure at all n locations
  Clone ID: PAT_MRT3847_125074C.1
aganggananggaaaggcgnaccaaaagacaaaccacaacaaggagggcggaggggcgaacccccgcgcggcaggggacagcacaggaacaggaangggagcagagagnaaaggaaccncgccccnggncgacaccgacgacacagccactgttttttttaggaaagccagagagtcccatgagccggagttggctcccccccccattggataggcggagttcatggttcacttggccaccatcccaggcactggaactggtatcaaccctgctaagaggcatggagctgctgctatctacaaccaagcaacgccacggggaggaccattggagcttttggaaaggaccatttattgg

SEQ ID NO: 27767 - DNA, 206 bp, Glycine max
  Clone ID: PAT_MRT3847_125075C.1
aggcaaactatctaggccataataataataataataataatgtccatggtacaacattctctttagtctttacttataagtcttcacataacataacagccattagcattttcatcactgaagatctcaaaggaaaccaacggtggtgattgaaattgataatgaccatcatggtctagaccagcacacgtgtagggtgaagatgg

SEQ ID NO: 27768 - DNA, 235 bp, Glycine max
  Clone ID: PAT_MRT3847_125076C.1
aagaggagaggaaggagagaagacgaggcggtgcgcaccttagactggattcctctccgtcagcatctctctcctctctgcgcttcgtccccacggcaccatcgtcctctctccacttgagctacgcaccgattcccatgctcatcgtcactctggctgccataaaggcaacccttgccactctctcttccatcgatttgaatttctgaggctacaggcataccatgaagaagat

SEQ ID NO: 27769 - DNA, 183 bp, Glycine max
  Clone ID: PAT_MRT3847_125077C.1
ggtctggtaccttctgatgttatgtagcatctcctactgatgcgagatcattaggggttgggggaagggagagagaagaagggttgcctcataaattttgtactttgtgattattctgttgggtgaattagaggatgtgaaattaactaggtaaggaaaagatctactttaattttcttgaca

SEQ ID NO: 27770 - DNA, 3955 bp, Glycine max
  Clone ID: PAT_MRT3847_125078C.1
cggaattcccggttcgacccacgcgtccgtgtgtttctgttcgactgtttctcacgcgctgtctccaccttgtatgctgtgcgtcgttctcaacgctttggattcgtcgttttcgattcgttcttcccacacctccagctccagttaaagttgcgggttgctggcgcaagtgaatcctatattttcatggtgtgtggagacattgaagactcaatatgggaatttttgatgagttacctttgccttcagaaaaagcttatttgagagaagacctctctagaatagatgagagttgggttgctgctcgttttgattcactacctcatgttgttcacattttgacatcaaaagaccgtgatgctgccgctcaatttttgaaggagcaaagtgatattattgaggaggttgtggatgaagtagtacattcctatcatagtggcttcaatagagctatccaaaactattcccagatcttgaaactcttcagtgaatccactgaaagtatatctgtcttaaaagtagatttgggagaggccaagaggcgccttagtgcccgcaataagcaattgcatcaactatggtatcgggtcagtcacactgcggcatataatatccttattggatcaaattgaagacattggctaagggtccggctcgcatcgagaaactcattgctgagaaacaatttatgcctgcggttcaattgcatgtgcaatcaatactgatgcttgagcgaggcctccaaactgttggggcgcttcaagatgtccgttctgagttaacgaagttacgtggagtcctcttttataagattttggaggatttgcatgcccatttatacaataagggtgaatatagtgctgctggctcaaatttgttagagaatgatgacgaaataccaactaccactgctgttgcacttgctgcacataattcacaacctctgtctcggagaacaagatcgctcaaaggtgacaatcagaatagtctccagattgatggatcatataggccagcatctatggatggaggttcttttgatggccatgatgaggcagattcaaatgaggaagctaccttagatgggaatatggcaacagcgagaatcaatggtaatgatataccaaaggattctaacaatgctcttcgtcaaatgccaacatggctctcaaattcgacacctgatgaatttcttgaaacaattagaaaaagtgatgctccgcttcatgtgaagtatctccagaccatggttgagtgcctttgcatgcttggcaaagttgcagctgctggagctattatatgcccacgcgtccggccaacacttcacgagataattacatccaagattaaagctcatgcagagcttttgaattcatcaaggtctagcattggtcaggattcccaggctggaacaggtaatctgcacttcataaaaggtcaactagaaagttatcagttgccaaaacagaagcgtaagaatggaatatctattgctggaactctgttggctgtgagccctgtatcacctcttatggctcctggtgggaaagcacaggttgctgctaaggagcttcttgattcaattttggatgctgttgttcgaatatttgagaatcatgtcattgttggggagcttttggaagcaaaagcaagtcagcatgctgacataaacacgccaaaatcattgccagtagatgtaaattggaaccctgattctgaagcatctcaagtcaccggaggttacagcataggtttctccctgacagtgttacagagtgaatgccaacaacttatatgtgaaattctgcgggccactcctgaagcagcatctgctgatgctgctgtgcaaacagctaggcttgcgagcaaagtcccttctaaagataaaagggatggatctgaagatggtcttacctttgcatttcgctttacagatgcttcaatatctattcctaaccagggagttgatcttgttcgccaaggttggagtaggaagggtcccaatgtgcttcaagagggttatggttctgcagcagttttgcctgaggagggcatatatttagcagcatccatataccgacctgtgcttcagttcacggataaagttgcttcaatgctgccaacaaagtattcccaactcggcaatgatgggttgctagcttttgtggagaactttgtgaaggaccactttttaccaactatgtttgtagactaccgaaaaggcgtacagcaagccatatcgagtccagctgcatttcgtccaagggcacatgttgctactacttacacttcatcaattgagaagggtcgacctgttttacaaggattattagctatagatcacttaacaaaggaggtgcttggctgggcacaagcaatgcccaagttctctaatgatctggtgaagtatgtgcaaacttttctggagaggacttatgaaagatgccgaactgcatacatggaggctgttcttgagaagcagagttatatgcttattgggaggcatgatattgagaagttgatgaggattgacccctcaagtgcatatttaccgaatctgcttggtcagttaaatgtggaaagtaattcatctgatgctgaaacaattgaggctgaattagaacttagtgaattactgctaagtttgcgtcctattaagcaggaaaacctaatccatgatgacaacaaacttattctgttggcatcccttagtgactcattagagtatgttgcagactctattgaaaggcttggacagacaactcaaagagcatcaaatcatgttgggggaaaataccatcacagtcattcagacagtgcacctacaaggagtttagtttcatttgctcaagattataggaaactggcaattgattgccttaaggttttacgcatagagatgcaattggagacagtattccatatgcaggaaatggcaaatacagaatacttggatgaccaagatgctgaagagccggatgacttcatcatttcgctcactgcacagataacacgaagagatgaggaaatggctccttttatttcaaatgcaaagcggaattatatatttggtggaatttgtggggttgcagcaaatgcatctgtcaaggctttggcggatatgaaatccataaatctttttggtgttcagcaaatttgtcgaaatgctattgcattagaacaggcattggcagctattccatccataaatagtgaagcagtgcaacagagattggatcgagtccgcacctactatgaactattgaacatgccatttgaggctttggttgccttcattacagaacatatacacttgttcacccctgtggagtatgccaagcttcttaatgttcaggttcctggaagggaaattcctcctgatgcacaagatagattatctgaaatattatccgtgtagaatgttctctttggttcccagaatttttggactgttggggtgcttgcatcaattagatttctgattcatatttctgaaaaaatgatgatgcagcaaaccgatgccagtgtccgatcttacagcaaattacaaccgagtagactaccagtgaaaagatggttttgattctgcccttggtgatagcaattccatttgctcactcaattgtttgtaatgtaatggtgatgtcaattttcgttgccgccgttgccttccttttgggttaagtcgctcgctcgctctattttttttgggtattgagtttgcgtgtgatgagcaatttcattcaagtcaatatgaagaacaacctgaaattcacatgtatatttttcatgctaaacttattgtatatttactttcttcaactgtgtggcctattctagtgtaaatgaaattttgtcgagggattccctcttgattttcattatatctgactcggatcttcttgaactaatattgaacttttaatagcaattaaaacacaactaatattctatt

SEQ ID NO: 27771 - DNA, 218 bp, Glycine max
  Clone ID: PAT_MRT3847_125079C.1
gaaggcccaaactatcaagtggcgtcatccaaatctctgtagcctgtatcaagcgatctgctcctagtcaggatcacatcatctggcatcagagcttcaactcttgatacaggttttatcctatcctattatttttctttgtaatttggccaggttcgtgttttgtccttggtctgttatttgcatttttggttacatcttgtttccttcttgtttgc

SEQ ID NO: 27772 - DNA, 178 bp, Glycine max
  Clone ID: PAT_MRT3847_12507C.1
gagggttagtgagtaacatgatgctcttaagagcaatgtcaatgccaacaaaccgggcaagcgccaggacatgattaggccatcctcaaaagtgatcatgctatagcttttggtgatgcacaatcataggtacatcgtagagtatgcgtacgttgatgatcacccatctgaaaatatc

SEQ ID NO: 27773 - DNA, 1307 bp, Glycine max
  Clone ID: PAT_MRT3847_125080C.1
gcacaatataattttttaaaagcaaaaataaccacgcgctcacacgcgcaccttctactctgagaagcgactatacatttctccctcttcaatgttctccttcctccgataactttcactataaccaacgaacacactctcacataactctctctctctctctctctctgagtccttcttcttcttcgtccagccaacatgagctcaatcgttcagggtttctccaagtcactggccatgaccattctctctgagatcggtgacaaaacgttttttgcagctgcgatactggctatgcgacaccctagacgcctagtcttatcaggttgcttatcggctttgattgtgatgaccattctctctgctcttgttggctgggcagctccaaatctgatctctcgcacatggactcatcacattacaacatttttattcttgggatttggactttggtccttgaaagacgctatatttgaacaaggggatgcggaagaattggctgaagttgaagctaaaattggataaagattggaaggctagcaatggagctacaaaaaatagcaataaggatgatgatgccacaaaaaagcataaacggtcatttttatctcagtttttttctcctatctttttacaggcattttcaatcaccttttttggtgaatggggtgacaagagccagctggctaccataggtttggctgcagatgagaacccatttggtgtggttcttggagggattctgggacaagcattgtgcacttctgctgctgttgttggagggaagagtttagcttctcagatatctgaaaaaattgttgcactctcaggtggaattcttttcattgtttttggaattcagtcattcctctctccagttgaatcatgaaggctgtgctattggttagtgattattcattgtgttttttacaagacatgtttagcaaatatgtttgttattatggttggggttggttgctaaaaatgctcagcttcgtgcctaatcctccccaggtcatagatttcattatttcgacccttttgtagtttaaaataaatttaccattgtaggatgacagccaaattcaatataaacagtcaacgtgagtggattgttatgtttagataaaaaaaaaaaaaaaaaaaaaaaaaaaaaagggccgccatagaggatctttagttgtttccccctaaagtgtcaagtaccattgtagaagtcttgctcaacacataatttcaactataacaaacttaaaaatattctagttaactgctccaccccaaaaaaaaaaaaaaaaaaaaaaaaa

SEQ ID NO: 27774 - DNA, 566 bp, Glycine max
  Clone ID: PAT_MRT3847_125081C.1
caccattttcacacttaattcaacttggtttggttcttatctcatacaactgttatcgttttcatcgttttcgttttcatttgacaacaattgttgcatctgttgcggtgtttgacttcgattccagagaggaaaaaagttgaaaattttgtcatctgggtgtggttagtgatggcagatctgttcactggaggcgccgtgggggcagtgatgggggagttgctgaaaggggcaattgcgaccataaacaaaggtcgagacttcggacccaccctcgagagcaacatagaaaccttaaactctctggctcctcaagtggaggagatgaagcgttacaacaagatgttggatcgccccatagaggagatagcgaggttggagtctcaaatgcaagctggcgaagagctggttcgcatgtgctccaaattcggtcgctggagaatgctctctttcccttattaccagagcaagcttaagagcaacgacgcgaatttgaagaggcacttttcggtcaacgttccggcggagaacaagagggacttgatggaggtggtggccagtgtgag

SEQ ID NO: 27775 - DNA, 268 bp, Glycine max
  Clone ID: PAT_MRT3847_125082C.1
ctgcagtctttgtggctcggaataggtttgctgtgcttgacaaaggcaacaaccaagtctgtgtaaaaaatctgaagaatgagcttgtcaaaaagagtgccctccctatttctgcagatgctatattctatgctggaacagcaacttgctatgcaggtcagaggatagggtttttatatttgatctacagcagaggattgttctcggtgatcttcagaccccttttataaagtatgtagtatggtctaatgacatggaaagtgttgct

SEQ ID NO: 27776 - DNA, 311 bp, Glycine max
  Clone ID: PAT_MRT3847_125083C.1
ctcatccctatgatatcactaactgtcagacttaacatttcaatttttaagtaaaaagtggattaatttgatttggaaagcaaggattaatactatgccatattatcaccaaacaacgcacaaatattttactgaacacacacacacacacacacacattaaccattatacattatttacattacaaagagtaattgattttatacaactatgatatttacatctccaaatcaaaagaattaatgaaccacactacagagaagttgatcacaaaacataactctatcccaaaataatctaaacgctattat

SEQ ID NO: 27777 - DNA, 381 bp, Glycine max
  Clone ID: PAT_MRT3847_125084C.1
ctgacgcgtgggtgcctattgaaccttggttggatcccctttgaattcttctcaaaagttttatttcctggatttgcttgatcatttcaaaggggtccaactcttggggcaggcaagatatttatataagagtcattgcctttaaatttgtgaatatttttaccaagaatacttttggttttttgggatgtggagagatcctggggctcccgctgattctttctatgaaactcgccctgagtgcaccgatgttcccaagtctcgatttaggatcaaggctggcaaaacattaagtgcaagaaaatggaatgctgcatttcctccagaaggggttctagatctaggcaagactctaagtcgaattcatcgtgggggaatcca

SEQ ID NO: 27778 - DNA, 661 bp, Glycine max
  Clone ID: PAT_MRT3847_125085C.1
gaattcggcacgagtgaaggcattgtgtgagtgacacatgctgattgctttggtaagtttggttttctacatattcctcacttaactaaaaaaatttctctgtccattatgcaatgtggaaacgtaaattgactgatgatattctttacctagatctcatgcatcccctggaatggctttttggaatttgaaggtatataagctgcactccaaggattgaggcagccgatgtgggacttgggtattttcccaatacacccctttcacgcccagcacttattgggcttggtgcgtgaaccacaaatggtgggtgcttgttgcagcggaggcgaatgcgaggtcccagggttagagtctgctctgataccatgttagatttcatcttaaaaccaattggcattaagtaaagttgcccaacaggtatataagctacactccaaggattgaggcagccgatgtgggacttgggtattttcccaataacaccctcaagactaaaattgcaatgtagacaattctatgaagttgcaccatcacaattctcatagaggtacttgttagaagaaatgataatcggtaaaagtttgatgcctcaaagatctgtgctggcaaattagcatctattaggaagttcataaaatcaaagacgcttaaaatggcg

SEQ ID NO: 27779 - DNA, 167 bp, Glycine max
  Clone ID: PAT_MRT3847_125086C.1
tgtgcggcgctcgaggcggccggtatcgaccctgaggaaaagaggggattgccactgagtgagcaggcctctcgtaaccttcagggacatgataaccattgttattgcccgaacctctgatctctgtttgtgactgaaaggttcagtaaatgatggaacacatggtg

SEQ ID NO: 27780 - DNA, 457 bp, Glycine max
  Clone ID: PAT_MRT3847_125087C.1
ggcgcaggtggtggtgtaggaggtggaggtgttggcggcggcggcggacgtggtggaggtggagggattggtattggcattgggattggagtaggagttggggttggagctggtgctggtgaaggtttcggcgttggtgttggtggaggaggtaggggtgggggtaacaattaagcacattgcatgcatgaggttatatatggaactttgattatgggatcaaatatataattatgtcttaattagttgaccatatttggatatgtgcctcaagatgagttttttatgtgatgattatcataaagtgttgtcgtaagtttaagcaaggtttttggaacagtcctattacaattactagattccatgttaattaataattagtgacactagtactatactatctccatttgggagagtttgcaatcttcatttgtaataacatgtttagtgttgttaa

SEQ ID NO: 27781 - DNA, 301 bp, Glycine max
  Clone ID: PAT_MRT3847_125088C.1
ggctcgagcacgtggcgggagatgggggttggaatgagggacggttggagcggggtgagtgtggcggtggggggacagtttttctttatcattcaatactgcaactcccacaattatctctacgacttcgcacgttacaatatgtaccccaacttgagctacacttaatcaaccaccacctaaaccttattcatgtcagtgacacctgttaaagttcaattctacgctgcataaaacattatgccctctgacaacgaaagctgcaaatctgaactaaactgcaccagctacccttgcactt

SEQ ID NO: 27782 - DNA, 391 bp, Glycine max
  Clone ID: PAT_MRT3847_125089C.1
ctcactcgtcatgcatagacatggccattgttacttctgcagccggtgctcttacctgattcactggcctaaatgcaagcgcaggcaatgtgagtgccgtagataaagtctcagctcaccaagccacaaggatgggcatcaaggcttgactgaaagacgctggagtcgttgatgaggccactgccgcaagtgcacagctggctagcaacgccatggccattgaagcgttgctggcttgagatgacaggtctatggctttcatgaccaacaatttatgcgatgctctctggggacaagatcatgttcaagaacatcgcatgttttccaaacaacggagcgttcgacgaagacgagattcctatcagcgtggacgcaccgaaaatctacatga

SEQ ID NO: 27783 - DNA, 468 bp, Glycine max
  Clone ID: PAT_MRT3847_12508C.1
aacgaggcaattgcataactttagagcattgtacaatttttttggtgtggtacatagaagacaagatatcaagcaacgatgaaaatttgaatggtatcaaaaacttgagatctttgttgtttgatctcctacagaaaacgcccaaggaaatccttgatctcatctatgtaaggggaccgggtaggaattatatgaccacaatcatgctcaacgatcgcagaacaatcactatcatatagagaagcaagttccttgctagcttggttagctatctgtctgtctttaccatgttcattaccaaaaatatgaagagaagggcacttgatagggccacactccatctccttcatccggagggcaaagccagagcacaggactacaaatttaaagtccatttcacctttcagcttttcttgttgtgcagagatcaaggcagtcattgctgctccctgtgaaaatcccaagatt

SEQ ID NO: 27784 - DNA, 1705 bp, Glycine max
  Clone ID: PAT_MRT3847_125090C.1
gcgagacacataatatctctttgttaccttagaaggaggagagaagagaagcaaacgatggctacttttctttccaaccaatctctgttgggttcttgtccttgttctactcccttctcttcaaagccctttcaaaccctaaaaccccaaatcttatcttttccatctcgcgggtttccgcgccccctaatttcctcagtcaatcgaagaacccaattgaagtcttcccaagatttccctccaactacaaatgatgaaacagaggagacccagaatgatgtaagagggacaaatgatgatgaagataaaaaacaagtacctagtttaatgatcctccttgaagcatacaaggaagccttttttaatggcgaccaaaataccgtagctcagattgaagaggggatatattcaatagcaaataggaaaaataaattgattcagaaattatcaagtttatcggcagacaaagctgcttccaagaagagttatcttcgtttacaagctgattttgataattttaggaaaaggactgacaaagagagacttaacatccaatccgatgcccagcaacaagtcattgaaaagcttttgttgatggtcgacaattttgagagaacccaacagcaaattaaagcggcaacagagaaagagaagaaaattggtgttagctatcaaggtatttacaaacaatttgtagaggttctgaggaatcataatgtttcagtggtagcaacagtgggcaagccgtttaatcccttgcaacatgaagccgttgcacgtgaggagtccacagagttcaaaaaagggattataattaaagaatcccgacgtggtttcttgctcagagatccgagttctaaggccagcccttgtcaaggtttccttaggtcctggaattcggcacgagcccgtgtctcctgacaagtctgtggagcaaccttcaacagctgctggaatagatgaaagatagtctcttgaacttgttcattaaaaatccagttccacctgcatacctgatatcttgtcattggtcaacttgaaattcttctagtttggtattttggcctgaggtgagtatagtctcttgtagtatggacctcaccaattttaacttgtgtcccgccgcactacaattttttgcttcatcatgacaaagggaattacttttgttcatgagagaatggtgatttcttttgcaatccattttttttttaccaaagcttagaatgttcattctcggactttgttggcattattgttccttgtctcaatgcttaacaaagggaaatactagagaaagctcgactgcagaaatgcctagtagccaataaaaaattaactacagtttgaattctattagtgaaagctcacatggagcctgataactgttatatgcattgcgttggaacgctctactgttctctagcaaaatcttatcatgaaaccatgaggcaatactgaataaaattacagagtagaacttgttaatgacaactattgattttatttatagtcaagcaaaccaatctataactcagtattggtattagattcattttatcattggcgtgtgaagatgatatggggaatcatattttcactggatcatattattgttcctggttttatggtattatgtgtgatattttcacaagacaattttgatttggttcttaccgtccctactttgatgtttgcatctctg

SEQ ID NO: 27785 - DNA, 401 bp, Glycine max
  Clone ID: PAT_MRT3847_125091C.1
cgtgaataaattctaaatcgagtaaaacaagaaaaaaaaaaagacgaaacgtgaaaaggaaaaaggggtttgcagtgttccacccacacgcacgcagaagcagaagcagaagcgcaagcgcgtgtaaccctaattagggtttgcaagccgatttgggattcgcctttcgcgtgatcgcagcgctggatccgtaccgtgttcctccgtctacggaagcgccttttgctcgatccttcgccgatctcggaagcatgtacggtccccgaggtgagcagcggaacaggcaacttaccttatgggtatgctggtggcttccagccccctccctttcctgtggttcgtctcagggggcttccattcaactgcactgacattgacatcttgaagttctttgctggact

SEQ ID NO: 27786 - DNA, 1312 bp, Glycine max
  Clone ID: PAT_MRT3847_125092C.1
aaaaaaacgtgaataaattcgaaatcgagtaaaacaagaaaaaaaaaaaaacgaaacgtgaaaaggaaaaaggggtttgcagtgttccacccacacgcacgcagaagcagaagcagaagcgcaagcgcgtgtaaccctaattagggtttgcaagccgatttgggattcgcctttcgcgtgatcgcagcgctggatccgtaccgtgttcctccgtctacggaagcgccttttgctcgatccttcgccgatctcggaagcatgtacggtccccgaggggcaatgttgggaagcgggggggtttcggacgggtacgaggttggctcaaagagacaaagaatgatggaatccaatccatacttcgcagtgagcagcggaacaggcaacttaccttatgggtatgctggtgggtttccagccccctccctttcctgtggttcgtctcagggggcttccattcaactgcactgacattgacattttgaagttctttgctggactgaccattgtggatgtcttgctggtcaacaagagtggacggttctcgggcgaggccttcgtagtctttgcaggagcaatgcaggttgagtttgcgttacaaagagatcgccagaacatgggtcgccgatatgtggaagtgttcaggtgtaagaagcaggattattataatgctgttgctgctgagatcaagtacgaaggaatatatgataatgactaccatggtagtagccctccaccctcccggttgaagaggttcaatgataaagaccaaatggagtacactgaaatattgaagatgcgcggccttccattccaagtgacaaaatctcaaattgttgaattctttaaagatttcaagctgatagaagatagggtacacattgcatgtcgccctgatgggaaatctactggagaggcatatgtggagtttgtttctgctgaggaggctaagagggcaatgtccaaggataaaatgaccataggatcaaggtatgtagagctgtttccttctacaccagatgaagctagacgggcagagtcaagatcaaggcagtaatcgtggcatttttccttgtttgttttaggtcttcaccttgttccttctggtgcctactataatgtttttgaattttagattatgtactttacttttactagttcgacttgctgttatatttgcatgtctgaaatggatgcattaattgattaatagaaagggcctttgaatatatggctcggtgctgtgaaaggtgaaaatgtgtaatatttcaaagttccttcctttcagccatggccggcttgtttcgattttagt

SEQ ID NO: 27787 - DNA, 265 bp, Glycine max
  Clone ID: PAT_MRT3847_125093C.1
cataagatcgagaaggtcaaaaaaaactttcaaaagaattgggttaaaagcgattaaaatatgagcccaaaccgaaaatgacaacgaatcccattttgctttttagataaaaataccccatacaaaacaggcggtgcgaacgactgttccaccggcctccttgaacgaattattggcgctcttgggatcaagtttggtgtttaacacccgtggctggccttgaggaaaatccccttttatccccaccgttaagaaaactggctgg

SEQ ID NO: 27788 - DNA, 699 bp, Glycine max
  Clone ID: PAT_MRT3847_125094C.1
agtattgaggtttctgttgagtcatgtccagtcaattgcatacattgggtggagacagaagaattgccagtgcttgagttcctgatccagcctcagccgaaagacgggtatggcgtatttggaggaggttgggaaaggcctgcaaatgtgttcactgcagctaagtctttcaacaaacaactgaagaggaagtccacaattagacacgatcaaagccctggagggacttttgaggaaagccctgctcaagctgaagctcaagctcgtgctgatatgaagataaagatggagggtttcttgaaaatttggaactgggtgaaagaaaccttgggcatgaatattaacaagtaaaatatgtagagaaatagagaaaattgaaaagtagtgatgataaattagagttatgcagttaaagcagaaaatttaatagaaattatgaaattccaatatagaatgatgtgtcttcttgagataaggacatgtgtcttcttgagataaggacatcgccacatcgggtgtgaaactactttggagatatagctcttacaattacaagttacatgttaagtttcaaatctagattaatgaattataggtgattgattagtacaatttagttccacaagacacatcattctactttggattgtatgtatactttttacatatctccctaatagaatgtaatcttttgcctaa

SEQ ID NO: 27789 - DNA, 264 bp, Glycine max
  unsure (1)..(264): unsure at all n locations
  Clone ID: PAT_MRT3847_125095C.1
gtaacccagaaattcacaacacctccangaccaaaccagaagnnnnccactacacatnnnnnngtttcttcttcncttcnntngtngttgttgtngttgccatgacaacaatcacaaagcacagttacaaactctccctcaagagagccacaaagagaatancaagaaggagaagaagacacccacagcacaaccacccaaaaagcaccaccacaattgtgcacagnnagtgcngcnncaacaanaatnataatnggctttgtg

SEQ ID NO: 27790 - DNA, 356 bp, Glycine max
  Clone ID: PAT_MRT3847_125096C.1
cctacaggtagcttgaaaacatggaagtcgttgagctccttgcgaagaccatttttggcgggtgatgcaagcctagctgctgggttgccagctgcgctgattggccttgattgaagggccctgtctggacctcggctaatgctcatgtcctctagcagcactggcttactcttcttccctaggcaacgtgcagcggttgcgaagtatattgacaagaatgcgtactgtgatatgaaggacttgcacaagcctacgttgcatgggaacttgcttggtctatatgcatgtgaacaatactcttctccttatagcaggtaatgacagacctttgctgatctattcagattaaggggact

SEQ ID NO: 27791 - DNA, 429 bp, Glycine max
  Clone ID: PAT_MRT3847_125097C.1
ccacgcgtccgccggtagcacagccgagacagcgacgggttctccacccatacggggatggagcgacagaagtatggaaataggataaggtagcggcgagacgagccgtttaaataggtgtcaagtggaagtgcagtgatgtatgcagctgaggcatcctaacgaacgaacgatttgaaccttgttcctacacgacctgatcaaatcgatcaggcacttgccatctatcttcattgttcaactctttgatgaaaaaaaaaaaaaaaaaaaaaaaaaaaaaaaaaaaaaaaaaaaaaaaaagggcggccggtctgccggtttcaaggttccatgctcacgcatgcgagcatacaacgctttaattgtgttatctagatacaaaaaactggtcgacgggccgcaactttacaactgggaaaccggtaaaat

SEQ ID NO: 27792 - DNA, 458 bp, Glycine max
  Clone ID: PAT_MRT3847_125098C.1
gatatctgcagtctagctattattggagccactgccctatcgctagaatgagagcacaagctacattgactatgaccagacggccaatgagagtacactctgactgctcacaaatgatcgaagatcgagcataccgcttatgccacgctctatgatgatgaacccgaggacaaggttcgcgatctacatgaacttatactataggcagatgttgaacacatcagtggatcaattacagctggtgtcgtgctataaactttcgattcttctgaagtaccacctaccacatctgacaggtcactagaaggaccctgtggagctctgatataatacaggaaccgggatggcgaaatggacaaccagggtaaagaggtatcgtatgagtacgaaaacttgaccgaccaggctgttggccctggaatgcaaggtgttcctcaacaccacactattactggttt

SEQ ID NO: 27793 - DNA, 409 bp, Glycine max
  unsure (1)..(409): unsure at all n locations
  Clone ID: PAT_MRT3847_125099C.1
gcgcgcaccacccaccctggagctggttttcatcagagagaacgagatggaagaacacacacacacacacacacacgttaaactaacattttgtgttagtaagaagacatggcttaacccagtttcaacggggatctgaataataaccagcagggtcagggacatgaacagcagacgcagagggcggcggctcatccggatgagtatgaccagcaatggatggccatgcagtacccggacacagtcatggccatgatgcagcatacaatgatgatgggccctcagcatttcatgccctacgctcactcccattatccgccggcgccgacgtcgncggcttcttattcgtctcagcattatcaccataaattagccggaatcgtggcggttggttcgggctacttcaacg

SEQ ID NO: 27794 - DNA, 1109 bp, Glycine max
  Clone ID: PAT_MRT3847_12509C.1
gcgagagagacaggacaatattcttcattagatgtaacaatatacaaaaagaaaaagcttgtcttaaaatattagaaccacataggcataaataggaaggggattattatagaccatcaccatgtctatccgtgacaatcacattattacagggtgaggtcaggtaagggtgcatccaaatccactctcaaatagtatatatatattattaatttagggtagagagaaaaaaaaacaatgttcaagttgaaggagattgagaagcaagaaaattgttgaagtggcagcgtggcgctatggaatggagcagcaaccttgcagtgtgatcctgtttgatgaccgccccttccttctccaccaacaccgccgcaacaatctcttcataatccccaccgccgccggcgatgaaggcgacgatggcggcctgaagcggtcccaagctggggttataagcagcggactcaatgtaagagcctttaaaaacattccccttggaatcgagaagcgcgacgccggagggggacgcgctgtagggcgcgtgagagttattggcggcctccaacgccgcaatcgcaagagcgttgaaatgatcgttttggggaagagagagagcgttgtgacgaggctccaagaggagagggacggttttggggagaaggtcgtgggggccgaagtggtgggagaggaagtgggagagagggctgaagtgagggtttttgtgggaggtgatgaggatttggatgtcgggggcgtcgcggagttcttgaaggaactggcggcaatggccgcagggggcggcggagacggcgaaggagtcgaggcgggtctcggcgttgttggccatgttggtgaggaggaactgttcggcgtggatggtgtggtggaaggggaggccggggaactccacgttcacgcccacgaagatgcggccggaggcggcgagtccgacggcggcgacgggaaagttggagatggaaggacgggcgagggactgagaagaggaaacgagggaagggaggagtttggagattgattgggattcggcctccgatgcggagattacgaatctgggctccataatgttcccaccgagccggaagagagaaagg

SEQ ID NO: 27795 - DNA, 316 bp, Glycine max
  Clone ID: PAT_MRT3847_1250C.1
gcaatatcatgttttatggttttggttgatttaaaagtagttctgaactgaatcatgtactggattaatgcaagtcttagaataaaatgatcttttatggcccaaataaaaaaaaaaaaaaaataaaacatactaataaaaaaaaaaaaaaaaaaaaaaaattaatataaaaaaaaaaaaaaatataacattaaaaacaaaaaaaatataaatttggggggccctttaaaagaaacaaaatttccatccacttttttgcaattttttaccattttaatggggcaccttaattttattttagtgaccgtttttttaa

SEQ ID NO: 27796 - DNA, 568 bp, Glycine max
  Clone ID: PAT_MRT3847_125100C.1
ggtccggaagggccgggggggcccacgcgtccgcccacgcgtccgacggctgcgagaagacgacagaagggggtttttgtttcgattctcgttctctagggttttctcatcccttttcgacccccaattactcttttctctgttcactcagtgtttcttctctttcacttccaatctcgatttcctcgttgtaagaaccctcaatctcgcaaaacccgcggttcaattcatcgttcccttcaatctagggtttcgtttcgagaatgccaccgaaaacggcgaagcgagggtctgcgtcgagcttctcgaagaggggcggcagaggcggcaggggaaccctgaaggcttcacagaaccaacagcaacacgaacctgcggaagagaccgtgaaggtcgaagagaaacaacaacccgttgttgttgttgttgctgaggaggaacagcacacagtggtggtggaagaagagaaccctgctgttgaagagaaacggcttgtggttgaagagaaagaatctgtagtggttgttgaggacaaggctattgacatgaaccaaatggctcctgaggc

SEQ ID NO: 27797 - DNA, 450 bp, Glycine max
  Clone ID: PAT_MRT3847_125101C.1
gccacgcgtgcgtccacgcgtgcgggcgctttttcccaaaaccaattgcatcactctcgtacgctaccgacgctgacctagaccaccgtacgcgacgttgaacaccgtcttcattcgatcgggcaaaaatgagtcgaggaagtggacgtggatacgatcgacacatcactatttactgccctgaaagacgtttcttttaagtggagtatgctttcaaggctgacaaggctgcaggaatcacctgaatgggagtacgatgaaaggattcaactgtgtgtcgttactaacaagaaaagttcggataagctgttggacaacacaagtgttacacacctgtgagcagatgacgaagtacactggataattggctactgacatgacaggtgatgctaggacactggtgcaacatgcaagaaatgacacagctgatggtcgatgtacatatagata

SEQ ID NO: 27798 - DNA, 326 bp, Glycine max
  Clone ID: PAT_MRT3847_125102C.1
cccacgcgtccgaccacgcgtccgtcaggaaagaccttgtgctttggcctgatgacctgggaactttctatgaggacactcaactagacaaacatcggcaagctctggacagagttccagaggttcaaccatacttacctgcttcccttaacatccgaacggtttcctttcctacagccataagggtcgcaatctgaccgaaaatggccgaatggaacacattgaggagatcatcaaggaccatttttgcaccatatttcagagcaagtgttggagatctggttagaacattgcgcttgtgccaagccacaatttagagacgcaga

SEQ ID NO: 27799 - DNA, 1242 bp, Glycine max
  Clone ID: PAT_MRT3847_125103C.1
cttatgatctatatactgaaaaatggtcgcgcgtaacggacaactccccagaagaatgacgtcgtcttcagcttcatcttctgcatccacttcaaataacgtagctgcagcaaaagtaacttgccttgaacctctaacaattaatgaccttttagtcggaggagatcccatcagtctcaacgacataatatcacatattcctggtagaagtagccagattcttgaggtcgtgcgtcatttgggacctttgaattcaccaatccttcctttgtttgtgtatggaagttcttctactggaaaaaccagtatcattcttcaattattcaggcatctcaacaggcctattgtttattctagttgtaggacatgttataaccagaacatcttgtttgaatctattctaaatcagctacttctccatagaaaaaatgctgccaatggttattcgaatgcaaaacgctgtgaaagaccatctgattttgtcaattttcttcgagaagcgttgaccaatgttataaacaatctgaagaagtcagagaagttgatctcaaatgagatgacacaagggaaaattggaaatatgatctacttggtgtttgacaattttcagcttgttagggagtgggataagagttcaactatattgcccttgctgtttaatctctatgatctgctaaatatgcctgaggtgggtttgatttttatcagcagtacttctccagataccttttactctaacatgggttatgtggagcctatccccatttactttcctgattacacagaagaagatattcgtcaaatattattgagaaaccaagtgaaccagaagctatattcctcatttctggatgtatctctgaagtctttctgtggaattactaagcagattgatcatttatctgctgccttaaagccactatatgaaaagtattgtgagcctttaagtgataagggaaagggagttgctcctaatcaagaaatgaagcgaaggctgcttgctcatatcaaccctcatattgcctcctctttgaatgagatatttaaggtttcatctctttcttcaactgaagttgagatccgtaaagaggaaaagcggaagggaaataataggagattggagcaatctgaagaacttggcagtcttgattttcatgtatctactagtgcaaaatatcttctgatttcagcattccttgcctccagaaacccagcaactcttgatgcttcactttttgattc

SEQ ID NO: 27800 - DNA, 302 bp, Glycine max
  unsure (1)..(302): unsure at all n locations
  Clone ID: PAT_MRT3847_125104C.1
acgnaagcacgcgaagggcggcatcgagctcgangccgctcgagccgtttgagccgtttttgctcgagaaaaaccaaaacccttggcgagtgaagccctagactacactacacactttgcaatggcggttgttgcgcaaacccctgacatcgactgcgagcgacagttctgtcaagacgttcgcacccaaaacgttgtggcttgccaaggccgggccaacatcagtaaaagctttttatgccccagtggccttgacaagaatctcttttgcaacattggcgacgttactattaccaacgact

SEQ ID NO: 27801 - DNA, 487 bp, Glycine max
  unsure (1)..(487): unsure at all n locations
  Clone ID: PAT_MRT3847_125105C.1
cttctaataacctcactggtgaaattccagcttcccttttgaacctcacaaagctttcaagatttgcggcaaatcagaacaatttcataggtcctgtacctcctgggattacaaatcatctcacgagtttggatcttagttttaataaattgtctggacccattccagaagaccttttatccccatcacagttgcaggctgtagatttgtcaaataatatgttaaatgggtcggtgcctacaaaattttctccaaacttgttcaggttaaggtttgggagcaatcatctgagtggaaacattcctccaggtgcttttgcagcagttccaaatttgacatacttggagctggataacaatgacttgaccggaaccataccggctgaattggattctcgcaggaaattggcgttgttgaatttagcacagaatcacttgactggngtattgccaccactgcttggcaatcttaccaatcttcaagtctt

SEQ ID NO: 27802 - DNA, 299 bp, Glycine max
  Clone ID: PAT_MRT3847_125106C.1
ggctcgaggtgaattaacgagatttgaagctagtgatggctgcgaaggaacgagaatcgaatatttgttggacgcttatcctgggacgttacagtggtcttgcccctgtttttgactgccacactttccacatttgctgcacatttgcttaacccatgaccaagatttactggcgatctgataaaaagcttgagaaggaacccaagttattgaataatggtgatgctcggtttgttaaccatgattccgaccatacccatggtggatgaaactttctctgagtaccctccacttggtcg

SEQ ID NO: 27803 - DNA, 148 bp, Glycine max
  unsure (1)..(148): unsure at all n locations
  Clone ID: PAT_MRT3847_125107C.1
gnggagacacgaacaaaaggaacatcagtgttaaattaaggcatgccatttcaacgagaaccaaatccaacaaacgaaccatgtccttgacaagatgtactcgtcattttaaaagtctggctaggaacccacattttttaaaaccatc

SEQ ID NO: 27804 - DNA, 1276 bp, Glycine max
  Clone ID: PAT_MRT3847_125108C.1
ccacgcgtccgagctgaacaagttgggggctttaaagccgaaaaaaaaatgaagaagcctttttctctttttccttttcacattccagaaaattcccatgaacttggaagtgtttgagaatagatcagttgaataaaggttcatacatttgttgttgtcgaaggcttctccaaacccccaaaccccagagagagagagagaaaatgagcagtgcttttctaatgaaccctgccaagattcctcatgccatgatgcagaggcagttcatgttggtgaaccgtgccattcatcccatcaaaaccccttcgtttcatttcctcaagaaaccaagacaatatggaatctcttcatctttttgttcttcttcttcttcttcatcatcatcatcgtctgctgcaatttccatctccaaggttggctttgtgggttggtatttggggatgataaagtcgtggccaattttgacaaagagtgttacttcttcccttatttacatcgccgctgatttatcctctcagactattgtgcgagaatcttcagaaccttttgattttataaggacttcacgcatggcaggatacgggatggtcattttaggaccatcactgcatttctggttcaattttgtgtcaaagcttttcccaaggagggatcttttttctacattgaagaaaatggtcatgggtcagacactttatggacctgccatgactgttactttcttctccttgaatgcacgtttgcagggtgaaaccggctcagagattgctgcacgcttaaaacgtgatttgcttcctacgatgttaagtggaattatgtactggcctatatgtgattttataacatttaggttcattcctgtccatttacagccattagtcagcaattcattttcgtacttgtggaccgtttatataacctatatggcaagcctagagaaagcgacctgatcactcactatcagcaatgtcaatttttgtttcatgattgacattggaagcaagctgcgggatacaatcaaatcttttggctgtgtgcagggaattctgatctcaaattgtccacggctatgctactaaccaggacacagttttatccatttattttaacctgtactcctctttatttgcttttgtagtgttatccttttatatatatgggaccaatttgtaaaatctatgctgaattttttttatctgaagacttttttcaccaaatgcattttgaatcattcttgcgagatgcaaaaaaaaaaaaaaaaaacaacaccccaaag

SEQ ID NO: 27805 - DNA, 1680 bp, Glycine max
  Clone ID: PAT_MRT3847_125109C.1
ttcagtcaaatgctaaaccatgttctattgagggtatgcaagatgatgagtgtgcattagtgattcctaatttgctgattggagatgaaatatttgatctaaaagttagggaagttggcttggggaagattgccgcaagattccttgagaagtgtcatgcgttgaatgggattaaaagaatatggtgtgaatggttaggcaaagaaagtaatggtgaacgagatggtgttgaggttctagagcatgattttgcagttgtgatttttgcttataattatgatctgggtcggtctggtttgcttgatgatgtcaagacattgctccctgttttgctggccaaaagggaaagacttcattgtctgactttgatgatgttagcgattttttatgcaatcagtatgattcgtctgcagaagagtcctctgattcaaacaactccagctcacgattgacactagatcaattcaacaatcatctttgcacaaggttcgtttcaagcaaggctttgaggaaagaattgagacggaagcagcggctggcagcagagaaagtgtgtaacatctgtcaacaaaaaatgcttcctggtaaagatgtagcagctcttttgaatttgaagactagaagagtggcgtgcagcagtcgaatagaaccggggcatttcacgtattccatacatcctgccttatacactggataatcttgtgtgaatttgagataatcacaaatcatttagtctgtccaaatgttagacgagtagtgaagagaaaggttgcgtcagatggcaacaaaatgggaaaagaaaaagatataggaaaacatataagaactgtattctgcccagagtgccaaggtactggtatgatcattgatggagatggggtggagcagccagaattttctttgtcgcagatgttcaaattcaaaataaaggcatgtgatgcacgcagagattggatcaagagtcctgaagttttgcagaattgctcaactgggtttcacttcccttcacaatctgaagagatatttgaggaaaaagtggaacccataaatttactgcatttttatcgtgctgatgatcagagtggggcataacaaccgggcaaacgtttcgtatacatctgagtatattggtcttatatttttaagagttatgtgtaactttttaggtaaatgttggtcgatagactgggttatatagcctcatagatagtgaccagattaaattgtgtatacctgttgctaatgagtgtgtgtaagtgcacattgcttgatgctgacatagtgacctatgtgtacatggtaaagaacagataacgttcaagaatgccaccattgttgcctcactttttacaatctgaagagatatttgaggaaaaagtggaacccataaatttactgcatttttatcgtgctgatgatcagagttgggcataacaaccgggcaaacgtttcttatacatctgagtatgttggtcttatattttctagaattatgtgtaactttttaggtaaatgttggttgatagactgggtcgtagatagtgaccagattaaacatttcatgtgtatacctgttgctaatgagtgtgaatgcacattgctgaatgcctgacatagtgacttacgagtacatgctaaagaacagatatcattctagaatgccaccaaagttgttgcctc

SEQ ID NO: 27806 - DNA, 364 bp, Glycine max
  Clone ID: PAT_MRT3847_12510C.1
aggacggttttttactattccgccgccgttattatcatcttgttttctggcggaatactctaccaccaccgcgcaataatacatactcctctctatatgtgtgagtcttgctctaactctcactataacacatattgtgacacaagactctccatatcaaaaagagagcaaaacatcttgtcgcgcgtcactctctagaagaaactctcgcaactcttgaacacggggccgcggataccccgggtctggatctccagttacaccagggggagagagaagctctacggggtctcccatatcccgtcttgaataagagataccgcggccatataatatcccacaccttttccccaagagatattca

SEQ ID NO: 27807 - DNA, 640 bp, Glycine max
  Clone ID: PAT_MRT3847_125110C.1
ctttttttttttttttttttttttttttttttttttttttttttttttttttttttttttttttttttttttttttttttttttttcccggagaaaaggccaaaaaaagaaccggctggaaaaggaaaaaaacccggaaattggggaaaaagggccaaaaaaaactaaaggggaccccatgggtcgaaaaaaaaaacccccccaaaatcccgggggggaaaaaataaaggaaaacccacccaaaagattggggggccaaaaaacaaaaccgggtcgaaaaaactggaaaaagggggggccctaccaaatttatacccaaaaacccttgggtttttaaaaatcccccaaccccggggggggggctttggccaatcccttttttttttggccctggccccggggggccaactgggcccccccaaaaaggggggccccccccccgggaaaggaaacaaccccaaggggcccccccttcctttaaaaggggcccaggggatcttcccagcgggcaatttgggggggcccaggggaaccgggaggcccccggggggggaaaagtaaaaggggatcctggaaagggaaaaacccacggggggtaaaaaagcgggcctcccgggccaaaggaggcccgggtttcggc

SEQ ID NO: 27808 - DNA, 1051 bp, Glycine max
  unsure (1)..(1051): unsure at all n locations
  Clone ID: PAT_MRT3847_125111C.1
tcgtactctgcgagaagacgacagaagggggagagaaaggctgcttgtctatgaatttgttcctaataagagccttgattacttcatatttgatccagtgaagaaaacacgattggattggcaaatgcgctacaaaatcattagaggtattgctcgaggaattctctacctccatgaggattctcgactgcgaattatacatagagaccttaaagcaagcaacattctcttggatgaagagatgcatcctaagatatcagattttgggatggcaagattggttcacttggatcaaacacaagcaaatacaaatagagttgttggaacctatggatatatggcacctgagtatgcaatacatggtcaattttcagcaaaatcagatgtttttagtttcggtgtattggttcttgagattgtaagtggcaaaagaaacagtggtaatcgtcgtggggagaacgtggaggatctattgagctttgcatggcgaaactggagaaatggaacaactgcaaatattgtagatcccacattaaccgacggttctcaagatgaaatgatgagatgcatccacattgggttattatgtgttcaaaaaaatgtggctgccagaccaaccatggcttctgttggactcatgcttaatagttattctctcactctctcagtgccttcagaacctgcatttgttgtggatagtagaactagaagccttccagacacactatcatcagagtataattcaagggaaacaagatcaaataaatcaactgaatattcggtagatgaggcttcaattacggagccatatcctcgctagattttggtcatagtggtgatagtcatttgcttattggtcaatgacttaaaaattcctaaactaaaatacaatatcctgcaagtcgcccgatttgttggtgtaatgtttggttttagttaccttatatttagacaagcgccctttccgtgttaatttttaatnccacagtaaagagcacaaaaaaaaaaaaaaagaagggcgcgctgctctggaggcttcgcttacgtacgc

SEQ ID NO: 27809 - DNA, 344 bp, Glycine max
  unsure (1)..(344): unsure at all n locations
  Clone ID: PAT_MRT3847_125112C.1
aacaaagtggcgaacgggtgcgtaatgcgtgggaatctgccgaacagttcgggccaaatcctgaagaaagctaaaaagcgctgtttgatgagcctgcgtagtattaggtagttggtcaggtaaaggctgaccaanccaatgatgcttagctggtcttttcggatcatgacccacactggnacctgacacacccgccggactccattatcgatgggctcgtggaccttgaggctgcagtttgcctttgcactgctctcaaagcaaacgttttgggcattaacctcaaccttacactctcactcaccttagttatcaatgttggctcagaggaaagttgccgagaa

SEQ ID NO: 27810 - DNA, 351 bp, Glycine max
  Clone ID: PAT_MRT3847_125113C.1
agggagcttcttaatattcggacattttatttcgggtcatcaaagaaggatagtgaagagaacaatcatatataatattaaatataaaaaatggcccgatcatttatcaaaagacaatcttcggtagaagagaaggctgctttggaacacttatttgtatgtaagaatacacgctctatttatttcattgcaaaaaaaatatagaatttcgatcttgaaaagaaagaaacgtgcggggataattttaaatgtcgcaaagatattggtacataatcttggaagagatgatggaagcaagagtgcattttgggctcggtactcgaaactggaatcctaaaatgtgaccttata

SEQ ID NO: 27811 - DNA, 224 bp, Glycine max
  Clone ID: PAT_MRT3847_125114C.1
ctgccttgttggaaccgttttcgctagtcacctccctcatcggaattcacagaactagcttttccgggggggggggggaaaaacctttcctctttacccgcgaagaaaaagaagatttaactggcccccaagcaaagcggagcaccaccgggaaagacggccccgggcagggaaaaagcccgcccctaacgcaacctaccgtaggaaaaatgccagcaaggggc

SEQ ID NO: 27812 - DNA, 667 bp, Glycine max
  Clone ID: PAT_MRT3847_125115C.1
gttaaagtgacaacacatgttgtttctctcattcgttgctgaattctccttcatcttcttcactgcaatttgcagccactaacagataaacaatcattctcaaaccccttcacaggtgtgccttcattaaatgttttgctcttgggaagttgaaagctaaccaggtgctgctttattccttgacatttctagaagatttctaaggagttcatcttcaatattctccagtgtcctttaccaaaaccagggaatgctgaaagatgtggttgaaagtaaagagttccctctctcaagttaatgaggttgtagctccatctgagctagccttagaaatccttgatgagattggatgtttagatcactgccaacatctattatatgctcatgtgcctgaggtgactggaaatctaagcaattgtgtgatgtcaaaacgtgatgtttgtgaagatggctaagctttgagcatctttggaatagtttactgctttctggtcacgtaagcacctgtttttagaatatacttggtagcattggttgtatgcaaaaagagttacaataaatggagcagaagggaagtgtgcttatgcaaagatatgaacttgggagattattaggccaagggaaccctttgctaagtctaccatgctaggaaccttatactggcatg

SEQ ID NO: 27813 - DNA, 451 bp, Glycine max
  Clone ID: PAT_MRT3847_125116C.1
agacaaaaaaaaaaaacttgttttattgaattgattaacgaactttaccgggggattgctcatagggggcctttttttccgtttttatttacaagcccctgcccaaaaatatttatcatgaaacacaaaagcctattttaaacggggaagcagagcttgaaaaaccctcctgggggagaaaggagcttcccagcccccattaggatttgggggacaaaaaatttttggggggggggggggggttaaaaagaccggcccactaagaataaaagcatccttgattactgggacaatcccactttttataaaaaacccatttggttcccttggagttttttggacattggcactggaaaaaatcttgacattttccccaattggagcatttttggaaaaaattgcccttttgaaaagaaaggtcctgcccataccaattggaacactgcctttg

SEQ ID NO: 27814 - DNA, 308 bp, Glycine max
  Clone ID: PAT_MRT3847_125117C.1
ctcaggcctccatcaatgaccatatgacatgccactggacatgtttcaggtgttacggtgatgattacgggctacatgacatattacctatcatattttgataatttacatgaaagattacatcatggacatatttgggtacttgttaaaaatgtagcgaagcgtgtttcaatacgaatttcatggcgaaaaatatggtacacactaaattaggcgccttattgacgggactaatgcgcaaacgtaattttgcacctaataacgcaacatgctacatgtcttgcgagaagtgacgggaactgtgacag

SEQ ID NO: 27815 - DNA, 362 bp, Glycine max
  Clone ID: PAT_MRT3847_125118C.1
gacccacagcgtcaatacaggcgtcagtacgagcagcgagagggcggcataaggggtcaccaagttcacgagctcttgaggagaatatctttgcctggctcgtgtttttcttcatgtgtttctgtgagatgtagcgacctatgctgagatttgaacagttaacatttttaataatagttgtaattgacgtagtgggattaggttcatcgtctgtgtaaggatatggtagagtcaatcgtacacgggtaatttgagtgcttaaaggactgtcttgactattttatgtactcgtgattgtcactcaaatttcgttcgaggtcgacattcacttcgacggatgttaatgcgtatggccattggag

SEQ ID NO: 27816 - DNA, 1316 bp, Glycine max
  Clone ID: PAT_MRT3847_125119C.1
gtttttttttttttttttttttttttttttttttttttttttttttttttttttttttttttttaaaacggcattcaatttttgcagtttcagatattattgatgaatcgaataagtaatgtacaaaatttctgaaacaagcatacacgcatgcttgtccatcatccaaaaatggatcggaaaactgcttaatctctattacagtcaaggcaatgaatcaaactaagctcctttaaaagttccaagttccattcgtttgaaggtaactttactgaatttcccctagcaccacctattcttctttatggtacttgtttttatatctgaggcaagcatcggaggggttctgccctggttgagctctaacacgagtagacctacgaagaacagactcatctacaaacctgtgcatcaaatccttagatgttttctggagttctgagcatattgtactataatatttttctagctgctttcgcagtaccctttcccgctcacccttgcaattcagtgaactcatcaatgcatcaagctcttccttactgctgtagtatccccacttcttggagtcacagctttcaacaaatatcctcccataacgacagaaccaccaataattattgtaatctctgtccttacctaatgggctcctacgaataaatcgcttctccatctcccgttcgaaatattctttcctctgttcgtcactattcttctctgatgaatccttatcagccttcaactgtttcggtgattcctttctggataattcttttccattttccgttggttctttcagctctgaatttaacttcttaagtgtctttttcggagcaggatttaaatgcttgatcccacttctacccaatggatcgttttgccctgatggttctatctctataattcttttctctcccacgtctccattttgtataccgtgaatattatttgctaggacatttgcaccgtttagatgcccatccacaaatccattgctttctgactcagctttcatccgctccttttcttctcttctcctcctaccattttccaatgcttcttcccttctagtggccccaagtgcctgccgctgttcaataatctcatctaacttttccctgaatattgcagtttcaagggctcgattgaccaattcgcctaagatttttaatttagcactggcatctacaaggccataatgtccccgttttatagttgttttatgttgccgtagttcaggaatattgatcatctctagaaaatgacataaatattctgtccaattattggttgtaatcttagacttcagttttcgg

SEQ ID NO: 27817 - DNA, 368 bp, Glycine max
  Clone ID: PAT_MRT3847_12511C.1
gctctggcggcgcgggatcccagatctctacccaaaggcaggcccttctcgagcgtgaggctgaggccgtcggctcgaatggctagcatggcacgactcaatggcggcgatgccgctacatttacagagagggactttgctgagctggtttggcgcgtggccgtacgacgtcggatatgcatatcatcgccagggtgaacctgcggatcaaccatgaccgacacactgtctgagagtgcgtccaccgcgcagactaggaggtcacaccctgcaccaagagtgacaatcgcagcctgagcgaacgctatgccccacgccctaacagcaaccgtctccctaccaatatagaccgactcgctgctgatgca

SEQ ID NO: 27818 - DNA, 739 bp, Glycine max
  Clone ID: PAT_MRT3847_125120C.1
tgcatcctcctcttcaaagaaaaagctccacttgtattgtattgtattgtcatgttacttctttctctgcaaatccttcgtattctgctctataaatgttaataatctgcaaattttggaagcgaattttctaaatcctctctctcgctgcaatggactgtgcctccgaagattgctccgataactctcagcgaccggactcacacaaggaccagcgagtctatttcgttcctcacaggtggtggaaggatgctcaggattcaatgccggcggagattcggataagaagaagggaattgcgtttgcctcttttcccggttcgtcctatgctggtcctatgaagattatcaataacatttttaactcagatcttgtgttcagtcttcggagggaggaggattcgcagcacattcgtgaaaatggcgaggttggtgtgtctggccgggactttgctttggtgtctggggatatgtggttgcaggcactcaagtggcatagtgattcaaaaaatgtaatgaaggatgacaaaggcttttcagcaactgacagtgatatggcagatgtatatcctttacaactcaggctttctgttcagagggaaacaaattcatttggagtaagaataagcaaaaaggacaatgcagttgaactctttaaaagagcctgcaaaatgttcagtgtggattcagagatgttatgcatttgggactattcagatcagataacatttttaatgaat

SEQ ID NO: 27819 - DNA, 278 bp, Glycine max
  Clone ID: PAT_MRT3847_125121C.1
ttaactaacaaccttgatatccccaagttatccgcatgttgaaaaaaagtttatatattaatcatatttcttccgtatttcaaaaaaaaaaaaaaaagaaaaaaaaaaaaaaaaaggggggcccccccgaaaatggttttcctcccccgggatttttttcgggggcggtcacttgggggggatacctttcccccacagggtcctgtttaggaccccggggaaaacagggataaaggtcttccccgagtaaaattcattccccctaaaaaagccctcaa

SEQ ID NO: 27820 - DNA, 568 bp, Glycine max
  unsure (1)..(568): unsure at all n locations
  Clone ID: PAT_MRT3847_125122C.1
gggttgaacaaaaatggaagaagctagagcacaaaagcttgttgagaaatctgaggtttcaccagctacaagcaccacaacttctcttcccctcacattccttgacttgtctttggcaggtcctgtttatgtgagacgccaattcttctatcactttccccaccacacagaaattttctatgaaactacactcccttctctcaaacacactctctcccttacccttcaacatttcttccctcttgctggaaatctcctttgtccaccaccacctcacaaacccttcattcgctgcaccgatgatgacactgtcaccttaaccatcatcgagtccaaagcggatttcaaccatctctcttccaaccaccccaaaaatctcaaagatttaggtcacttggttccaaagttgacatgcacaaccatgcatgaagaagacacgttcattttcccaattgtggccttgcaagtcacggtttttcccaacaatggcctttgcatagctatcacttattgccacgtgatggatgatangtgttgcggtcatttcatgaagtcttggtcttccatt

SEQ ID NO: 27821 - DNA, 1096 bp, Glycine max
  Clone ID: PAT_MRT3847_125123C.1
tacggctgcgagaagacgacagaaggggaacacaatactcctccacccgtcctctctttaccttcttaacgcaccaagcgaagcgaaaagcgctttctaacttaagtgatggcgaacgcagctgaagtttcagccttgaaccgcatcaaactgcatcttttgggtgaactctctccactggccactcccctaaactattttgatgaatcaaaccctagcccctctgaatcttccaattcccaatcttcttctgtttctcttaaccactacttcactgacctcttcgaattcgactccaaaccccaaataatcgacctccaaactcccaaaacactaacttcagctcagaagaaacctcaattgaatcggaaaccgtcgctgctaatcgctgttccaaagaagaccgagtggatccagttcgggagcccggatccgaacccggtgatggctgcgccggagaacctgccgcagaagaatcactacagaggtgtccggcagcggccctggggcaaattcgccgccgagatccgcgacccgaacaagcgcggctctagggtttggctcggaaccttcgacaccgccgtcgaagccgccaaggcctacgaccgagccgccttcagactccgcggctccaaggccatcctcaacttccccctcgaagttagcgccgtggcggagaccgtctccgtcgccgccgccgaaggcaacgtcgagagaaagcgccgccgcgaggaagaggaggtggtggtggaggaagtaaagccggtggtgaagaaggaaaagataacggaacaggatgtgagttgttttagggggatgccgttaacgccgtctatgtggaccgggttctgggacagtgacgtcaaggacattttcaacgttccgccgttgtcgccgttatctccttttggattttcaccgctcgtggcggtgtgaaatttctaatttagcactgcgttttttcgtgtttaagttacagcgtcctgtatggggatgagtacagtgtacatttgacgaatttgttaattcaacaatcttttattcacttttatttgctgaaaaaaaaaaaaaaaaaaaaaaaaaataaaaaaaaaaa

SEQ ID NO: 27822 - DNA, 279 bp, Glycine max
  Clone ID: PAT_MRT3847_125124C.1
acgatgattttttttaaggtaatgcttgtgaattttttgaagggaatgtaaatttaacagctgtagtcttcacatttataatgaatttgggatttttagttcaataatgatgttatataaggactaaaattgtattgtttgttgagtatttttgaagatgggagcttaaagcatcttgatgacacttattacggtgatattgtattaactgaggcaagttttccaaagattcctaaaaatttctttaaatccaaaaagttttattatgaaaaatctgat

SEQ ID NO: 27823 - DNA, 194 bp, Glycine max
  Clone ID: PAT_MRT3847_125125C.1
tcggattgttttcacgaccacaaccgcggcttccatgttgctggatagcaaaggaagaccgggatattcttcattgataccatatggtgagcccggtgggcaagctcaaaggggtggagcgtactttgagctctttccttgggggggtgagtgtcaaaagggggagggtcacattggggaaatggaaattgggg

SEQ ID NO: 27824 - DNA, 172 bp, Glycine max
  Clone ID: PAT_MRT3847_125126C.1
ccgggtcgacaaaggtaccattaccttgatgtgcaaaacacaaatagtgcctgaaaatactagaaacgatacgcgccttcactatgatgatacaccatgtgtaatcatggacgatcgctattgcgctttgcacgcaagaccttgactatcacctggatacctgctcgatctt

SEQ ID NO: 27825 - DNA, 230 bp, Glycine max
  Clone ID: PAT_MRT3847_125127C.1
atcaatttgtatgactatgagcgaggcctgacgctgaaggatcctctgtgatatatacacatgaatcccattctatacagtatagctcaaagtgcatattggaacgacatcaatgggaactgtcaacagcgattcgctcaaatagaagctgtgcacacattgacctactaggaaggacctttcaccggaaacacttaagaacctacctaaaggggctaaggtaaaatatc

SEQ ID NO: 27826 - DNA, 596 bp, Glycine max
  Clone ID: PAT_MRT3847_125128C.1
gtccggattcccgggtcgacccacgcgtccgaatatttcggccttggcttgacaagcattgtctggacattttacgaagaatgtaaagatggaatcttgccatctctaagatttggaagcaagattttaactaacacagtcaacaaagtttacatatgtacagtttaaatctatctttgaactttgacctaattggagaaagaaagattgctagagttgtggttctcattaggagttctttcatttctgttataccgtggttctcttttggtccacttttttattgcaccatttagaatatggtgataattgagggggcttaggtggttagcatatgcagaaaaacaatattatatgcttcttaaggtagttgttgaggattcatgcttaagtacccttattatagtgttaaatttcatgactctatacggtattaaatttcagccagtttgcaatggtttcccttaaatatctttagtttattatagtgttattagttagtcagtggctcagtgcagtagcttgccactttctctaatgtatttggccagagatattttttcctattttaactgtgcactttcattatctctctt

SEQ ID NO: 27827 - DNA, 301 bp, Glycine max
  Clone ID: PAT_MRT3847_125129C.1
tgcattcagctgtcattggactgtagtcaaaagtcttcttcaagagacaccctcaagtgtttatgttatggcattttcaactagtcaatctcctacatcatcagaaaccagaaattgcaaactggacaaagactccctttataatcttgcggagcatataaaaaacaaattctggtgctaagaattatttgattctgagaaaggattgactgatattctacagaatcttagagcactttctaatgatttgttgagcatgtctactgacaatggtgctcttggtgtacatgaagagaagatc

SEQ ID NO: 27828 - DNA, 190 bp, Glycine max
  unsure (1)..(190): unsure at all n locations
  Clone ID: PAT_MRT3847_12512C.1
anacacancgnnngncgcnnncanngnnnnagcgnagnnnnaaagtcatcgcgaggagnncgaggatcgnggcatgttgagcaagtcaaagaagaagcaacggctcaagcgttgctcgtttctgcttaaaccccaacacaccaccagttccgatgttgcctctcatctacgcaacactttccgcctccac

SEQ ID NO: 27829 - DNA, 420 bp, Glycine max
  Clone ID: PAT_MRT3847_125130C.1
cctactcttccgaccatttgtaagaatatgttggggtacttataaataccaggggggtatttttgcagataaaaaagccacatccggatatgggtgaatcctcacaagtgccgacaaccaacaggacagaggttactgattcagcattcataacaagcttcggcccccaagagcaagtgctgcatcattcaagctttagagggtaacacactcattaaaaaaatgaatctacacttgaaggcctatttgaccatgtacctatcatagtttgcgccttcttatgtcaacaacaaacataggatcttccttaacgggccacccgaaaaagatgaatggacaaactttatgatctcaaacccacccaagttacttcactgctgagagacataaagtccgtcgacaagcggaacccccggtgac

SEQ ID NO: 27830 - DNA, 492 bp, Glycine max
  Clone ID: PAT_MRT3847_125131C.1
ctcgagccgttttcttagatatggaaacttgcagcgtactggaaattggaaattaggatcttggtgggatttggttcaattgtctgcaactcattttgttgtggaggtatgatattttttagaatgggcgactttggataccttcacagtacatctgttctaatacttttagcatgtaaatgtccatgggtgctagattgggaaccaaggaggtcatggattgccattttagagctggattgtgtataaaggcaattggatttgaaaatcaccaccaatgagcaataggacaatttcattacaattgtgggcttcaagatttgccaagccaataggatgcactatctggattctctggattttgtggtgcagtagggaagatttcttttctccgaataattggtgccttaatatgtcacactgagatgggctatttttattctgtttttcataaatgtattatttttcctttttttgtcttctctttgttag

SEQ ID NO: 27831 - DNA, 455 bp, Glycine max
  unsure (1)..(455): unsure at all n locations
  Clone ID: PAT_MRT3847_125132C.1
catgcacccctacntaatctttnaattcttctnntgaagacnacggagggtggattattttaggagggaacaacatctgatatattcataacacatgtagggtgtttctattgaggggagatttgtttgtcactgaaatactcaccttcactgtgttaatgaaaaatggcttcattgaaactgtcagaggttgttccttcttctacactagacagtgaacgactcataatggcttttcaaggatatgggacagatgaaaaagcggtgatattggtattgggacacaggaatgctcaacaaaggaagggaatcagagaaacttatcatgagctttacaatgaatcgctcatcgatcggctgaattctgaatagtctggtgatttttagaaaagctggtatttttttggagttatgatccttcataaaggcatgctagactagcaaaggatgcattt

SEQ ID NO: 27832 - DNA, 577 bp, Glycine max
  Clone ID: PAT_MRT3847_125133C.1
attcaattcaacaaccttcatttcttccatcttcacttctctctccatctatgtccatgctgcccctccgtttcggtttctcgctcgctgcccctttattttattaatactatttttcgattaactttgtttttatttttttaatttcgggaccttgtccctttgacgtgaattcatctctttcttcgtgattaaattaactgcctgcccgaaatgatgggaattgcccaaattgatgcattatttctctccagatttttcatttttcgataactccattgtcggttagcttcatactaatatatatgtttttatttatttattctatttttaggtctaggttactgctttctattcctctttttttttttctagaccgaattgaaattgaaactttagttcttcttcttcttctgcagtttcaaggttatgtcacattggattggattggatgtttgtttattaccttacgaggtgaaattgattgatgtgtttgttcctctttttatggagcagcaggtatggctcaacaacagggggacgaaatggagtatgctgctgatgataatgaaatggc

SEQ ID NO: 27833 - DNA, 258 bp, Glycine max
  Clone ID: PAT_MRT3847_125134C.1
tccggctcgagacttgagcagcaacaaattgcagggtcctattccggagtctatctttcatattaatggactccgtttcctacaactttctgcaaatgaattcaatggaacaataaaacttgttatgattcagaggcttcacaatttgcatacattaggtgtttcacacaacatagattcaattgatataattgtcaatgatgatcatgacctatcatcctttcccagcatgaaatatatattgttggcttcttgcaa

SEQ ID NO: 27834 - DNA, 304 bp, Glycine max
  unsure (1)..(304): unsure at all n locations
  Clone ID: PAT_MRT3847_125135C.1
tncgngtnttgtatacntgctttgtntccatcccttcgttatntatntgttgttacttgtnnctgttgtccctctccctgggagaaancataagangaagaagaaaggttngaagtgaaatgtgagatatggnaagtggagtttcaacactctgttggtgctcctgggaccaacaacgagnccgangtnattttnagcgccaccgaccnactggangaaangctnggcnactccttctgctagtcagatcctccgcacgctggtgtctngcactnactncgatcgttcctcagtcnttctattc

SEQ ID NO: 27835 - DNA, 665 bp, Glycine max
  Clone ID: PAT_MRT3847_125136C.1
cacgcgtccggtttctctgtcttcattttagtttttacggctagaagaatgtccagctcatcggaatatttggtattttccggccaccacccggcgaactctccggcggaaaagtccactttctctcagacttgtagtctattgagccaatacatcaaggaaaagggtaccttcggagaccttaccctcgggatgacttgcactgccgaaacaaacggtatgaattgtattttatttctcaattaaccctaaatcgttctgaaatttaattgaaatgtattctgttagaactcagaaggaagccaatttgtgaaatcgttggtttggaataagtttttctttctttttttctttttatgagcttttgtctaggttcgatgtttcgaatgcatttaattgatcaacttttattggatacttatgtaaaaacggatcttaatgtgacgtcgtagtttctaaattttccttcttatttggagagcaaaaaaacaatctcaaccgacagcgatgcaaaatgaggtgttttgcctttggatgagtcctaactgttcagatttttctccttgaaatgctacggggttggtctcctaaagaaaatgttttgtcttgggggattgctctataacacgaccctgtacatatgtgttcctaaatggacttgcatg

SEQ ID NO: 27836 - DNA, 231 bp, Glycine max
  Clone ID: PAT_MRT3847_125137C.1
aataggaattcaacttaactatgtggaggcatggcgtgggaaagaattgctaaggagcacctgtcgggttcttatggcgaggcacatagtggggggccttccttctgggaaaaatgaatggaggctaatcctggaagtctggcgacgggcactacaaaagaagacgcagacgttagaccgggtctttgtgtcactgcatggctgggggggagggtagccagcaaggtgtgg

SEQ ID NO: 27837 - DNA, 910 bp, Glycine max
  unsure (1)..(910): unsure at all n locations
  Clone ID: PAT_MRT3847_125138C.1
cagcttgtgagaatatgataagtggaacaggtatgaggcctgnagatattgtcacagcttcaaatggaaagactatagaggttaacaacactgatgctgaaggtagacttaccctggcagatgctctggtatatgcttgtaaccaaggtgttgaaaagattattgacttggcaaccttgactggggcttgtgttgttgctcttggaccctcaattgctggtgtgtttacaccctgtgatgacctagcaaaggaagtttttgaagcttctgatgtgagtggggagaaactatggcggctgccattagaggaaagttactgggaaacaatgaaatcaggagttgctgatatgttgaacactggtggtcgacaaggtggtgctattgttgctgctctcttcctgaaacagtttgttgatgaaaaggttcaatggatgcacattgacatggctggtcctgtgtggaatgacaagaagcgctcagcaacaggatttggcattgctactttagtggaatgggttttgaaaaatgcttcaaatgccaactgaaatttcaaatcttgttacatcgtatgtgaaacacaggatgagataagctcatcttgtgatgtttgtgcttcaatggggtttggttatatgaaataagttatttaaagggatggaaaatgtggtaaaatgaggcattttttagtgtattcaaacttttttctagatacaaaaaacaacctttttgttttttcacatttaccaataattcagtttgcctctcatagtttgttttatttatatttttccgtcggctttcgcaattgtaatactagtatcctatataaaattgtagccttattctatgcctttataaaaaagtaaaaaaaaaaacgatagggcggccgctatacagggtacgagtgcat

SEQ ID NO: 27838 - DNA, 1166 bp, Glycine max
  Clone ID: PAT_MRT3847_125139C.1
ataaaggcatagaataagggtacaattttatataggatactagtattacaattgcgaaagccgacggaaaaatatataattaaacaaactatgagaggcaaactgaattattggtaaatgtgaaaaaacaaaaagggtgttttttgtatctagaaaaaagtttgaatacactaaaaaatgcctcattttaccacattttccatccctttaaataacttatttcatataaccaaaccccattgaagcacaaacatcacaagaggagcttatctcatcctgtgtttcacatacgatgtaacaagatttgaaatttcagttggcatttgagagatgcaaactgacctattggcaaacgtgaaaaaccaaaaaggttgttctttgtatttaaaaaaaagaaattcgaatacactaaaaaatgcctcggcttaccacattttccatccctttaaataacttattcatataacaaaacctccattgaagcagaaacatcacaagatgagtttatcccatcctgtgtttcacacagatgtcacaagatttgaagatttcagttggcctttgaagcgtttttcaaaacccattccactaaagtagcaatgccaaatcctgttgctgaacgcttcttgtcattccacacaggaccagccatgtcaatgtgcatccattgaaccttttcatcaacaaactgttttaagaagagagcagccacaatagcaccaccttgtcgaccaccagtgttcaacatgtcagcaactcctgatttcattgtttcccagtaactttcctccaatggcaacctccatagtttctccccactcacatcagaagcttcaaaaacttcctttgctaggtcatcactgggtgtaaacacaccagcaattgagggtccaagggcaacaacgcaggccccggtcaaggttgccaagtcaataatcttttcaacaccttgattacaagcatataccagagcatctgccaggggtaagtctaccttcagcatcagtgttgttaacctctatagtctttccatttgaagttgtgacaatatctccaggcctcatacttgttccacttatcatattctcacaggttgcaacaataaaatgaacctccaccccctagaggtttgatttgaccaagagctttcgttggttctaaaactg

SEQ ID NO: 27839 - DNA, 440 bp, Glycine max
  Clone ID: PAT_MRT3847_12513C.1
gaaaaaaactagtgcatatataattggctttgattaaacagaaatgaccatgaaacttttagtggctatggatatatgctataaagaaacatcaatacgtccacagctgtatacactatgacatacagggaaacgcagtaaagtcactttccaacgaaccatgcatgctcagaactccaaaggggggatccatatggaacccgggaggatcattaaaggacactgaggccgacactagcatacacgtttgtgagacgtctatgcagggatgaccctctcgttctgacgaccgagctgatgctacgtagcaatagtggagtcgacattatgatcgaggtcgcaacggtcctgggagtcgttaccttggtgctctgcggcggggatacagaggccggactccctggtgacgagtggatggtcttggcccgagaggtcatggt

SEQ ID NO: 27840 - DNA, 320 bp, Glycine max
  unsure (1)..(320): unsure at all n locations
  Clone ID: PAT_MRT3847_125140C.1
ggaattcggctcgtgctcgagccgattcgagctcgaggcagagagccgnttaccacagcgcgtgactaccacgcgcgcatctggtgtgtgaagtaccagatctctcacgcccagagactcctcctcaagagcggggcctcctccattttgctttcttcctcctcctctatcatattcacacacacacacatatatatacaaagatagggtaaatttttttcattttctggtcagagtcattgggattattagatgtatatgatgatgatcatgatcaagatgatccatatcagccgggatcgaatgtgttagaaaatttt

SEQ ID NO: 27841 - DNA, 700 bp, Glycine max
  Clone ID: PAT_MRT3847_125141C.1
ccacgcgtccggcgatatgtatcgaacggcggcgaagcggttgttgtgcggtgcaagatactactataatggcaacgttggactccgattccggcctcctcagatatttataccctcttctcgcttttccacatccgagactcaacctttacccattccacacgctacggatcgtaccattccagtcgtcgtcagcgcgcgaaaccgaaaaccctaactcttcagattcgtccggttcttcttcaccttcatcttcctcaacaggtgatgatgccacaaaacccagggccaagtgtgaggaccaacacactcgcgtgctttagggctcgctctcttacgtcttaaagttggggtggacagaagctgcgctagttgcaggagccagggatgtcggtctttcgccatctattgttggatcttttcccaggaaggaagcagcactggtcgagtatttcatggatggctgcttacaaagacttgctgataaaaatgactcagatgagagtttacaaaatttgacaccaagtgactgcatctctaagcttatcagatttcggttagaaatgcaagctgcatatataataacatggcctcaagctcttagcatccaggcacaacctgtgtatggtcctacaagttttaaacatagggcgaggcttggggatgagaactggcatgctggtggggataaaggctcttg

SEQ ID NO: 27842 - DNA, 234 bp, Glycine max
  Clone ID: PAT_MRT3847_125142C.1
cttggtcatccctccaccgttttttctcattctcacttcgtaaccctcatcgaggctccatctccacaacatcacccttccctcaccctccacttccatatatttttatttccataactataaaagtatttaaaattcatttctataaaattttagtattctcgtaaaattaaaatgtcttacttttttccaaccaagagatttccggtgctatatgtgtcattttcattctta

SEQ ID NO: 27843 - DNA, 415 bp, Glycine max
  Clone ID: PAT_MRT3847_125143C.1
tttcagccttagttttaataggaaatatccaagggtatctggaaaaagcatcaataaaagatacataatacttgaaaccagaatgagagggtagcctatgagactttcccatgcaacaggaagcataaaagtctgaaaaaaatttattagatgaagaaatattacactggttgaagactagcttcattacttgactattgggatggcctaacctagcatgccaaagactaacagtgctaggaggagaaataacagaactggaagctacactagaatttttattaacagtaggagctgggattgaagtagagatggaggttgacaacaactgaggagagtgatcttgaagcctaatgttatgaaatgaatagaggccatcaacaccaacaacactttgaagaaggatcttattggt

SEQ ID NO: 27844 - DNA, 334 bp, Glycine max
  Clone ID: PAT_MRT3847_125144C.1
aaaaaaaaataagaaaaattttttttttcaaaacctaaaccagggcattttcaatcctttagggcctccccatatagttggtttagccaagggcctccttaaaaaaaagggatcttttttttaaggcccaaccctggccaaccaaataggggggattaaaatagaaatcgaaaccaaattatcggaggaagtggttcaagaaccaaatccccttttaaaccatttattaatccaacaccggcctataatacccggctcaccccaattattttggagggggattatagttagaactatagttggaattagggcccaaaacaactttccaatccaa

SEQ ID NO: 27845 - DNA, 348 bp, Glycine max
  Clone ID: PAT_MRT3847_125145C.1
cccacgcgtccgcttctctctctctctctctgctgtacttgcttgaagcaatggccaaagggtagagttcagtgctgctggctctcctcctaacatacactaatgtgcttgctgtatagcttgtacttgaaactttttcaccctcataccctcaccctcaccctgttcactacgccacacaaacacctctttacccaccagcaaatgctgcacaaccacaccacaaccaccacgaccaccagtctccagtaccaacacctgttccttcaccttctcaccacaattactcttctacccctgtccctgctaagcctcataatcaccaccatcaccatcaccctatttctc

SEQ ID NO: 27846 - DNA, 264 bp, Glycine max
  Clone ID: PAT_MRT3847_125146C.1
cggccgctcgagccggcgggcgggaatccaacctgcagatacttttcttggtctctctttttgtcctcttgttggcttttgctcctttgattcccaacttcaccatattatgaagctcacaggtttcctgcaagcggtgactctaactgctttggtgttatccaccttcactgcatcagatcccgattctcttcaagacctctgtgtcgcagaccttgcctcagcggaaaaagcgaatggattcacctgcaaagatgctggcaa

SEQ ID NO: 27847 - DNA, 777 bp, Glycine max
  Clone ID: PAT_MRT3847_125147C.1
gtttcttttctcacatattcaaaacttcaagtctaactggtagcgtttagcactattgcaataattcctgagctgcagtgagtcaaaactcaaaagggcttcagtgaatcatgatttagatgaatctccaatttgtaggtatattactactgttttgattactgatttggtaattgcttctctacttaaatcagatgggaacacattagctactgcagcagcacaattgaagatttttaactgttctaatcacaaaaagattcaaaagttctctggtcatcctggatcgaacagatgcatgattttcactgaagatgggaagtatgtcctctcgtctgctgttggagaaagatatgttgctgtttggaggatagatggtgctaaaaagcagtcagctagttgtgttcttgcgatggagcaccctgctgtctttcttgatagcaggtgcattgatagtggggaacatgatgaggctggcatatgtgttttggcaatctcagaaattggcatttgttatttatggtttggtaatagtatcgaagaactgcgtaatgcaaaacccacaaaaatatccttatctttagaagacatgccttgcttccaattcctaagggttttgattctcatgagaaagagaaagcatttcaaaactctctggacaaggatgtaattgatgatttccatagaagtagtaaagatgattctgttgagatagaagatgatatggcacaaagtgagattgatgtaatttgcatggaggaccggatgagatctcta

SEQ ID NO: 27848 - DNA, 1856 bp, Glycine max
  Clone ID: PAT_MRT3847_125148C.1
ggctcgaatatgcgtgctttttattaaaataccctccttccttcctaccatactctcttccatggtttatcccccctatcccattattttgttaattatgcttccgtagaattttatttctctgaccctgatgtatctacagtatttttactggacacttcagcccaagccttttcttcaattggtcccatactgcccagtttcttctccatctaccacttggctttcacgtttaccttcgcagcgctctttctctctgaaccctaatttacacacactccctttattcgatccctctctccaaccatggcgatcaactcttccaagaatccagatggttctgtccaaaatgcaatgccttcgtatttttattctccaccactagatgtttctgctgcatttccacaagcaacaccagcatcaacgtttcctccttgtgcttcagattattttcaattggacaacttattgacagcagaggagcaagccattaggaagaaagtaagagagtgtatggaaaaagaaattgctccaataatgactgagtactgggagaaggccaaatttccatttcatgttattccaaagcttggtgcattgcgcattgctggtggcacaatcaaggattatggttgtcctggtctttctatcactggaagtgctatagctgtggcagaagttgcaagagttgatgcaagttgttcaacttttattttggtccattcatccttggcaatgctcactattgcattatgtggatcagaagctcagaagcaaaagtatttgccttctttggcacaattgcaaactgtagcatgttgggctttgaccgaacctgactatggaagtgatgctagtgctttgaagaccactgccacaaaggtggagggaggttggatcctggagggtcaaaagcggtggataggaaacagtacatttgctgatgttttggttgtctttgctaggaatgcatcaactaatcagataaatggatttattattaaaaaggatgctcctggtttaacagtcacaaaaatagagaataaaattggactcaggattgtacaaaatggagacattgttatgaggaaagtttttgtccctgacgaggacagaattgcaggagtaaactcttttcaggacacaaacaaggtacttgctgtttcacgcgtaatggttgcttggcaacccattggtatatcgatgggcatctacgatatgtgtcacaggtacctaaaggagaggaaacaatttggagcaccattagcagctttccaaatcagccagcagaaacttgttcagatgcttggtaatattcaagctatgatacttgttggttggcgcctctgcaaattgtatgagagtggtaaaatgactccaggtcaagctagcttgggaaagtcatggatcactttgagagcacgagaaacagctgccttggggcgagagttgctaggtggcaatggaattttggccgatttccttgtggcgaaggcattctgtgatttagaacccatctatacctacgaaggcacgtatgacattaataccttggttacaggtagagaagttactggttttgccagctttaagccagttgctcaaagaagtcgattgtaaaagtgaaacacattacatgctccttttgtagactccattaggcaacttcaatgtatggcatgtgactgtgactgtgtattggttaatgttttgtattttgagaaatgagaagcatttaatttaataattatacaaatgctcgtgttgatggcaacagaatgagaaaaaaattagagttcttgaatccagatattttttcacatttacatctattctttgttgtgagcggcaggagt

SEQ ID NO: 27849 - DNA, 873 bp, Glycine max
  Clone ID: PAT_MRT3847_125149C.1
agaaacaatttggagcaccattagcagctttccaaatcagccagcagaaacttgttcagatgcttggtaatattcaagctatgatacttgttggttggcgcctctgcaaattgtatgagagtggtaaaatgactccaggtcaagctagcttgggaaaggtagtttctaacttatgtcatagttgtaacccccggctttctttcttaaaatcaaattcaagtaatactacttgtaactattcattatggtagatgtatgctaatgaattttgtcatcacctttcagtcatggatcactttgagagcacgagaaacagctgccttggggcgagagttgctaggtggcaatggaattttggccgatttccttgtggcgaaggtatgtttaattcttaattcaagatttcttctgtggaacctcaaatttgatcaaagattaaaactggataatttggtggtatgttgatgagtatggattgtctagcattgagggctaagtacaatgctctaatgatctttgttttattctgtagtcatggcagttatatataatttgtaacctaatttagctcgacatattttataacattaattttgtttttcttttcttctgttgcaggcattctgtgatttagaacccatctatacctacgaaggcacgtatgacattaataccttggttacaggtagagaagttactggttttgccagctttaagccagttgctcaaagaagtcgattgtaaaagtgaaacacattacatgctccttttgtagactccattaggcaacttcaatgtatggcatgtgactgtgactgtgtattggttaatgttttgtattttgagaaatgagaagcatttaatttaataatt

SEQ ID NO: 27850 - DNA, 426 bp, Glycine max
  Clone ID: PAT_MRT3847_12514C.1
cccacgcgtccgggtgccctgtctaatctaggccatatatgctcgatgctgttggacggtaggttgtcaatgcagctgactcatctatgttcggacaagatggtagacttatctgaacttcaaaaccactatctggaaatggaaacgaaacatggaatgagaaaggatatgcagtcagaatgtctacatgtaacccttgacgaggtactatgaaaataaacgatggtgcatacctaactctaaagatgatatacagcaacaacgagtgccgcattggagtaatgaagattttctacatctaggaggctgaacaactgtcgcacgaacacctgctatgacatgatgcatgcgtactaagtgaatagatcttggaatggatccaacagactattatcttatatgatatctatatgagcaaatgaatat

SEQ ID NO: 27851 - DNA, 1264 bp, Glycine max
  Clone ID: PAT_MRT3847_125150C.1
gaaaaaggggtggtggtttcatcttctgctggtaatgaaggtcctgatcttggtaccttgcacaatggaatcccctggcttctgactgtagctgcaggcaccatagaccgcacatttggtactctaattcttggaaatggacaaaccattattggttggaccttgtttccagcaaatgccttggtggaaaatcttccacttatctacaataagaatatatcagcatgtaactcagtcaagcttttatccaaagtggccaaacaagggatcattctatgtgactcagagtcagaccctgagttaaagatgaaccaaaggagttttgttgatgaagccagtttgttaggggcagtgtttatctctgatcaacctctattaaatgaagaaggacatgtttcctctccaactattgtaatcagctctcaggatgcgtcatctgtgatcaagtatgcaaaaagccataagaagccaacaaccaccatcaaatttcaacgaacatttgttggaataaagccagcaccagctgttaccatttacttttcaagaggtccttcagcaagctatcatggggtcttgaagcctgacataatggcacctagctctaatgttcttgctgcttatgttcctacagaactagtagcaacaattggcaacaaggtgatgttatctagtggctacaatttgctgtctggaacatccatggcatgccctcatgcttctggtgttgctgctcttttgaaagctgcacacactaaatggagtgctgctgctataaggtctgcactagtaaccacagctagtcctcttgataatacacaaaatccaattagggactatggttacccttctcaatacgcttcccctcttgccattggagctggtcaaattgaccccaacaaagcattttttgttatattattatgctttcaattctctgatacctgagttttttccttcatgaaaacaattgaaattggagaaataatagttgtgaaacatgctttaaacattagagttattacctgttctatcaaactcaactcagattggcttgggaatcaatcaactaatcaatttaaatcactaaatgaatcaaccatgtcatagatccaatgtgatcccatttgattctacaagttcagaggttgagccagtgacttgttgactcagcagattatgcacttgggataattataaatggaatggacaatttttcaacccaattaaaaaaatataattttttaaaaatattacaagttataag

SEQ ID NO: 27852 - DNA, 417 bp, Glycine max
  unsure (1)..(417): unsure at all n locations
  Clone ID: PAT_MRT3847_125151C.1
ctantaattttatttttaatcccaaattttatatgagtattgggggggtttttttgaaccaactctaggcgttatttaaaaaaaaggcagagacggacacgaacggcagaaagacaccaaacaagcgtgggaggagagaccaaacagcccgggtaaaccgagggagggggcaaagcccacacagagcaccgggaaacggaaaaaatatcccggacaagggccttaaaaaaaaaacccagggccggaaccctaaaaaaaaacaaaacccccggaaagaccattaggaaaaaggaagatcggaacgaaaacccctaatggaaaaggggggggcccaagaaaccccggaaaagaacctaaaaaacaaagaccccggacccctcggttttaaggggggtaaaaagggggcttacccgaggc

SEQ ID NO: 27853 - DNA, 152 bp, Glycine max
  Clone ID: PAT_MRT3847_125152C.1
cggagacgctttcccgaatacaccccctggcaccgggcgccctttacgataaatgcggacttaaccatgcaggccacgtcataacccttctccaatgtcatctcaatccaattcactgaccgtcgtttccccgcgtcctgacaggtaaaacc

SEQ ID NO: 27854 - DNA, 129 bp, Glycine max
  Clone ID: PAT_MRT3847_125153C.1
tccaatacacccagattttctatcgactcaacaccaaccgtactacttttactataatttctaactcccttataaacaatacccctaacgaatattactactacgacaaagctattatcattttctttt

SEQ ID NO: 27855 - DNA, 377 bp, Glycine max
  Clone ID: PAT_MRT3847_125154C.1
aaaagcacaagccgaacttattttgaaggaacattattacacaccctttaaacttaaaagttcttaaaacgtttcgggaacacatactacgttacacaaccagcttaaaacccccctcggatacggaggacatggagaagggttgattccgtgtgaatgttgtacggaaagaggtgacatcattcacttatcggatggccagcaaaattcaccctctggaggaacggggggatgcctctcttgcactgatttttggacttgacaatgccaagtggggccaaagctttctatgtggaagaaaatagcattaccctgaagaatctgcacgaaggtttgcctacatgcacaaagactcaacatcaattggatagaggact

SEQ ID NO: 27856 - DNA, 249 bp, Glycine max
  Clone ID: PAT_MRT3847_125155C.1
attgtccaaagaaataaaagaggacacaatgggttcacgagaaaattttaaaattgtaaaatagtcctcaaagctcaatgatcatccaagtctatgccttttcctcctttctactactttctgaatccatatatgcaaacgttttgtctttctttcgcttttcgttgattattattgagatgtaaaagagaggagttggtctttgccgtctaccttgtggcgcatctctttgtcagggtttcatttagc

SEQ ID NO: 27857 - DNA, 369 bp, Glycine max
  Clone ID: PAT_MRT3847_125156C.1
ggaacccaaggaaaaatgtcagatcatatcctaaaatggggagaaaaacaaagctattggtgctataaaaagattgaactcaacagttccagtttgggaaggaaattctgcacacttggttaagaataaacatctgattatttcacagaatcttgtgcactctcctgctttagatccactttacatggtgcgagaaagcctaaaatctgcaaggctgagccttctgggattcaaaaatagatcagaccattgcatagttgatatctgctttgaagacttttctactatgagtagaactcacatttctactccttcccattctataattcattcgctaaactacatttatacaagattggacagtctact

SEQ ID NO: 27858 - DNA, 375 bp, Glycine max
  Clone ID: PAT_MRT3847_125157C.1
ctcgagccgcaagacctggtgtgtgggagtacctgagagtgtttgtgcacgctcttgctgttgaggagttgcagcctgctgagtacctgcacttgaaggaagaactaggtgactgaagatctaacggcaactttgagcattgagttggacttggtaccatacaaagaaggctttcacagcccaactatcaacaagtcaaccggaaatggcgtgcaatcactgaaccagtatctttatgtccaactttttcacaacaaggagagcttgcacccacttttggagttcctaaggctttacagcgataaagggaaagacttcgcatttgaatgacagaagttaaaacccagaggcactccaacttgtttttgggtaagc

SEQ ID NO: 27859 - DNA, 253 bp, Glycine max
  Clone ID: PAT_MRT3847_125158C.1
ggatgttgaagagtcccattgcatggatgatcaaactgctttgataccaataacaccaattgaagaagaagaagcagcagcaaaagcattaatggattccttgaaaccatttgatgtttcacaatctcttcaattagctcctggtattcttaaggattcaaactctgctacaattaatcatattctcaacaatccagaagtgatcgtgaagttggttagagattatagagctgctaataattcacaatatgta

SEQ ID NO: 27860 - DNA, 1229 bp, Glycine max
  Clone ID: PAT_MRT3847_125159C.1
ggctcgagcaagatttttgttttggcacagaatgaagtctttcccaagttattcctttggcacctggaaactatagggaagtcacagagtgatgtctttcccaggttcttattagcttgcagcttgaagctatgtctgcatatgctcatcaaatggagcagcagtactctgcacctagtctctcggatgattctgagacaggaagccattatgaattagaatcaggattcttcatgaaatcgtttaccgcaacaatattcgttgcttcacttgtcactcttggagttcttctaattactttggtgatttccttggtgattatgctgcaatcctgtcaaagtaaaagtgctggaggagttatcgagcttctgaatataaatgaatattacagttattgcagggtgtattctctgcatgctgagctcaataacttagaaggatataatcttcctagaatctgcagagacctggctgtacactatatcaaagtaggccaatatgctagagacttggatttgactatgtctttgattgacgattatttcaagagtgttagacctgcagaggatggtttggatgtggttttgatggacatagatgacatttttcctcggaactctgactctttcaatttgtttcacaggttttacaatgacagcactagcaactgtattaaagaggcaaaaaatgtaaagctcatgtttgtttctagactatacatgtaccttcaaactggtggatggtctataattttgttatcgagagagcctagaacacaccgaaacgtcaccattaatcatcttgactctgcgggacttagaagttggtctgccttgatgatgagagcagaagattcagatcctaccaaagggtatgagtatttctctaggcaaaggaatgtgataaggaaaaagggcttcagaataaaaagtatcataagtagccatatggatgcagtgactgttccagagaccgaagtgcgaaattatttgcttccaggccatctatgtgacaagtttgagaagcaggtagagcatagatcctgaaccttagttgcatgattcatccttcaggaagagagttccattcaattagatagggtcttaatctctgatgctaggtgtgctcctcctcctcttccggcttctacgcgacggagcttgaccctagcatgaaatactgtgcagctaaaagtgaggttgtggtgtggatcgttgccgccctatgta

SEQ ID NO: 27861 - DNA, 617 bp, Glycine max
  unsure (1)..(617): unsure at all n locations
  Clone ID: PAT_MRT3847_12515C.1
aggaggtgtcatcatgggtgttgtggttgtgattagtctaagagaggtgttagggttagggaaggnaggtgcaggattgagataatctattttaatcttttcagacattcatttttgggaggtgttaattaagggagtgcaaaattcaaatgccctaccagagaagacatgcatatcaattgggctgcacatgggccgatttggactaaactttcaatccatttggaatgtactccaaaatttgttttgcaattgccttggatcgatcttgatctaaaattcgaaaccaatttaaatgatgtgtactcaaattaagtaatctcaagtttgagctttaaacatgtagttgagttaaatactatacaacttataattattttatttgactcaaacaaaattatttcttgtaaaagatttttgtgttcttatattaaaaaaatgtattcatattaatttaatcatcaatttatattaaaacgtttattccttattaaaccgtgataattgatttttcaacactaacataaatgagagctaatctatacaggtcaggtcacaggtgtgtcaaagatgaagggtttgagagagaatgtaaattgcatactactcttaaatgt

SEQ ID NO: 27862 - DNA, 715 bp, Glycine max
  Clone ID: PAT_MRT3847_125160C.1
agagagagtctggaatttgagctttagtcagaaaattaaaaaccaaccggattttctttttctatcctgtttctttgcttctcttttttcctctctctctctctttctctttctctctcataaaccgctacatacatgcactttttaaattagcaaaaacgtaaaggtactatatgtgtgtttgaagcagctcctatagccaccttttcctttattatttctttttctcactgccttcagttaaagtagcgagctagataggaaattctggtgtttttccatggttaaagaaggtttatagctcaatcctattagaacaacctcggacatgctcagttgtggactgttccataaaaagggagttgaaatagtatttgaaggcatctggtttcatcaagagagatagcacacgcgcgcgcacgcttcagagatgagtaagatcagcaactggagttctgtaagcagttctgatctcatagatgccaagcttgaagagcatcagttgtgtggatccaagcagtgccccggttgcggacacaagtttgaagggaagccggattggctaggcttgcccgcagaggtgaagtttgatcccacagaccaagaactaatagaacatcttgaagccaaagtggaggcaaagaacatgaaatcacaccctttgatagatgagttcattcccactattgaaggagaagatggaatttgttatacc

SEQ ID NO: 27863 - DNA, 481 bp, Glycine max
  unsure (1)..(481): unsure at all n locations
  Clone ID: PAT_MRT3847_125161C.1
tatgagactacactgagcatcgtctagctatctcgatcgaactgtccaaggtcctgtcaccgcaaaggaggtcaggaatgggcggaaccacgattgggtatggaaaagccttcatatgcgtgctaaaggtgagaggcgagtaaagagcccagggctataattcgcttgtggttgtatatggcgagggtgttggtcgcgtattgggattacaaggagccacatgcctaaggagcacgtacaaaagccaagcgcaaaatggtcccagagaggtggtgggatgcttggttaagcgggcggtggtaatgggggcagaggtgccggcctattgtacggagataacaagaacccggggccaaaaagcgcgttgcaggagggggtacncgtatgccggcttgtgcccacaagcagattatttgtgcgatggatttgggatgtactatgaggtgttactcatgggggcttaggagttgcatggttgatt

SEQ ID NO: 27864 - DNA, 284 bp, Glycine max
  Clone ID: PAT_MRT3847_125162C.1
gtctctcgtcgctctcatgctcgtggaagacgaccggttcaattacgacctctgggacctacccggtgcggctacctaccgacagaaagcgtggtccttgtttccaccacgggaccggccatacccgagcgggagcgggctgatcctgtcgaggggaaccgggatctgcaaggcaaccggggcggataatcccatcgatcaccccataccggatggtgataaaaaaggctcaggtgttgtacggcgggaaagctccgtaaggggacaagagacattcgatcatg

SEQ ID NO: 27865 - DNA, 250 bp, Glycine max
  Clone ID: PAT_MRT3847_125163C.1
aggcagtatagtgggagcatcgaggagtaatattgtattcacaatcatttcgcttgtactgtcacataccgtagacagacgctaagtgaatctgctagaattatgggcattgaggataaggcattcagtgtataacatgaatttgacgggaagtgggatgtcaatagcatccgattgagcaactgggatcctcatgcgatacacacagttgtcaagtctaacagtcctcaagatgtagtagactccagag

SEQ ID NO: 27866 - DNA, 353 bp, Glycine max
  Clone ID: PAT_MRT3847_125164C.1
ttcgttcttttttttaatagtttgagctccaaatattctggatcataatggagaactgtttactggcccgctaacgatttttatcctagcttttgtgcttaattttaacgcgaactgataatggtttaaaaagaggtactccttcaggaacacatgtatgcggttgaaaaaagatgaaggtttgcatatggatggctcctcatcaaaatagattttttattctggataacaactgtatgatgacgggtctgctggctgcagctgggagtctactaaaatccaaggaggaccgaacttgagcacgttgaccaatttaccgctttcgctcaaatgctttataataacaatgctgg

SEQ ID NO: 27867 - DNA, 331 bp, Glycine max
  Clone ID: PAT_MRT3847_125165C.1
ggctcgaggttctagatcgcgagcgttttcctttttttttttttttatcaaaactcaaccctcacaacacaacacacatagtcacacacaattgaacaagaatctgatgcaccaaaatatcacatatagcatatcatagtttagttttttttgtttatcatttaacacacacatatatagtggaggcagaagcaaattactacaaaatttgttggatttatcatcatcaacaacaactatggcagataatgatcaatttcaagcaagtgggaactggtgggaaacagcaagaagcgtgaggtatgagagcggagcatcacagtcaattttc

SEQ ID NO: 27868 - DNA, 243 bp, Glycine max
  Clone ID: PAT_MRT3847_125166C.1
ggggtgttcccttagcaaataatggacctttttctttctccggcttgtgttaccctcctctctacgccggggctggacgtatcatcataggatccggcatacgtctatacatggtcattatgggcacctacacgtccacgaggctccattgacgctaacgtgggctacccttgacttgctttaacctccaatcccaaacctgggataccttagacgcctgaccatgatgaacgctctgatgat

SEQ ID NO: 27869 - DNA, 1306 bp, Glycine max
  Clone ID: PAT_MRT3847_125167C.1
taacgcacgatccaaaagcagaaagcaaagttgtttgactgataccagtttattgattttgatatccgaacacacattctttcagcaaataagtacggaaatatatatgtaaaaaaatgaacaaaaaagctttgtccattttgatgcgcgccagaatgaagcccaacgatcgtacaagcctttctctctctcctattcctctaacaaacgcgacgagtcaaatgcagcagcagaattcccgccaaaacggatcgccaggtgatggaaattcagcgccaaatgactccggcaactccgagagagagtttaagcgtgtccgcgcttcaatgcactctgccatatcaatgagcaaaacagaagttctagatgacgtgcttaataacttctcggagggttatttaaacctttctcatgaaaaccgtcgcaagttgctccttgtccttgctagagaatatgatctcaataggtcacaagtgcgtgaactgataaagcagtaccttggacttgaacatcctgctgacaaagctcaagttagtggctctgaagacgaaggtttgttttcttctttctatcgcattgagaggaatttgagacatgccctccagccggtttatgaagttctctttgagcgtctcaacactcatcctggagggttgaggaccttatccattcttcgagaagatatcctatctattcttgcagaggagaatattgcatcgctgagagcattggattcttatttaatggaaaaatttattacatggcttagtcctgctgccttagagcttcaccagattacatgggatgatcctgcttctttgctggagaaaattgttgcctatgaagctgtgcaccctattagcaaccttctagatcttaagagaagactgggaattggccgtcgttgttttggatatttacatccagctattcctggtgaacccctaattttcattgaagttgcactactgaaggatgttgctcagactatacaggaagttttgtgggataatcctcctatacctgaaggtgaggcaacatgtgccttgttctactccatatcatcaactcagcctggcttagcggggatcaacttgggaaaatttctcatcaaacgggttgtaacacaggtgaaaagagagatgccacatatttctacctttgcaaccctcagtcccatcccgggattcatttcatggcttttatccaagttagcatctcaaagactgcttgctgagggagataatttgtcacaaccacaagcagagggatccatttccactttctatgataatatacttaaacc

SEQ ID NO: 27870 - DNA, 423 bp, Glycine max
  Clone ID: PAT_MRT3847_125168C.1
gtagttttgttgattcaagttccttggaaaacagccacatggaagttttggaaaatagtgctcctgattctgaattgatgaataatagggcagaggaggaagaaggccaattggaagttgaagatggagtgagggtttgtgaaactgaaaccccagttgaagatgtggcaagcactcttcctagaagttcggtttctctggattctttttcttttgcaaatttcaatcttgctcttgcaacagtagagtctaatggtaactcaaaaagagtgctgggaggtgtggatgatgatcctactgcttcaaagggggttattggaaacgatttggcaactagttccaaaggtagctcctctttcaggttagcgagatatctgcagggtgttcctagttcttcagtgaaaaggtcacagtcctttaatg

SEQ ID NO: 27871 - DNA, 1196 bp, Glycine max
  Clone ID: PAT_MRT3847_125169C.1
gttcttcaggctccatcttcttctccatatttctctatccaaacctcaaaagcaccacaacgaacatggggtttgcttccttcttctgtgattgtaaactcttcacttttttccacccttcatttttctcttcactcccaaagggaccagcatttattgtggaccccccataaaagggtcactaccagagctgcttctgttgaagttggagattcttcagtatcaactggaacggctgaggatgatgtgttgaaagccttgtctcagatcattgatccagactttggaacagatattgttacatgtggatttgtgaaagatctgctgattgataaagctctaagagaggtgtcttttcggttagagctcactacaccagcatgtccaatcaaggacgtgtttgagcagaaggcaaatgaagtggtggcaatgctcccttgggtcaagaatgtaaaagttacaatgtctgcacaaccagcaagacccatatatgctgagcaacttccagcaggtctacagacaatttcaaatattgtggctgtgtccagttgcaaggggggtgtgggaaaatcaactgtagcagtaaaccttgcttacactttggctgatatgggtgctagagttggtatatttgatgctgatgtttatggtccaagcttaccgactatggtctctcctgaaaaccgactgttagtaatgaatccagagaagaagaccataattcctactgaatacttgggagtaaagttgatctcttttggatttgctggacaaggacgtgcaataatgcgtggccccatggtttctggagtcattaatcaacttctgactactactgagtggggtgagctggattacctcattattgacatgcctcctggaactggagatattcaactcacattatgccaggtagttccattaactgctgctgtaattgttaccactcctcaaaagctgtcgttcattgatgttgcaaaaggagttcggatgttttcaaaacttaaggtgccttgtgttgctgttgtggagaacatgtgtcattttgatgctgatggaaaacgatattacccatttggcagaggttcaggttctcaggttgttcagcagtttggaatacctcatctttttgatctccctattagaccaacttggaatgcctgaagtggtagctgatcctcaggttgaagtttcca

SEQ ID NO: 27872 - DNA, 1791 bp, Glycine max
  unsure (1)..(1791): unsure at all n locations
  Clone ID: PAT_MRT3847_12516C.1
gttccaggacaaggttttaatcagaatgcagtgagttttaattctttgcattcttcaagctgccaagcagttggacaaagtcaagtagcagttcccattctaccttcaaagggtggaattgttgatggtatgctgaaacaggaagtctccactgagaaaaagtacactgctgaaccaaatatcatggatgctggcttatcacaagttagttcaagaaatcctcctccaaccgcgaacgtggtaggcaaagaacagcttgctcagcttaccaatctctcagcctcgctggctcatatcctcgggacagggcaacagctgccacaactttatgctgctttaaattctcatgatgcaaaggacatatcctccctagcaaaaactgaggtgcctgctatgcctgtttccaacacattcatcagtccagaacttacttttggtccaggacaagattttagacagaatgtgtggagttgttgacctttagggtgctgttgcaagtggggtacccccagaacttccgccgcagctccaagttgcagatgtagtggaaattccgtcacagtccaacacaggaagacaaaattgtggtgattcttccaaggctgctggctcagaagaacttgtcaagggtgatcctctaatccagttgcagccaggtcaaaacactggggttaataaggataataacaaggaaatgttacctgaggaaactctaaaatctaaagatgatcctaaaagtaccaaagagagtggtccttttgaaaacatggagcaaactgatggtcctgatgaggcaaagaaaataaagggtatgaaggggaatcgtgcatttaaatttgcattggttgagtttgttaaggagcttctaaaaccaacatggaaagatggtcaaatcaccaaagaagattataaaacaattgtgaagaaagttgttgataaagtaactggttccatgcagggggtcaatattcctcagacacaggagaaaattgatcactatttgtcattttcaaaaccaaagcttaacaaacttgtacaggcgtatgtggaaaagattcacttggcttagtgcaattgttgaaatttgactggcaacctcaaaacatatgggttaataagcacgataacaaggaagttttattctctgaaaggcctctatctaaagatgatcctaaaaataccaaagagagtggtcctttggaaaacatggagcaaactgatggtcctgatgaggcaaagaaaacaaagggaatgtaggggagtcgtgcatttaaatttgcattggtcgagtttgttaaggagcttctgaaaccaacatggaaagatggtcaaatcaccaaagatgattataaaacaattgtgaagaaagttgttgataaagtaactggttccatgcatggggccaatattgctcagacacaggaaacaaacacactgctcaagtcccattgctggattaattccaacaaactcgtactggggtcatagtaaaagcgtttccctgcgtatatgtttgacagaaatttgactgccagtagtttatattttactcagcactgttgtcttcaatatgtattctgcttctttacctctggatttttattttttttttgtattttggccatttgtttgcgtactgtagctcttttgcagcaattgcgtacaacaaatcagggagcatttttttgggcctttaatttttttnnntcgtttttttggggaaaaattattaggtgtttgtgccattaccaactcaatagttaggcagtaatgtgggatttaatttatttt

SEQ ID NO: 27873 - DNA, 1919 bp, Glycine max
  Clone ID: PAT_MRT3847_125170C.1
gcacgagtgggctgtaagttcttcaggctccatcttcttctccatatttctctatccaaacctcaaaagcaccacaacgaacatggggtttgcttccttcttctgtgagtgtaaactcttcacttttttcaacccttcatttttctcttcactcccaaagggaccagcatttattatggaccccccataaaagggtcactaccagagctgcttctgttgaagttggagattcttcagtacccaccgggcacgcagttctgaacacaggccattaccgttagttgtttagtattaagcaactttgatctatagttaatttttttatttttgctatgggttgcagattgctccatgtgctaaaatggagatggtttcgggtagagctcactattctagcatgtctattcaaggacgttttagaacaaaatgaaagtggtggtggggaaatgctcccttgtgacaagaataaaaaagttaatatgtctgcacaaccagcaagacccatatatgctgagcaacttccagcaggtctacagacaatttcaaatattgtggctgtgtccagttgcaaggggggtgtgggaaaatcaactgtagcagtaaaccttgcttacactttggctgatatgggtgctagagttggtatatttgatgctgatgtttatggtccaagcttaccgactatggtctctcctgaaaaccgactgttagtaatgaatccagagaagaagaccataattcctactgaatacttgggagtgaagttgatctcttttggatttgctggacaaggacgtgcaataatgcgtggccccatggtttctggagtcattgatcaacttctgactactactgagtggggtgagctggattacctcattattgacatgcctcctggaactggagatattcaactcacattatgccaggtagttccattaactgctgctgtaattgttaccactcctcaaaagctgtcgttcattgatgttgcaaaaggagttcggatgttttcaaaacttaaggtgccttgtgttgctgttgtggagaatatgtgtcattttgatgctgatggaaaacgatattacccatttggcagaggttcaggttctcaggttgttcagcagtttggaatacctcatctatttgatctccctattagaccaactctctctgcttctggagacagtggaatgcctgaagtggtagctgatcctcaaggtgaagtttccaagatattccaaaatctaggagtatgtgttgttcagcagtgtgccaaaatacgccaacaagtttcaactgcggtcacctatgataaatcaatcaaggcaatcaaagtgaaggtaccagattcaaaggaagaattctttctgcatcctgcaacagtgagacggaatgatcgctctgctcaaagtgtggatgaatggacgggggagcagaaattgcagtacagtgatattcctgaagatattgaacctgaagaaattcgaccaatgggaaattatgcagtttcaataacttggcctgatgggtttagtcagattgctccttatgatcaattgcagatgattgaacggctagttgatgtttttgaaccaagtgtacaagcatgatgaaaaaaaacatcagatgggttgtactgatgtaggtgttggtaatatggcaaaaatcatatatacatgtatgatagcctcaattcatagtccttcaacaaatagggatattagaagagtctgatagagcattctgcaaaggtataggttggccttgagattcactgcactcaacttttttccttggtttttgttgttccattgggtataaagcttttatttttcaactgtgaacacaagtgtattatatattcattcttttcccttgtaccataaaaaaaaaaaaaaaaaactcgagactagttc

SEQ ID NO: 27874 - DNA, 285 bp, Glycine max
  Clone ID: PAT_MRT3847_125171C.1
cgcgcgcgtgcgcgggtcccctatagagcgggcgctttttttttttttttttttttttttttgggggagagcaggcaccattataggcgaaaccaaagaccgtattccgtaagagttcattactgcatacaaattacatgagcctcactatgcgaacttagaaaagcctacttccatcttcaataaatacccatcccatttcgatctgggacttacataaccacgtacattcgatgcctcaactgaccttaacctgtgcttgcaatttacaacaaacgctttgta

SEQ ID NO: 27875 - DNA, 252 bp, Glycine max
  Clone ID: PAT_MRT3847_125172C.1
attccctcggatggcgagacaagaacaagggcaagcagaacggcactgatgagtcaacaaacggtaagctcagtaatagcaccgatcaatgggttgaaacacccaaaaaggacgactcgccaaaagagggtgaacagcttgtccgaacaccggacagagacaatgaactgagactagggacacccaggatggatagtgaggtaccaagtgtggaaatggcggcgaacagtacgaatgggctggaggaccagt

SEQ ID NO: 27876 - DNA, 344 bp, Glycine max
  Clone ID: PAT_MRT3847_125173C.1
caaaaaaaagaaaccttccccttggcttttttagactacaaaacaggatcttaattcctaaaaaacaaacccctttcaaaagcttgtaacaagtggcatttttaaactaacaaaaaaaataattgcggggtaatggcacctttgattttttagggggggttaattttaccacattagttctgcggaatccccaaggggctcccatgccttaacaaaagggactttttgtgatccaactttatttggttccccccctatttggggaaaagcccgtgatcccctttctttaacggcaccgggattaagttgcctttccgggtccctgatcaaagacccttcccttt

SEQ ID NO: 27877 - DNA, 363 bp, Glycine max
  Clone ID: PAT_MRT3847_125174C.1
gaatgagttaaggctggaatctattctacaaatgtaggaagctcaagctgtttaaagcacttgagagaagaggcagttgacaggaaaagcattgttgatatatcttgcataggagaagggataatgacagcgatattgaaatctcctccaccggggggtttccaagaaagaaagccctggggagcaacaagaacccccgacgaggagaggagcggcagcacgatctttcttagctaagaagccggcggaaattgacaagctagaactgattgcatgtataactgaggcaatagtaactattattcttttaaatgagaccttgtaaatcgcttgcatcttaacgaaattagtcgaatggtaccc

SEQ ID NO: 27878 - DNA, 429 bp, Glycine max
  Clone ID: PAT_MRT3847_125175C.1
gaagacgacagaaggggaccaacacaactaccacttgtcgacgaaccaccttaacacttgcaccctcgaccaaagctgacacaacaacaaaggacctctcctcttacaagaatgaatcaatgaatgaaaagaaagcaacataatgaatgactgaagaaggcaaaaggaagaagaagaaataactagggatattttcagaatttcaaaatacgctgggtgcacaaacagaattctaggtgcacaaagcgaaaagcctaacatggattgtgtttgaactaagcccagcatcaatttctaggtcagcttctgcgtattcgaagtcggaacgtttctttcttgtgatggaacatcgtgcgaacttacagctacaggatgcattcattactgtgggaagctatcatcacaaaaattgttgccaaaaggataaaa

SEQ ID NO: 27879 - DNA, 126 bp, Glycine max
  unsure (1)..(126): unsure at all n locations
  Clone ID: PAT_MRT3847_125176C.1
cttgannattatggntanggcncctcganaacatangtgnattgacanngacatctnatatcngangtcntgaagcatgctcagaatgatatggttggccggctgcgccaanatgatggcacacct

SEQ ID NO: 27880 - DNA, 1326 bp, Glycine max
  unsure (1)..(1326): unsure at all n locations
  Clone ID: PAT_MRT3847_125177C.1
cactcatagagttgtatgcaaaatgtagtagcatagataatgctaacaaggttttcaaaggaatgagacataaagatgttgttacctggagctcaataattgcagcttacggattccatgggcaaggagaagaggctttgaaattattttatcagatgtctaatcattcagatgttaagcctaatgatgtaaccttcgtctcaattctatctgcctgtagtcatgcaggtttgattgaagaagggataaagatgtttcatgtcatggtgaatgaataccaattgatgcccaatatagagcattacgggataatggttgatcttcttggtcgaatgggagagttggataaggccttggatatgattaataacatgcccatgcaagctgggcctcatgtatggggagccttacttggtgcttgtcgcatacatcaaaatattaagataggggagcttgccgctctgaatcttttcctgttagaccctaatcacgcagggtattatacgcttttatcaaatatatattgtgtggacaagaattggcatgatgctgcaaaactcaggacattgataaaggagaataggttgaagaagattgttggtcaaagcatggttgagataaaaaatgaggttcacagtttcatagctagtgatagattccatggtgaatctgatcagatttatgaaatgctgagaaaattagatgcaagaatgagagaagaaggttatgatcctgatttacagacacaagaaatacagttctaattttgactgtgtggaacattaaatctgatggggaagttgtctcatggcattaagatttataccataatttagatggttgacttgctggtactgagattggggaagttatttgtggtcagaaatacctttgcaagcgctttttctgcagtttgattgcttcactctaagcagaaatttgataattaagtaaataagttgagaagggctcattaaagcttcttagtggcagaccaaaacataaagtggaagtggatttgttctgatggtaaaaatttcttcgcttttatgatggctagttgtctatgcatttacggttcttgttggggcagctctagcaagattacattgcttggcctagcagatattatttactcatcattacatctcttggcatcctgttaaatttactggttatgtatctgtgcagttgaacttttcaagaaattgatttgtcataaaactacttttaaacagaagaattcacccaacaattgcattggaaaaaaaaaaaaaaaannnnnnnnnnnnnnnnnnnnnnnaaaaaaaaaaaaaaaaaaaaaaa

SEQ ID NO: 27881 - DNA, 418 bp, Glycine max
  Clone ID: PAT_MRT3847_125178C.1
gctgcccttttaccttgttctctttttgtggttcattcatctatctctgatgccacttgccgtccttaaccctaccgtttctggaatgccctacccatctgaccagttccagaccataatcgctaactctcgcgacatgaaccctaatctgtctcatcggagtccccgaatccggatgatgacgaaccggcccatgtccactaagcgctgtcagcgcatcccgccgctcttcatacgcctatcccttagtcctaatcatgcggctgccacagctctgaatgggtcaggtccaaagactaatccgcgggctaccttggacgcacgggacgccggatccagcgccgaacactgagagcctcgctctggagacaagtccgtagacgggaaccgacgagagaaaagactgcacttcaatggc

SEQ ID NO: 27882 - DNA, 1137 bp, Glycine max
  unsure (1)..(1137): unsure at all n locations
  Clone ID: PAT_MRT3847_125179C.1
cgcctgcagttttggtccggaattcccggngtcgacccacgcgtccggaaaatttccttcctcactgttcactctgtttcctcaaacctcaaattttcaaaaccaatctctccagccttcatttatctagtaattggtgttgagggcataacatcttcctgaatcctgaagttctaagcaattgttgaatcttgaagaaatcagcatgcgttggttgggtcttttggttgatgtgtatcgtcaagttgtacgcttgaacttatattgtaaagttattctataggtctccaataccataaacccttttactttgttacttttggagtttagtcccttatttttaactactgccatggaaggcaaccactgtttgatcatttcttcagatgagtatagaattggctgaaggttaggaagtgaagatagagcctggtattttgtatcttcagtgttatttgtcatcgtctcatatagttctatagttctagctgattttgattttataattagcttggttccttcattatcacattccattggggcattttcttggtgtgtgcattacattctagtgtggtacgatcaaaagacgttatggtgtgccaagcagcaagccaaacaagattccgggctttgaaacatgagagtggcattaaaggtgaaccagcaattattgttagagtgatagcatgctttcaacctttgcacgattgtcaggctgagtacttccgccatttgcttaagcctgtaacgtagattgctttgcaattatttctctttaagctgaagtttgtagttttctatttctgtcatttgttcccaagagaagcagcaagtcattcaagatcccatatcaaggcactggtcattttatttgttgaatggttaaggatcacaggtcttggccttacccacagcatgtggcttggccatcaccttacttaaattgctcctgcacctcggcagagcccagttcgcaggttcattcagcttatatgaaccccagcacatgcatctttcctgctgtcagcgtgtttccaggattcacagctcctgctctcccaaactggaagactgagcagaccaatgaagtgcatgggttccatcagtatcctcattcagaaccatatntgaaag

SEQ ID NO: 27883 - DNA, 155 bp, Glycine max
  Clone ID: PAT_MRT3847_12517C.1
aatggctggcatcggcatccagccataccaccagcaatgggctccggcagctgcctctcctcctccttcttatgcagcctctggcggtcctcgtcctcatcctgtggatgatgttccagggattcttattccgggtcttcctgaagaactgaagc

SEQ ID NO: 27884 - DNA, 205 bp, Glycine max
  Clone ID: PAT_MRT3847_125180C.1
ctcgaggagtatctcacgagaggttgaaagctccaaaaccatccttgtcgatcagctcaggatccatgatatatacggtgttcccctgttccatcagcagttcatcttcgctggagagcgccttgaggactgggctacccgtagcgactacaacatacacaaggatttaatccttcagcacgtgctcagtcgtcgggtgggcatg

SEQ ID NO: 27885 - DNA, 241 bp, Glycine max
  Clone ID: PAT_MRT3847_125181C.1
cccggggacgcgcggggcatgaaggcagcttagaatatgatgcatgtacaataccaaatgcttgtggttcataggatgatgccaaggatgaaaaacacacacaaatttgtggctgccatgctgctgtgagcataggaagactgggatatgcttcagtgactccatagagagatccagttgcgcatgcccaaagtgctgccgaggcctttgacgtttaacctgtagaagctgattgtcaaga

SEQ ID NO: 27886 - DNA, 272 bp, Glycine max
  Clone ID: PAT_MRT3847_125182C.1
gaacaaaaaaaaaaaagttggactgttttagaataaaatatgtatcaacaaaattgaaatgtaaaatttacaatagtaacaagtttaacaacgacaatttattataacattccataaaagataaacctaatttttatatatgccatacaaacaaacaataacaagttacacatttacaatacataaggatttaaccggatttatttccaagtttgctcttaatccaagtgaaaaccactggaaaattttacaaatccttggtcatgtttata

SEQ ID NO: 27887 - DNA, 160 bp, Glycine max
  Clone ID: PAT_MRT3847_125183C.1
agctctgcagggagcggacagccagggcgaaggcattaactgcctctgcgcgttaaccgataaaggtggttgaccatcagcaatcacgcgcgtgagttcactatgattcacttagcaccgatgatgctagaggctgacacctgaggagctcgggtcctta

SEQ ID NO: 27888 - DNA, 314 bp, Glycine max
  Clone ID: PAT_MRT3847_125184C.1
gcaaaggggctacccattgtcgtcgtagacaggaccttcgcaacacttgatgatcatcctgccatcacgtgagttgcacactgctagccgcaaccttctgtccctgtcactgctagcagacacagagctagatgatggtgacacttcatagaaataatgaacctataccatccagtcattgtagcgtcgtaacacactatggctggatgcataaaagaccaaggtctgcggatgtgcaacggcaatcgtacatacctcatttatcacctaagcagatgacaacgctttgcgtgaacgaacaagcctgcatgcat

SEQ ID NO: 27889 - DNA, 423 bp, Glycine max
  Clone ID: PAT_MRT3847_125185C.1
cgcgcgctctctttcttggtacggcgaagtactcatgcttgagccatcattacttcgcattgcttttattatggctagcacgtaggttacatgcacggtctgtataacctgtgcactggtctaggtggaggcacctacgatgaggcacgccatcacatgcattgatgtgacagtgaacagcgaaccgggcctatcatacctgctgcagggaggaacaccttcaccacttcggtggctggagaacaagaacactctagggtctgcggtcaccaccgtgaacaaacatgctgtgtgcagctgtcttccggcgaatgctgataggaacaacatgaatgaccagttctgctgatgcactccctgctttcagcataggcaatgggccgtgtacagatcagccgttccactaactgggcaaccatcaga

SEQ ID NO: 27890 - DNA, 493 bp, Glycine max
  Clone ID: PAT_MRT3847_125186C.1
ctcactctttctgctaggtgttagggctaggggtaggcataggcctttcttgtaccttcattgctcggtcatctcggcatggtttgttctgttaactaggatcctactgagcctggatgattaaaacttattgccaagtttgcatatatacgaagaaacccacacacatcaatgctcacggtgtccatggcaccgccctcatggatggcatatacgactgagcactgtcatagtcacatgtctcgatgatcatcgacagtgcctttaccatcatgagactgaccatgtgaccgatcattccactccagtggttacaatgtctgttttagatcatatggtcacccagcagccattaaagagacaaaagtcatgtggtgagggcactactgcgaaatgtaatgctcatggagctgcatatcttctcctgattgagcgcacacgtctgctgatattacatcgcttgatgtagctgattctgcgcacacatgcttaa

SEQ ID NO: 27891 - DNA, 450 bp, Glycine max
  Clone ID: PAT_MRT3847_125187C.1
aattcggctcgaggtttgtcttatatcaaactactcttaattatatggtccgttatttatgtcctaagctgaattagatgattgatatactaatcctttaaactctcttagtctcatacaaagaaaagcatctaatgtcgatgttggtcaattcttttgctgcttgtattaacacctatgttgaaaaactgttaatagcttggaaattgttagtttttttcttaaaaaaaatttgaaagaaaaaccatgcatgtgaatacatagtcagtcttttgctgcttttcttgagtatctaccaatgacaactttgttgctgaaatctccacagctcggattttcttggcaccaacttcacaatttatgacagccagccaccccatagtggtgcaaaaccatcaagtggcagggccagccgtcggtttgccagcaagcagattagcccacaagttc

SEQ ID NO: 27892 - DNA, 537 bp, Glycine max
  Clone ID: PAT_MRT3847_125188C.1
cttgatttttttccggaaacgtgagttggaggggaaaactaccgaacggcgcctgttggccaaccaagcatccaaatatatgcagcaacaaaaaaaaaaggaacttttcattggccttagctgtctcctgtgtgaaagagagcttagttaccaatctcacacaacggacgttctggatgaatctaaagtgcagaccagctgcgactgaggagggaaaagacggacactacatgcgttgatccaactgtctattctcaggttactaaaccgtgaggggcacatacttaaacgatttggggaactcgagagcataggacatctggagatagcggcggatctcacggcggtcaaggataaacacatgcttccacaagccatagacaccggcgagagggacaagcctgagagagtaaatgcgccatgcgctcttttgttcaatacggtggagaccatgcttggagatcttgtaccagtgagtagggcaaaacctgcacttctcatagaagtcaacaaggagatcagaagtccggccaccat

SEQ ID NO: 27893 - DNA, 818 bp, Glycine max
  unsure (1)..(818): unsure at all n locations
  Clone ID: PAT_MRT3847_125189C.1
attccagtgtattcctgtcgcattggttttcatctcttagagatgactcctcgttttctcttgtgctcgcattctcctattcgagccagatccttgcatactaactctctcacagtctcgtattctttccacacacttgcatacaaaatcgaattcgttcaagattatattttttcattactctgcatctgagacaggttattcttccacaggaagttatgaagcaacaagactgggtacaatttggaaggaaggtgaggggtaatgactctgattctagtaacagaaatgcaattgtcgtactaattatcaattgttaattgatagtgctttaataatgagattagtaatctggatggaaatcatagagtattttgacaaggttttcaaagtattctcactgggaatgacaattatttggtgtcttcctaagcgtataatgtaaagttgaagatgcttgtgaatagttcttgacctactctcacagaacatgatgaatctggatgaaaatttttgagtgctccgactcggttttccaaatattcaccatgtgaatgacagtttaatggtatattgaatatttcttttattcctttctttccttttagatgcttggtgattaattttccttttagcttttttagtttcatcactcattaattnntaagtttgagaaatagcttatgatactggaatgatttgtaatgccttgtgaaaatattttagntggtttctgttcacagctttctttgattcacctattattaattagtcattagccatgccactctagcatatttaatgcatatataacctta

SEQ ID NO: 27894 - DNA, 180 bp, Glycine max
  Clone ID: PAT_MRT3847_12518C.1
ttcagcgccactttcacttttttttttttacaaaatacaatgtgctcccataactacaatctctcaattccccatttatttaaatcaaaatcaaaatcttatctggggttctcccatcagaggacaaagctttcgacttttcgggattcgctcgtatttgtttcacagctctgatatgga

SEQ ID NO: 27895 - DNA, 390 bp, Glycine max
  Clone ID: PAT_MRT3847_125190C.1
aatttttgttcatctagaaatgtgcacgtaatgtaccaataaatgctcccaaaatacaataaatacaatgctacttcaaaaccactactagcttcctcgtgtaataacacatcaactgctcctaaaaattgtagttaccaacaacacctcaaaactcattcagcaaatcctcacaattacaattactccaatttgttcttcaattgcttttcactctctcaccatgtcttccatagagatggtttctgctagtgccatcaagcttccttaccaaattctaaggcatgagccatgctctgatgatgaaagagatcaaagggtgatccttaggccgaagaagtggtgtaggcctagaggggtgccattgaggagaaggtttagggtgaaagt

SEQ ID NO: 27896 - DNA, 248 bp, Glycine max
  Clone ID: PAT_MRT3847_125191C.1
cttttatgtttattcctttttaaaaaacaacgaaagacatggtatttggggttatgtgcgctgccttaaccttattgcctaaaatgaggccccagctcagatttcacatataaacgcccggaaaagcggcacattctggctggagggggaggtactgctgaattcaatcacccacagccacattcaccaacggatcagtgaccaaatatactgtacggcactactactacttctgcaaggcctgaggt

SEQ ID NO: 27897 - DNA, 276 bp, Glycine max
  Clone ID: PAT_MRT3847_125192C.1
atttggcaccgccagctaaattcgcttttttgacagtttgccagtgcgttgataaatatttggctgtcttatatggcaatcatagaccttttgttcaaaaaaaaaaaaaaaaaaaacaccaaaaaaacaaaaaaaaaaaaaaaaaaaaaaaaatttcaaccttaaacaaaaaaaaaagcgccgccccccccctattgaccccgccaccccgaaatttaaccccggcccggtccctgcaggcatcccatctttccctataggaacccctttaaaacc

SEQ ID NO: 27898 - DNA, 228 bp, Glycine max
  Clone ID: PAT_MRT3847_125193C.1
cagcacttctttttgccaataacatggtctaagtttgtgatcattatatgcttcagaatcttcgcctgagccttctgccgagcacaacctgggagttcttttggttcattgtttttatttctatggaagcaaattgaacacctcagatgttggcatgtcttgtaatgggacaggcacctttttgtgcagagtagtgaagggcaccagagaatgacattgggaagaact

SEQ ID NO: 27899 - DNA, 352 bp, Glycine max
  unsure (1)..(352): unsure at all n locations
  Clone ID: PAT_MRT3847_125194C.1
ccatcgcgacttaccacgcgnccgcacaagccggggcagnttggagagattcaggccaaagnccccccgaaaccccccacaagaggaanncaccacagccaggccaacccaggcgcgccccacaacaacccagacggcggaagggcgaccacaancgaaagccaaggcgcacgacacgccagngcccacaagaccaggcgaaaccgccacaggcgacaagccgacacccanaaacaacaagcgcgcacacgggcccaaacccggaaccccaggcacccgacacaagggcaccaacccgcaggccaagccgcagcaaaccgaacggaagcaaaaggcaacaccgcggacacca

SEQ ID NO: 27900 - DNA, 266 bp, Glycine max
  unsure (1)..(266): unsure at all n locations
  Clone ID: PAT_MRT3847_125195C.1
gnacaagagaatggcgaagtcattgagancgnagagggagaagaggctgagggcnanncggagggagattgttgaacctttctatganaagaaagnagcngcnaagcttgcngcccaagaggctgcccttgccgcccctaanctggangttccntcgaaaccnaatacngcnatggaagcanccgcntccactgacnacaccaacatggatgtggnggtggctgnnggaagccaaagcatggcttccttaaancctgttggnggaa

SEQ ID NO: 27901 - DNA, 460 bp, Glycine max
  Clone ID: PAT_MRT3847_125196C.1
tttttttttttttttttttttttttaggaataactaccgaatggcattataactgacaacagaaattgctttttatttcaatttcaaatttttaacggaaaaaacccccctacggggaaatccacaaaagaaaaaactggttttattccccgagagataccagaatgaccatcccaaaaaagtttaaagaaccggaaaatgcccttgcgtaccaatatcctcaaaacagctcaaaaaggcccccacccaaaagccctgggggatacaaataatttttttaaaaaaatttcccaaaaatgggttataaaaaacacaaccaaaaacaacggcggggaaattgggcccatttcaagaaaatatccccgcctggggattattaaaaaccccaaaaaaaaaggtgcgcaatttttatccccaaaaattagaaccttttgttgggcaaaaaattttttcccccaac

SEQ ID NO: 27902 - DNA, 307 bp, Glycine max
  Clone ID: PAT_MRT3847_125197C.1
gccacgcgtcgccacgcgtctgttaatgttgctgaagtctgattcctttcttcagaatccaagtttcatttcgtgggcaaaagattggagatagagtatggtggaaaaggcgagggtcctgtatcggaatcgatttgggaacgacgactctgctcgcggtggcaacacgatcggttgaatataccacgccaggtacagactacccatctacgtggcttaccgacacaacggtgtcgcgatgcggagaccggtcgcttgaacccatcacctgttttgatgctagcgttgatggagacgtttttgtgca

SEQ ID NO: 27903 - DNA, 246 bp, Glycine max
  unsure (1)..(246): unsure at all n locations
  Clone ID: PAT_MRT3847_125198C.1
ggggtatcttcagcgccggctgcggtcgcgggaacctctgggttgccctcgtcgacgtcgcgtggagagccaactggtcacatgaggnatctaaagtatgctgagttcgaagggttcgagggcggattattcagttcggcggagtacgctgcagatgagcacgcggcctatgcggttataggaagccattggtcggaggatgggttcgcggaggaactgtatgcgggacgcgaagtggactcaaga

SEQ ID NO: 27904 - DNA, 448 bp, Glycine max
  Clone ID: PAT_MRT3847_125199C.1
ggcgccgttgaaactccataagcggctcgccgctagcgtgataaagagaggcagaggcaaggcttggctcgatacaaatgaagacaatgatatctccatggccaattctcgagaaaacacaacgaaagttggagaaagatgggggcataaacacgttttttttaagagtcactcgaactctcgagctcgaagatcgaatgacgccaaaacgaagggacgccgctccggctatggtaagcgtaaaggtacaagggaggcaaggtttcccaccaaaatccgacggatgaggaggatgcgtgtaataatgcgcctgcttcgcacgcaccgggaagcaaagaagaatgacagacacaagtcctccgatatcgtacatgaaggaggaaaggtattgtttgccaagaacaagaagagcctttgatcggacagcatacaaacacgaccaaaggct

SEQ ID NO: 27905 - DNA, 242 bp, Glycine max
  Clone ID: PAT_MRT3847_12519C.1
caaggggtcaataacatgttgggattgtaagcagagactcacccagaacatcgctgcaaagacctaagcaatttacaatccaggttgtttttgcctttggtatatcatgaatcaccatatatgtatgtagctgaagtaccatagttctcttgaaaagttacaacatgaagaaccatattatgccttttatgagaattattttcctttgttatcacatacttgtctatctttctggaatttcc

SEQ ID NO: 27906 - DNA, 455 bp, Glycine max
  Clone ID: PAT_MRT3847_1251C.1
acggggaaaaaaggggactttctatttgtaactaaaaaaagggtcttggaagtgttaatatacaaattttgtggtgtgatttctgcgagacaacagaactaggtgagacaggtgaaataaaaaattgagaaaaaaagtgaaacaacaaaaaaacatggtaacacaattacagagagatgaggcgtcatcatcaaatccaaaggcgaaaaccaaaaatgcaatgtgaccaaaagaactgagctaaatgcgtaaaccttattctacaaaaaataaaagtgacctgaactatctatacattcttctcttcttgggagagcgacataattcttgggctctaggtgatcaacatcaatggggacttcatcaggtgtggctgagagggactatctgtgatgatgattccttcgatggcttgatttgaggatccccgtcaacactggcactatggccctaac

SEQ ID NO: 27907 - DNA, 277 bp, Glycine max
  Clone ID: PAT_MRT3847_125200C.1
atatagccagaacgagcatttaaggagatgtttggtctcaacgttaccccacaagctacgattaggaaatcttttacctggacaaccagtgtgaggcacattttgtgactttggagtttacattttaggtaggtagattgggatggcacatgtcaaaatttcccggctctatcgataacgtacataattagttttctccccttatcggataaacaaattgctttctgtcgtctgcatccaactctgattgccattgattgaacagtgggttgtacaa

SEQ ID NO: 27908 - DNA, 277 bp, Glycine max
  Clone ID: PAT_MRT3847_125201C.1
tttttcgtttccgctaagtgcctattttgagacgacggagcgagaaatagtgtcgggggttatcaacaatgttttcaaatcttcattcgtttggagggagctgttatcctgtgcgaaacaaaataaagggagttgttccttatgtatgcgaacttgtctaattttataggggaaaataattctcactcaattctaactttataactacctatcgtgtactgcaactaaatacattagccatgtcacacataatattaccccaaacggaatgccctac

SEQ ID NO: 27909 - DNA, 372 bp, Glycine max
  Clone ID: PAT_MRT3847_125202C.1
gatattttttacattacactctttgtctcgattgggttgttagtagtaataagaaagaaaagtatggaagagaatctattagtattagcaaaaggaagtggggaggagcagaaagttgcatgggaaggtttgggtgaggaaatgaagaggatgattgacatagcagggcctatggtggttgtgaccgcttcccagcgtttgttgcaggttgtgtccgtcatgatggttggtcacctcaacgatgacctctttctctccagcgccgcttagccatctctcttactgctgtcacgggtttcagttttcttatgggaatggctagtggactggaaactatatgggaactagcttatgagctcatcaacataaaaa

SEQ ID NO: 27910 - DNA, 1717 bp, Glycine max
  Clone ID: PAT_MRT3847_125203C.1
tttcagaagagagttaggtttgtctcatcccaacagtttcgcgcgtcgtttttcagcttccgaggtccttgtgaagagcttggatttatatgggaagttggatggtcatgaagggtgtgtgaatgcagtggaatttaactccaccggtgacattcttgtttctggttctgatgaccgacaaattatgttttggaattgggaatccaaaactaaattgtttgcatacccttctggccacacagacaacatattctcagacaaagattatgccattcaccgatgactgccgaattgtgacttctgctggtgatggccaggtaaggcttggccttctctgggaggatggtagagttgacactacaatgttggggaagcaccatggttgtgtatacaagcttgctgtggagcctggaagtgcccacatattttacagttctggtgaagatggatttattcaacattttgatttgcgaagtaattctgctacgaaacttttctgttgttcctcatcaataggaaacaataaacagactctaagcaaagtagggttgaattccattgtgattgactctagaaatccatattactttgctatcggtggatctgatgaatatgcacgtgtttatgacattagaaaatgccagtggggttcagcaagaaattcagatcgacctgttaacacattttgcccttgtcacttaattggttcaaataatgtccatatcactggattggcttactcaagctttagtgaactccttgtttcttataatgatgagctcatctatctgtttgaaaagaatgtgcactcagattcctcaccttcatctgctacatctgaggatccgaagaatattcatgaggcccaagtttactcaggccacagaaatgcacagacaattaaaggagtgaatttttttggcccaaatgatgaatacatcatgagcggttctgattgtggccatatattcatctggaagaagaaggaagctaagctggtgagattaatggtaggtgatcaacatgttgtaaatcaacttgaggcccatccacatatacctattctcgctacttgtggtatagaaaaaaatgtgaaaatctgggctcctctagggaatgatatacctccacttcctgcgaatgtgaaagagataatggagacaaacagacagggcagagaagaccgatcacgggtaacccttactcctgatgttataatgcatgttcttcgcctgcagaggcggcagacattggcgtatattgaaagaagacataatagggcagatattgtaagtgatgaagaagatgcagagggctaccttttaggattctcagatggtgatgcctcttctgaagaggattctcctggaaattccagagattgcaacattagctagagcttaaagaagtgggtttggttgctttggctgactaattccattgaaacactaaatgatgttagcttcactgttttccactaagcagtaccatatacatgtttgaaacgtgtgctagtaaacaccattaggaaaacagtgtgcagagctgtaaaatctgggattgttctagttgatattcagatattatgacgtgtacaggtataaaatatgtataaatcttatttttaatcaattatgagcttcacttattgtacaaataagtgaataaccctgttctttttttagaatgttgaatgttaaggtgttttttatcaaaa

SEQ ID NO: 27911 - DNA, 596 bp, Glycine max
  Clone ID: PAT_MRT3847_125204C.1
atttaagctcaacccaacttatgctttttctaaagtgtctgcttgagtctcctccattggaaactgatatttcctttgcagataaggcttggccttctctgggaggatggtagagttgacactacaatgttggggaagcaccatggttgtgtatacaagcttgctgtggagcctggaagtgcccacatattttacagttccggtgaagatggatttattcaacatgttagtcaagtattataggcatgttgcacgttgaagctcccctttatgctatacccaaacagttataagctttgtttcttttgcagtttgatttgcgaagtaattctgctacgaaacttttctgttgttcctcatcaataggaaacaataaacagactctaagcaaagtagggttgaattccattgtgattgactgtagaaatccatattactttgctatcggtggatctgatgaatatgcacgtgtttatgacatgagaaaatgccagtgggattcagcaagaaattcagatcgacctgttaacacattttgccctcgtcacttaatttgttcaaataatgtccatatcactggattggcttactcaagc

SEQ ID NO: 27912 - DNA, 739 bp, Glycine max
  unsure (1)..(739): unsure at all n locations
  Clone ID: PAT_MRT3847_125205C.1
gcgcgtgatattgggaccggcctagagtgcttggagtgttggctatgtccagagccatagnggacaattatctgaaaccgtatgtaatttcggaaccggaggtaacggtaacggagcggagtgacaaggatgagtgtttgatactagggagcgatgggctttgggacacggtgcagaacgacaccgcatgtaaggtggtgcggatgtgtctgaacgcgcagaagccggcgtctccggtgaaggagatggcggtggactgctccgacaagtcgtgctccgacgcctccattcttctgaccaaattggcgttggtgaggcaaagctccgacaatgttagcgtggtggtggttgatttgtggagagaccaatcaatggcaacaacaaaaggaattaattaattaaatttttaaaaaatgctaatcaaccgccccaaacctaaaatgggaactgtgcgtggacaccctttgattttgtggaattttgttattgacaaaaaaagggaagaaaaatgaagggtgtttacgtagtgctgattccatgtgattgtaattaaaatagtagggtgaaatttgtaattttcaggatattatcaacgaaccttgggaaattttaagagtagtgtgtgaaccaagaggtaaatcaggctcttgaggcatcgttgttttggttgtaattagatatataattgaaattgaaatcagcttggatctaaaaaaaaaaaaaaaaaaaaagaattttt

SEQ ID NO: 27913 - DNA, 603 bp, Glycine max
  Clone ID: PAT_MRT3847_125206C.1
cttttttttttttttttttttttttttttttttttttttttttttttttttttttttttttttttttttttttttttttttttttttttttggagggaaatcttatcaaaaggggaaaataaaaagggccccatgggcggggacaattttgtttcaagcccaaggcaggaccagtttttttccaacatagggggaaaacaaactatcaagcaattcagggggaaaaaataaaaaaaaaacttccccacgggggggttttgtaaacccaactcaacaaacaggtggagcaaaaaacattacttttattaggaaaatcctggtgggttcaaaaacaggaatctaaattttaaactgttgggcaagcttgaaccactcagtaggggaaaacccctttatggcaaccctttcatatgtatgagccccaaagtagtctcgtggaccttgccccaaattagcgggcaacctttccctttggtaggggccaaaataagcaagactagcaaacctcccgggagggctgatcccaaaattgttagcaggggaaacaactctcctccaggcaaatgggggaacgattatttcctttgaaaactttggacccac

SEQ ID NO: 27914 - DNA, 1954 bp, Glycine max
  Clone ID: PAT_MRT3847_125207C.1
acccaaacacaataataattcattcataaaaatcccactattccattcttaaaaattacataaaaacaaagctattataaattttaatcaaagacctaacttcacaccacagtttaaaataaaaatatatcacattcatgatatcccttttttaaaaatcttattcctcgtttttcataatttattatttatacaacatcccagttcttcttcctctatagtctttagcaaaagagaatttacacgtcttacacgtcacactaaacgacaaaagcaggcttacagaatatagaaaatttagaaacactccgaagtccgaaccaaatccatcaccacctctattatccattccctgcttccgttcccatcgaccaatatctacaaccattacacaacctcgccacgtggcagtcttcagacgagggtcttgcatgtcgaagtctgcgggtcccacatcgctggcacgagatacctccttccattcgcaccatgcgcattgtaactcgccccggttgccttatccacgagaacccgacccggataacccgggtacgacccacttccgaaaacaccagtgcaagccgaaacggcctctaacggcgccgttgggggaccctggaagtaaccgttgttgaaagggttggtaactgtgccagcgagaagcgtggccaagttaataaccattccgtcaaccccggcgtcgccgttaggagaaactaacggcggcgtctggggcccgtaaatcggttggtggaatggccacgcgcattgcgagagagagagaactagtctcgagtttttttttttttttttttttgagcatccatttatttatgttttattaggatgagaaataaaagaaaaaagaaaagctaaagtagctaggtgttcgttttcctcataaacaaaatcatgtgatccaaattaaatagtaaatacaagacaaggattaaattaaatacataaaaaagagggcattaaatagaaagaatgaggctcaataaaacccaacacagttccttttgcccgtagaagaaaagaaagattaggaaatgaagaagtgagagtaaaagaaaaaagataagacgacacattgacaatgaagtattttctggtgatcaagagagagctcccatgcaaatgaagccaagtccaagaacaagtccgaaacccacattcatcccattggcagcattagtatccttaggagaatccgaaggagcagaaccagccttaccaacgctgggaatctcaggagtgctcttagaacccttaggagaaggagccgcagaagaagcacgagtcttggtggttccgaagagttccaacggcaacagaaccttgtcaacctggtacacagccagaggaaacttctccctcagtgggttgttgagctgcgtctgcaccacccctgtggagatgttcacctggttaccgccttggccggtgaagttcagcccccaggtcccttctttctccgtggcctgcgtcctcacggggttgctcacggttaacagatcggagatggtgtagtatttgggagtgacgtggaagagaatgagcttcaccttctggtcgtcgctgagcttgtttagggcaccgggtttcaggctctggaaggcgttgtcggtcggcgcgaagagcgtgaagccttgtgagtttgatttgagctgggactcgatttgagtgagctgctgtgtgtccttcaggagtttcattagggtggtgtattgcccacccttttccaggatcgcggtgaggttcaccgcgcccgacggggacggtgccggggcttgggcttgggcttgggcaatgaggaatgtggtgagggtgaggagaatgagtgtggagggtgtacatgtggaagccatgttaattagagaattattcgatatagtactagttttagattattgtgctcgagccgaattccgagctacgcccgcggcatcgc

SEQ ID NO: 27915 - DNA, 142 bp, Glycine max
  Clone ID: PAT_MRT3847_125208C.1
ggatgttggagggttgctctcgacatcccccattggaaattatgggctctacacatatgcacagaagaccctccctcctagaaaaaagaagcccgcttcgaagaataggatgaaaaaggagagactaaagcaaggggtctcc

SEQ ID NO: 27916 - DNA, 1612 bp, Glycine max
  Clone ID: PAT_MRT3847_125209C.1
caaaaacgggcccatgaatttttctatattttaaaacagcggttccacaagctggattgtttactatttgtataccttatagacaagattttgcttgtaatattaaaaactggatattgtcgcgcagatctactgaggccagtaagaatattatgctgtaactcaatactacaaccagagataactatgaaaagatttgagaaatacaagggaaaaaagaagttggtgtagaatagacaagtcacttatgattattgcaaacttgacttgaaatatggcagcctggtaccttgcaagcttcaccacaagccaaattgtcaagcagcttaatcacacatgtggctggtgaaggatcaagaaccatccatttggatatcagtgccatttggatttgctggatttgcattataggggtttccagccacattcttctgagtctgaccggcaccgaatgtaaactcggttggagcaatatctaggggtgctcgcgcaaagattgaaggagttccagcagtgctgaatgagggaagctgagctggatcattgatctttgggaaaccaaagctaattgaagaggtgctgcaggcaagaaaccaggcaccagagagcttccactatcgatcggtccataaatcctttcctcaaactcctgcagctgctggtacacaccttgagttaattcaacagaaggtctccgttcctttacccactgataactgtgtacaagtctccatcctttggacttcatcaagtatgcaatcacaatagctggagacctactctttcctgacatgcaatgaaccagaacacgctccttatccttctcacattgctcaagaaactgaattgcttcatcaaatggcaaagttttgtcatctggaaggcagtgataggtaaacgagttcttgtagagattttgacaagaagggacagtattgaggatacgagaaatcccctgtcgtcttatcgcagccgagcgtgatgcgttgtcgtagcttcctaggtaaagaaattccggcaggacaacggaaggaaaagcactgacttgtatcgaagttttctccgatccaaccggaatccggtgaccgcaaattgaacacacttccccttcttcgtatttgtgatagtggccacacacgccacaaggattctccctctcccttttcctcataattgaaggataaaaacggtttcccacacacccagatcaagaaagagggttcacgagggattcgaatcaaaaaagggagaaaaatcagatctttttcgaagtggagaaagacccagaacaaaaaatgattcaaaactgagaacgaggcacccagatcaagaaaagtagagaaacggggattggagggggacaagatcagagctttggcaaagggggaaagagggtgtgatgtaaagacgagaagagagggaagggtggaagaaagaaagacaagagagaaagaggaactgtaaggaagtttttatgttattgcaagtttaatgtgataacaatgttatcaactaaggactagtatcatcaagttaggattactcaatcgtttcgtttctactactggattttgatgaaggcattatagagagggatttggatggattggat

SEQ ID NO: 27917 - DNA, 282 bp, Glycine max
  unsure (1)..(282): unsure at all n locations
  Clone ID: PAT_MRT3847_12520C.1
nnnggtangnggngaaagnanggnagnggngagagnanaaanggantggtangngnntgaaaganggnnangagggnnnnggngatgaatnaaanngnnnantggnganngaagaagannagntgaagtgtnnaagggatgngaggatagtggggaaagaggngangannagnggaggtgnggngaaaganngaaanganggaanaangannaaaaaaaanaaagganaaagaannatgtgnatntnnangtgnnnananattgtagggnganngnggaggt

SEQ ID NO: 27918 - DNA, 623 bp, Glycine max
  Clone ID: PAT_MRT3847_125210C.1
ccacgcgtccgctagaatctcccatcataccccacctcgcgacactgcaactttgggctcggtagtccactttcccaccggcctctgccagcagcttcacacctgactccgacttcagtcccgtcacagagaggagcacggtgtggctgtcgtcggagtcgattgacgccattcgagctctgagttttttttttctttttcagatctgagattgatgagaaaatgtgagtcgtcggtgtcgttttcaccgttgccagagttggagtaccacagagcttatcgcgccgcagttccgcaaatctagtcccggagtgttgttttggcaaacatgataaaactaaataaattggaatctaatcaatctatggccacagatagtgaggggaaagtttttccgctttcaccattaatttggttttccattctcagtgtgacattgtaaattaattaaggcaaaaccacaaaagtgatatgttgatcgttgagggaaattgaagccttacttacggtgggaattagttttttttaaaggataaaattgacttttcaacaaccaaattagtgttgcaccggggggacaactaacttgcttttttaacggtagccctacgctggggctttaa

SEQ ID NO: 27919 - DNA, 407 bp, Glycine max
  Clone ID: PAT_MRT3847_125211C.1
caaatggatacatccatctatggcggactggtccaccaagtctagcttcatatgcaaaatgaataggcagatgctccattaaatcaaaaaacccaaggggaaatattttctccaacttgcacagaattaatggaatattttgttccattctactcaagtcatccttcatcaaagttgtagaacacaaatatttaaagagatgaattatttcaataagtagatttaagacatgtggcgaaaataagccaaaaacaataggaagtaagcactccatgaatacatgacaatcatgaattttcatcccatgcacagttcccttatcaacattggcacatatggtcaagttagaagaataaccatttgacattcatagttcttttatccattgacatactaactttgtttgg

SEQ ID NO: 27920 - DNA, 273 bp, Glycine max
  Clone ID: PAT_MRT3847_125212C.1
aaaacattcgctgtggacaatgcttaggcgcggtgcgtggcctcgtgcggtaactcctaaggggcgcccataatgcctacattgcggccgattgcgactaaggcgcgcatcgtgaattcttcgataccaaagggggaagaacgtttttaaaaaaatcctccaacaaacatttggcagatccgggggacagaccatagaggacggtcattacctttccgtggatcccaggagacgggccaaaatgaatggggcctgcgagcagcaaaaactcgg

SEQ ID NO: 27921 - DNA, 358 bp, Glycine max
  Clone ID: PAT_MRT3847_125213C.1
ctgtcgttctttttttgcaggccaaagactatcatttattgacacaaccccaccacaagggggagacccgaaaaagtaacaacagacaaaaagcacgtaaccaccggaaaaacacaccaggagacgaccacagccgacttacaaaaccccccatgcgtagtacaggaggtcctatcgacataaccacaatcccccgaagctcaagccgcagaacagggagagcctagtgaaaaccaggcaccaactcagatggagaacgcaaaaagtatacaccgcggccccacgcacatgcaaactagaacgagccaaccaactgatacacgaagacagcactgacacgagccctggacaatcgggg

SEQ ID NO: 27922 - DNA, 493 bp, Glycine max
  Clone ID: PAT_MRT3847_125214C.1
cccacgcgttcggcgctctttctctctgctcccacaactctcattcccaggtttgtagcttccatcattgtccacgccggtgatggaggtttcatcacgtcctccgatctcttctccatatgagcccgtcggcaccgccgtaatccacggtgttgtttaatcagggaggcactgccacggtggtgcttctcctcttagtcgtcgccacctcctacgtgcctggaattctcccacctacaacatttcatcaacatgactgacctccgtagcagcgaaaaccagatttgacgcgtaaaacacactctccactttcaaatccatatgaaggagaaaaaaccttccaatttcattccctttctttagccccaattaccagagatttctatattggccatggtggtgaatacgcatggggttttgcctagtttcaaggatttaacaactatgtaagcagactaggatttccatattctctttctatatatcttctctc

SEQ ID NO: 27923 - DNA, 533 bp, Glycine max
  unsure (1)..(533): unsure at all n locations
  Clone ID: PAT_MRT3847_125215C.1
ggctcgaggcactctgctggaacctttgtgacatgggtcagatatatctatactatttaccttatttctgcttaatcagtattattgttgttgcaattgttgttcctgctcaatgttatcgtgttctaatttatgttataaacttataatactcttctatgtgtgtgttttggtcataatgtttgtgtgcaatgaatgagttattattgacaaaataaaaatgacatccatgttcgtctgaggctcaaatttcctattatgtcatactgttccttatatgctaattattttttcaacaatatttatcaaagttacatttgacttttctgtgattatgaaaaaagtacacttatcagaatcctgcgatatatcaaattatggtacatatgatcggttggctcaaaacaacatcatccttattttacaaaanaaagtgttaaaaaaatacagtcatgcaggattacattatttttttaaaaaaaattggtgtatatgtacttccnttattgtatgattaaaaaatatcatatcat

SEQ ID NO: 27924 - DNA, 2083 bp, Glycine max
  Clone ID: PAT_MRT3847_125216C.1
tccggtcacagctagctgcgtaggccgacttcggctcgaggttacgctttgttctgatttgttttatttccccacgcgtccgcctgaacctttcatgctcccctgtcttttgtttgtgtttcttcttcttccttttctctctctcacctcggctcgagctccatctctgccttagccaccacagccacactttgttccccaaaaccaaacccgacaaagttaacgcctttccctctgtctcgaaccagaaaccttttcgtgacccttgcatgtgttgcgatgctcatcccagaaataaataatcatgaaagcaagactcaataaagttgattgttggtttatttatgtgattggggttatacgcctggctaagaagagatgcgctcctctaatgctccgtttggcatggcactctgctggaacctttgtgacatgggtcagatatatctatactatttaccttatttctgcttaatcagtattattgttcggtgtccgtacggctgcgagaagacgacagaaggggctaattcccaatttaataaagtagataaatatgcttgaaacggtggtgtgtgggttttagggtttttggcagcaaggatggcgtcgagaccagaggtagttgcgccgcctgagattttctacgacgatgccgaagctcgcaagtacacctcttcttcccgtattgttcaaattcaggcgacgctgtcagagagagctctcgaactacttgctttgcctgatgacagcgttcctaaattactccttgatatcggttgtggatcgggacttagcggtgagacactctccgagaatggacaccattggattgggcttgacatttcagcatcaatgcttaatgttgcggtggagcgagaggttgaggggtgaccttttactttggtgacatgggtcaggggtctaggaattcgctcctggagttattagatggggccatcagtatatctgcggttcagtggttatgcaatgctgatgatatcctctcacaaccctcgattaaaattgaaggccttttttacatctttatacaaatgcttatcaaatggagctagagcagtatttcaagtgtatcctgaaaatatagaccgacgtgaattgattttaaatgctgcaatgcatgctggatttgctggtggtatagtggtggattatccacacagttctaagaagaggaaggagtttcttgttttcacttgtagtcaacgctcggtaaatgtgtccatttacaaaggtaaaaatgaagatagggagagttgctctgatgaggacagtgaagatgaagaaaaacagacagtatgtatatcagacaggcatagaccgcggaagaaacagaagaataataagagtggcaagggaaaggaatggttactaaggaagaaagagcagatgagaagaagaggaaatgttgttcctccaaataccaagtacacgggtcggaaacggaaggatcgcttttgatcgagtcaggcatttgcctcagggtcgtgagtatgaaaagctagtcctatttgttatttgttaattgccgtcaccaattgcatcttgctcgggtcttgaaggctactcatacatgcacgttcctgcagtcaaaggtgtttgatggaagccttgaaggatatgtggtatgttggaatcagttttgttttttcttttcttgaggggaaatcctcagccattggggctatgattttgtacgtgtttttaaaataccgataaatatcatttttgctttagttgtatctatttggccaacttatgcatttaaatgtgaggcgcacaattccagaatacaagtagcttttcaagttatgagtgatgttgttgcaattgttgttcctgctcaatgttatcgtgttctaatttatgttataaacttataatactcttctatgtgtgtgttttggtcataatgtttgtgtgcaatgaatgagttattattgacaaaataaaaatgacatccatgttcgtctgaggctcaaatttcctattatgtcatactggtccttatatgctaattattttttcaacaatatttatcaaagttacatttgactttctt

SEQ ID NO: 27925 - DNA, 327 bp, Glycine max
  unsure (1)..(327): unsure at all n locations
  Clone ID: PAT_MRT3847_125217C.1
gtcgctcgcacgcgtacgtnagctcggaattcggctcgagcttncgaaagantttatccnattgnnatnntaatngcnatgactgggttngactataagaattcaattantggnctngccatggtataccanntnnngngannggncgcatngnatgnatagnnngngnnantntcncccattcgnagngattngtgnatctgcngatctantgcactgncntcgaacatactgatagatttctanancntccggaaacnatgggttcctatgcctagtgcgttcaagcctactatgctggncccgaggaactgngctggaataaan

SEQ ID NO: 27926 - DNA, 369 bp, Glycine max
  Clone ID: PAT_MRT3847_125218C.1
attggcttcttatgaaagtcttgatttttttcatcgctttgggtttgttcttggggtcacccatattacgtgaggctctattgctgttgccctggccatgatcaagatatatagctggagaacatggggaaacgaagcaaagactattgctgtacaaagcattcaagcttagatacttgacaaggtacatcatgattgaggcggcttaatacattcgcctttcaccatacttgccatccttggagtcatcacaaaattctagcttggctggaactctctatgcagtcatttctttctggcatattctctttaagcataatatatttggaaatgcatgaaatattgggtttactcatgggttattactac

SEQ ID NO: 27927 - DNA, 608 bp, Glycine max
  Clone ID: PAT_MRT3847_125219C.1
ttaaaatgctcgcaccaactatgggccttcgtgtgtgtgcttcttttctgccttttaggttcttgtcttcatatgttctcagatatcattaactttattgtatgcatatatgtgaccttgctcctaacgcaagttaaacacacataaacaggcgtatatcactggtacaactatgaacaagacagcatggacctgtctaccatacctcactaaaaaagaggcatcacatactacgatattttcaaaaatacctggctctatataagggacatgactgcaaacaggaaaatgaccccattctcatacgctaaggaatgagcacatatactgacataacttctcgagagatcagaaggaactcttgcaacctcccaaagatgtgtcacagaacaccaaaaggggcaaatacaaactgaagaggaacaatatgatcagtgaccatcccacctgcataatgggataggaagaaaaaaagtgtcatcaaccagacaaagtaccaacgtgggctgagaaagctgcagggcaaggtatgccgcagctgccataacagcagcacatgcgacagcatccagaccacttgttaccctttctcaacaataactcatact

SEQ ID NO: 27928 - DNA, 364 bp, Glycine max
  Clone ID: PAT_MRT3847_12521C.1
taaatttaaatttataataaggaagggaaatagaataaaaggaaacataaaatttaaggggataaaatttaaccttttgttattgcatgcgatgaatacttgtttaaatatgggagagtataattaatgttagtagaaacctataaaaaaatatatacgcagtaaaaagaaaaaaggagtgcattgaaaatgaaggacattgatatttatagtagagtgtttcatatctcaggttgatcaggtgatgcctgccgatgttactccttataattgctgatacttgagaaatttagttaagagatgtaagataaccttaatttatgtagaaaataatgagatgaaaatatgaatacaacctttaacg

SEQ ID NO: 27929 - DNA, 213 bp, Glycine max
  Clone ID: PAT_MRT3847_125220C.1
aaagttcaaaaacacccaagctctaaagagagaattttgctaatagatcacacgccccgaaagctagttgggtcgggcaaactaagattcgtggcaaataaaacttttttgaaaaagcggggttaggaccttggaatgtgtctgaacatgatattgggcctcaaaccagggttggaggaaaaataggggggaaaaagttggtcgggcccaaac

SEQ ID NO: 27930 - DNA, 628 bp, Glycine max
  Clone ID: PAT_MRT3847_125221C.1
gaaaaagtccaagaactgagtgtgtatgagatcaacgagcgtgaccgtggaagccccgtttatcttcgattgagctataaaagtgtcaattcccttggtgatttagtcccctttagcaacaaggtaactttcttccgttcttggacaaaatttagatataatttcataagtatttctagtattgatctccaatgaatattggaaatttaactagataatctatattgaactttaacgcaaagtttcattatgcaaattaataaagtgtaacttcaattctaattagataacaacaataaaatcctcagaaaaactgtacatatgttttatccttcaatgttttgctgcatttgaacgcatttacttttgttatggtaattttattttaaaattataatattctgaattttacgtttatgttgaattatttgttgttttgtattatgttcaaaccttaactttattagctgtaaagggtacatatttgctgttgttaaattgttatgattcgaatgatgtagttgcaaatgttcaattttgcatgtaattgttggtttgatactatgcagttgtacactggagatttgcaaaagcgcattgggataacatctggtatctgtattttgat

SEQ ID NO: 27931 - DNA, 263 bp, Glycine max
  unsure (1)..(263): unsure at all n locations
  Clone ID: PAT_MRT3847_125222C.1
ggcaaataattgcattcacgtctaaaattgataatctgcacaaaagacctgctttcctttacagataacagnagaagatctggagctccactgtgaaaaaattagcgaagaacatgcacaaagccttgtaatggtagagaatgaaaagaatgacaaatcaagcagaactatggatcttaagagatcactggaagagcgagaagattcatatcagaagttgaatgaagaatataaacaaattgatagtttgtttaaggaatgca

SEQ ID NO: 27932 - DNA, 352 bp, Glycine max
  Clone ID: PAT_MRT3847_125223C.1
tccgggctggatttccggggtggaccaaggcgtccgtttcctttttcaacatgcaaaacttcagggttcggagtcttttctttttggttacgctttgaaaatgccttttttttgttaattccaacgatgacatttttttcttaccgggtaaactccttgacgttgactaagggggtggaactgttaccgaccaaaactttaactccaagcgggggatgggattcctgaccaacccgggggacggtgcttttggcgggttaagaaacgcaaccggggttttttacatggccgcctcttacgttaaattcggggagtccgggggggctagagttattcccctaatttacattgg

SEQ ID NO: 27933 - DNA, 385 bp, Glycine max
  unsure (1)..(385): unsure at all n locations
  Clone ID: PAT_MRT3847_125224C.1
aaggggagcncngangccaaagagagccagagnagngacgngaaggacgaggnangaggagnnaagnganacacccccacnaatagaaacgagganncagacagangangacanagngaccgaggnaaaaaanaccaagnnaccccncaccccnggncaanaaaaaacaaacggggagnggggggagagagacaaangcgaggcacacangnannacnannaacnncaacnngnacaacagngggnaannaagaannnngaccnngggnngagaccccaanaaanncccccnnaaannccaaaaaaaaaaaaaaaaaagaaaaaaaaaaaaaaaaaaaaaaaaaaaaaaaaaaaaaaaaaaaaaaaaaaaaaaaaaggggcggcc

SEQ ID NO: 27934 - DNA, 1770 bp, Glycine max
  Clone ID: PAT_MRT3847_125225C.1
cgtacggctgcgagaagacgacagaaggggagagagtcctcgatcagaaaaacgaagaagggttctttcttccctgcgaagattcagagtgcaaagtgtgagagaaagaaaatgccaaagtctcaatttcgaaccccatttcttgtttctttttctcttttgttattcatcttcaacctcaccccttcatacgcactctatggagcatccacacccgtgcttcaactcactccctctaacttcaagtccaaggttctgaattcaaatggagttgttcttgttgaattctttgctccatggtgtggacactgtcaggctctgactcctatatgggagaaggcagctactgtgttgaagggtgttgttactgtggcagcaattgatgctgatgctcacccgtctttggctcaggaatatggaattagaggatttccaactataaaagtgtttgcacctggaaagccgcctgttgattaccaaggagcaagagatgtcaaaccaattgctgaatttgcacttcaacaggtaaaggctcttttgaaggatcggttaagtggaaaagcaacaggaggatctagtgaaaagacagaaaccagttcttcagtagaattaaactctggcaactttgatgaattggtgatcaaaagcaaagaactctggattgtggaatttttcgcaccttggtgtggacattgtaaaaaattagctccagagtggaagaaagcatccaataatttgaaagggaaggttaaactgggccatgttgactgtgatgctgaaaagtctctaatgagcaggttcaaagttcaaggattccctacaatcttggtatttggtgctgataaagatagtcctattccttatgaaggcgcaagaactgcctcggctattgaatcatttgcattagagcagctggaaacaaacattgctcctcccgaagtgacagagctatacagtccagatgttttggaagagaaatgtggttctgctgcaatctgttttgttgccttccttcctgacattttggattccaaggctgagggaagaaacagatatcttcagcagttattatcagttgcagagaagtttaaaaggagtccatacagttacgtctgggtagctgcagggaagcagccagatcttgagaagaatgtgggtgttggagggtatggttatccagctttagtggcccttaaccttaagaaagctgtttatgctcctctcaagagtgcttttgaacttgaccaaattatagaatttgtgaaagaagctggacgtggaggcaaagggaatttgcccattgaaggaactccaacaattgtaaagacagaaccatgggatggaaaagatggagaaataattgaggaggatgagttttctcttgaagaactaatgggggaagatgcttcaagcaaggatgagctatgatcaatttataagaaatttataccaaattaaagtttcaaccaccgatttttacgttattggcaacttgtttctcatgatgattgtgatcactgttctgtttttccatgttccaatttaaaaaccagtctagtgatgagtgatcttctgaggattttgatattgtcatttagtgggtacgtactgatatatctcaggaaaatgttagcatgttttggtattttcttttccctctcaatgagcattcagccaacaggttcaaccttcttaacaaaggaattattttttaccttttgtataaatcattagttattaataagtagggtgatgatgccattgtgacct

SEQ ID NO: 27935 - DNA, 389 bp, Glycine max
  Clone ID: PAT_MRT3847_125226C.1
gaaaagggttttgaattttaattacaatcctccccctgacctgagtaaaggggaagccgcttgacttgatctattccggggcaaaaaaaatttgggaggtcatacccctacttaaattattatgctagcaaaaaccccctttaactgaacatggtcataggaaggaacaattgaagttgaacaaatccaaaaaatcaaagcggggggaacaaaacaaactaataaggaaaaggtttaaaaaaaaataaaatgatttcttggggaaccccccaccaaaatgagggtcttgaaaaattgagggcttttgacaaaaacaatgcaaccaatcttgccgggcatggggggaccaacaaaagggaccgctttgagggccatttttttcaacaaag

SEQ ID NO: 27936 - DNA, 257 bp, Glycine max
  Clone ID: PAT_MRT3847_125227C.1
gaagaaagcagataaacagaaagttgcagaaaatagaggtataaaattcaccaaagactttgagcaatgtcgagctcagacacagagaaagagaaagccctgaggttgaagatgacagggaggaaccaccggaccgggagagagtacagaaagaatacgagcatggtctagcttttaatatgctttaaaaacccattgacccgacccgacccgcaaagttcgcaactgagtggttatatactgcccagaaactcaca

SEQ ID NO: 27937 - DNA, 269 bp, Glycine max
  Clone ID: PAT_MRT3847_125228C.1
gtcatacatacagggggtggcgtttcattcacgtacggactaacataaaaaaccatttttatcacatcaaccgcacgcgggggccgacccggaaagccgggcccgagccggcaagcgaaccacccttcccgagagggggccgaaatccagctgggcgcaaggaaagacatggctgctgcctgagggagaaagatattcgctgacaaaaacagacaacaaaccagccggaaacataaaaaaaaaagccgggggtgccgagggagagacct

SEQ ID NO: 27938 - DNA, 243 bp, Glycine max
  Clone ID: PAT_MRT3847_125229C.1
cttatgcttgtacaggaaagatgggcatcgagccagatcttacggtgtctatctgttgttctgtgaaccctcattggacattgacgacgaccagtaataagtactagccatgcctgctcagtattgttttcaccactctcttccgaatcggaccgttgaaacgaatagattctgttccgaaaccaggcgaattgaggggcggacaacgaacgaagcgcacgttgtatatttttttggataatg

SEQ ID NO: 27939 - DNA, 250 bp, Glycine max
  Clone ID: PAT_MRT3847_12522C.1
tctgaggttcattctgaagccaagggacaagcctagttgtcacgtttgtatcgtcccatactccatggaatggtctggttttgccaatagattactgagtcagggcgatgatattctgtgctgagattatgctagttttgatggtctgattaccaagcacgctatgagcacgctggcagttatgataaacagtctacgtcgtggtgatgaacaattgctgcgcgacaggacgcacctgctgttcgcttgt

SEQ ID NO: 27940 - DNA, 167 bp, Glycine max
  Clone ID: PAT_MRT3847_125230C.1
acggctgcgagaagacgacagaagggggagattgggaagcattggtggctagctaagcgaactaagagccagactcttcagcagtttgtattagcttagcttcttcttctgcctatgctttctccacctccagaaccaccatgtatgctgccactgcctccaacact

SEQ ID NO: 27941 - DNA, 470 bp, Glycine max
  Clone ID: PAT_MRT3847_125231C.1
gtacaatccaatgttcgtggtttcacaactcggcaaagattcctgcatagaaaagaacacaaagctgccacttctattcaggtctattggaggatgtgcaaggctcggtctgccttcctaaaacatcaaaattcaattgtagcaatacaatgcctttggcggtgtaaacaagcaaaaagagagcttcgcagacttaaacaagaggctaatgaagctggagccttgcgtttagctaagaataaacttgagaaacaattggaagagcttacatggcgtttgcatcttgagaagaaaataaggtggattatgacttatgagtgcacctggttatttctgtgtcatgacttttttggtttctaatgaagaggctaagcatgttgagattttcaagctacagaagatggtagatgctctgaatcttgaattagatgcagctaaactagcaacaattaatgagtgcaacaaaaatg

SEQ ID NO: 27942 - DNA, 545 bp, Glycine max
  Clone ID: PAT_MRT3847_125232C.1
aggaatttgagtaatttgaacaaagtcataagtttaaaccttatctattcattaattctcgttaacaaaatgtagtttttgttacttttttaaataccagtaatattccacttataacttaattgcctttatttttttcacataaagccatctcttactaaaaatagaataccgatgaaataaacgagaaatttgaaagagacctagcaaaattaaatctaagtccaatattaaaaacagaattctaccaagtgagaacaaattgttttgaaaaaaattacattagaattcatgttttagcattgaaaaatacaaatctcaatgataaaccaaagagcccgtaattagttagttagtctaatgtttacgccaccaaatttttagttgataacgtttaaaagtaatagatgatctctttcaaagaaatttctgtccatattattcaggtttcaaattttgtttctaagggaatttgagatctggttaagaataagacagggtgaataagttcatattaattgttaagatatatggaacatgcaagt

SEQ ID NO: 27943 - DNA, 446 bp, Glycine max
  Clone ID: PAT_MRT3847_125233C.1
atcgtgaaaaaccaggtctcatagaatatttaaccataaaaaaccgaaagtaacacggtcctgtaacatttttactgttgaacagaagcacgatagatcagcaaaagaaaagacactaatcaaagaaatgtcatataaaactgaatcatagccaaattacttaactaatttgaatcacagacaatcaaggcaattgttaccaaccaaaaaaatgaaaacaatgcaacttaaacacatgttaaggacactttttttatacatgcaccataaaaaatgagttactgacaaaaaacatacttttaaggactctccttgtatctaaggatataaaccagggagatcacaataatgcataccatacagcctgaatatactatgatatgcacccacatctatctatatagatagacataacaataaacccgactccgtattacgagataaat

SEQ ID NO: 27944 - DNA, 468 bp, Glycine max
  unsure (1)..(468): unsure at all n locations
  Clone ID: PAT_MRT3847_125234C.1
gcggaaactctgtaatgagatcgaaataacataacacagaacgcaaaaccctaatctctgcaatgcctgtgcgtggaaaggttcgagaatggtttcgctggaggaatctcgctcgaattcgagccgtttccccttggcgaggagttaccagtaccactcctcggtttcgtccaaaacgcatcgtcaaattggggggtccatgcgcatnacatgcntcaatttcttccaagacgacaacagcagcatctacttcaagttcttagacaagtgattacattgctacttgggaagttggtaattatacaatgtaattggttgttgtatatatagtgtttttgatggtttgtacagtgtggttaagatagttggaattggaaccgtgtttattgaagttagaagaagctagcgatctatagactgaccctttagatgtatgaatatagctaggtttgggagtttgctttacct

SEQ ID NO: 27945 - DNA, 2174 bp, Glycine max
  Clone ID: PAT_MRT3847_125235C.1
gcaagcgagattcatcggagttatactcctatgcctctctgttattattattcaatcacataaaacctggcgcagacgccaaacaccttgctttcctatgcgtctctaaactggagaatgaataacattacaaaacgctacaccctaatcttctgcaattcgtgtgcgtggaaaggttcgagaatggtttcgctggaggaatctcgctctaattcgagccgtttccccttggcgaggagttaccagtaccactcctcggtttcgtccaaaacgcagcgtcacatcggaaggtccatgcgcacgatacgctccagtttcttccaggacgacaacagcagcagctgctgctccctcacggagcaatccacgtgtctctcggagaacctccccgactccgtagtggacctcggtgtgggagagaccacgcgctgacgccgcttttcaagcacttccttttcaggtgagaaaaagagtctaggttaggcgccggcgcgctgaagccgctggtggagctagtggcggagcaggggagcggcatggcggagaaggccatggtggtgctgaatagcctggcggggattcaggaagggaaaaatgcgattgttgaagaaggtggaattgctgctcttgtggaagctattgaggatgggtctgtgaaagggaaggaatttgcggttttgacacttcttcagctctgtgttgatagtgtcagaaacagagggtttcttgttagggagggtgggattcctcctctcgttgctctttctcaaactgggagtgttcgagctaagcacaaggctgaaacacttcttcgatatttgagggaatcaagacaagaggcagcatctacttcaagttcttagacaagtgattacattgctacttgggaagttggtaattatacaatgtaattggttgttgtatatatagtgtttttgatggtttgtacactgtggttaagatagtaaaaaccggaactgtatcttttaagcagaacgcggcctgtgcgctcttaagccttgcattggtggaagagaacaagggctcgatcggggcttccggtgcgataccgccgctggtttctttgcttctgaacggttcgagcagagggaagaaggacgcgctgacgacgctttataagctgtgttctgttaggcagaacaaggagagagcggtgagtgccggcgcagtgaagccgctggtggagctcgtggcggaacaggggaacggcatggcggagaaggccatggtggtgctgaacagcctggcggggattcaggaagggaaggacgcgattgtggaagaaggcggaattgctgctcttgtggaagctattgaggatgggtctgtgaaagggaaggaattcgcggttttgacccttcttcagctctgtgttgatagtgtcataaacagagggtttcttgttagagagggtgggattcctcctctcgttgctctttctcagactgggagtgctcgagctaagcacaaggctgaaacgcttcttcgatatttgagggaaccaagacaagaggcagcatctacttcaagttcttagataagtgattacattgctacttgggaagttggtaattatacaatgtaattggttgttgtgtatatagtgtttttgatggtttgtacagtgtggctaagatagttggaatgggaaccgtgtttatcgaagttagatgaagctagcgatctatagactgaccctttagatgtatgaatatagctaggtttgggagtttgctttcccttgttttgatttgctggtgtttcctggagttacatggttgtctttttaagggttgattaggttcccttttgtttaggtgaccctagttttgtggaaagggtttctgattgtattattatatggtaattaatttgcgctcgtaatgaaagtacggagcttgtactgcaaatccaggaatgtttgtggccataatttctctagtcagcacagcttgagtttcgtttatttaatttgatactgtgtattggacagtctagatcaactggagtgtggtgtttttgacgattcaactgttactttgaaaacgtatacatattattcaattccttatttcgtgctacttttccatgaaatattagaatatgcttgccttgagagttgagaaataaaaatatggaatatgttcttgctg

SEQ ID NO: 27946 - DNA, 2077 bp, Glycine max
  Clone ID: PAT_MRT3847_125236C.1
gtttttactaagagacgaaaacggattcttctgtttgaaagtgtgactgcgtgaaagggttcgtctgtttcttcctccaaagcctttcatggagttcgctgcactctctaacgctacccaacttgggggcttcaaccccctcagaaccaaccttcaaagttctcttccttttcggcatgcttctttcccttcttcctctcgcagagattgctcatgcaaagcccttctcagcacccgcacacccacctctacccacaacatgtttggaccccattccaccgattttgagctctctgctttgacggctctgtccccattggatggtcgttattggagcaaagttaaggaacttgctccttttttgagtgaatatggcttaatctactttcgggttcttgttgagataaaatggttgctgcagctgtctgtgattcctgaaattgttgaggttcccagtttcagtgacggtgctaaatctttcttacaaggtctgattgatgactttagtgttgaggatgcctcggaggttaaaaacattgagagggtcacgaatcatgatgtgaaagcggtggagtacttcttgaaacagaagtgtcaatccaatgctgaagtggctaaggtgcttgagtttttccactttgcttgcacatctgaggatataaataatcttgcccatgccttgatgctgaaggaaacaatgaattctatcatgtttcctgtcatggataaaataatcaaagctttgtgtgatgtggctaaagataatgcacatgttcctatgctttcccgcactcatggacagccagcttcaccaactactttgggaaaggaaatggcgatctttgctgcaagattaagcagagaaaggaaggatctgtctcaggttgagatagtggggaaatttgctggtgcggttggaaattacaatgcacatattgttgcatatcctgatgttaactggcctcacattgcagaacagtttgtacactctcttggattaagttttaatccttatgttgctcagattgaaactcatgactacatggcaaagctttttcatttgctcatccagttcaataatatattaatcgattttgatagagatgtgtggggctatatatctttgggttactttaagcagaccactaaggctggggagattgggtcatcaactatgcctcacaaagtgaatcctattgattttgagaacagcgaaggtaatctaggtgtagctaatggaggtctgtctcatctaagcatgaagttgccgatgtcaagatggcagagggacttgactgattcaactgtcttaaggaacatgggtataggtataggtcattctcttcttgcctacaaaagcacacttcaaggaatagggaagcttcaggttaatgaagctcgcttgagtgaagacttgaaccagtgctgggaggtgcttgctgaaccaattcagactgttatgcgaagatatggtgttcctgagccttatgagaagttaaaagaactaaccagaggaagagcagttaccaaagagagcataagagatttcattaaaggcctagatattccagaagaagcaaagagtaatatgttgaagttaacacctgatacttatgttggagcagctgttgaattggccagaacagtggaaaatgtggtgaatactgtgattggaataaagatctaggaaacaaacaaatggttgaaacagtttgctcgagatattcattagttgatgatactattggcaaggcaattttgcatcctcgccaccatttaccaaatggctattagttgatatattaacttttaaataagatgttccattttgggaaaaagggagaaaagacatgattttccctgattataaaaccattttgatatagaatggtgttaaggattttgtaacatagggaacttgtactgtacgagtttaaagtgccagacctgaataataaaataggggtctgatgaagcataaaggatgtgtcaaatttaaacaggcatttgaaaaaaatttttgaaccttcttttccgtttaataaaaaaaaaaaaaaaaaaaaaaaaaaacaccccc

SEQ ID NO: 27947 - DNA, 297 bp, Glycine max
  Clone ID: PAT_MRT3847_125237C.1
ttaaacatctctttcctctgtctccgcctcctctaacaaagttaactctgccatccagatcgccatgacccgcttatttccgagggcacaaggcccaacccatggacgatgcctattacccagtgagccatggatgacactgagttggacgttgcgttcgggttctcgtctgagttttccgggactaagagtagcgacgatgaagacttcttcaccgagttgactcgccggtcgagtcacaccgttcccatatgcaacaatgacaaagttgaggtaatgataaccaaaaaaacacat

SEQ ID NO: 27948 - DNA, 566 bp, Glycine max
  Clone ID: PAT_MRT3847_125238C.1
ttttgtatattatcctttgtttgaaattatatcaaatataaaaacgaggtcttggattaatgaagaatattttaaagataatttagtaaaaaaatattttaaaaatatattcattaaataaaaaataattgaattttacttatatttaagataaaaaaataaaatatttttattacttatatttaagaccagaaagaataagagtattaatctaacctccgttaaaaaaatgctgggctaaacttttaaaaaaaaatgagactcgttttcaaggtaaggcaaaccatgagaatttgtatggatattatatgtttaaaataaagaagaagatttcagttttgacgactatggcgaggctcaacaaaagtaactatcctcccaaaaacaaggacctaaaacacttaataaaacttgatcccccaaataatatattagcagaccaaataatgaagaatatatgacccaaaagagaatgtttgaagaatgaccgtagtagcattcctcttaattaaattcactctactaatcacattttcttataattatgattatgatggatggatcac

SEQ ID NO: 27949 - DNA, 363 bp, Glycine max
  unsure (1)..(363): unsure at all n locations
  Clone ID: PAT_MRT3847_125239C.1
cgtcaatggcagttattgttttctgatgatcccccaaagctcgggtcccttgccataattgctggctcctctcccactctactcgtcctccaaaccctaatttgaacctcacccccaaaattcagtgtctcagctttctttttttctttttggcttttgaaattttgagttgctccctgccatgggcgcgccggagaaatcgcagaccaacaccaatccgatgcagcgtgtcaaggtctaccgtatgaatgatgacgggaaatgggatgacaagggcactgggcatgtcactgntgattatttggagcgattggaagagctgggtttatttgtttttgatgaagaagacaatgaaaacatact

SEQ ID NO: 27950 - DNA, 270 bp, Glycine max
  Clone ID: PAT_MRT3847_12523C.1
acgcgtcaggtatagtgtcattattcttcgattctgttcgacctagatttactcgtaattggtgttttcacattcaaggataatatctacatccccgtcgctcatgctactcgttagcatgtctctacttacatctgcctacaatgtcggcctcattgctcttgaggctcttaagagtgttgcagtcatatatcgaaatggtggcctcttaacgatcaatcagatcactttccttgatgatggcgaaacgagctttgtgctacctgctct

SEQ ID NO: 27951 - DNA, 356 bp, Glycine max
  unsure (1)..(356): unsure at all n locations
  Clone ID: PAT_MRT3847_125240C.1
tnnnnnannnnnttttttttttttttttggagtcatatatctttcaatacatattgtgtgatgcatcatcatcaaatcaacattgcatatatagggaacacacattccagtctaactagccgattcttacttttttttatcaattttcaccaattctctttttcaaaaatcaaaaccaatttaggccttggtttgacccctaattcaatgaacctgggattaaataatcatatatctttgatctcttccttaccctgaagcttgcaggttttttcctttccttttaggcataaaggctggggggattggacttcccagccccatgggggcttggaaggtttttttccattggccca

SEQ ID NO: 27952 - DNA, 530 bp, Glycine max
  unsure (1)..(530): unsure at all n locations
  Clone ID: PAT_MRT3847_125241C.1
cgnacccaaaccataggaaaaaatcctcttttattttattcagggaaatccattcattccaccggtttttaggttggccttcccccattaaaaaataggggggggagacccccaaaaggctaaagctaccccttaaccaaatttggtaacacccggttctttaaaaaaaaaattattttcctcattatccccagcaccaaaaaaagaaggaaaaagaggggctaaactcaaaagcaggcatgggggcctttaaacctttctaaaaatcaaaacggaggagggcaaacatttatcaaactacatatctccaagggctcaacaaaaaaaaagatattcgcaaacccacttcacctaaaaaaaaaaccagatttttacccaccccataatcaatcttcatcatcaaaaacctgggttcccaaacctttgaccccctcctgggggatttcgacgacggtaacaggggaaaagagctcttcctttgcatcctaatgggcgttcctctggcgagcaaggcgaaccctaatcctcct

SEQ ID NO: 27953 - DNA, 239 bp, Glycine max
  Clone ID: PAT_MRT3847_125242C.1
ttgtacttagtggtgctattgattgtgcttcaactggtggatatggctgccctgggagcactactctacatcttagcagatagagggggaactatagacagcaaacccgaactggttgaatcggggtgactgtagatttcaacgcaaaaactgtcgagggctaccataaaaggctgcttttaacacaaacaaggatgctgtgtaataacattaaagactacatcagctaaacatattgt

SEQ ID NO: 27954 - DNA, 366 bp, Glycine max
  Clone ID: PAT_MRT3847_125243C.1
atcagaataattatgataaaattttgggatctttatttggatcaatgttaaatgcttctggtctattcctcattgtgatcaatatagagatttaccatctatattacaatttcagcgattcttccttcctgtaatgtaaattacatttctactgctgcgtgaggagctcgggattctcaattgacagctgtcactccttgcaaaatgttgcatcggtcgctacgcacaaggctctgggatctgcaccaatctttactttgactagtgattcacggaacacatttgctttgtcagccaaccgcggaaatttctgtattctacctgcgggactgatggccactttttgccggatgctaaggggggaac

SEQ ID NO: 27955 - DNA, 422 bp, Glycine max
  unsure (1)..(422): unsure at all n locations
  Clone ID: PAT_MRT3847_125244C.1
aggctaanatgcctctggggaaaccncccttttttttttttttttttttttttttttttttttttttttttttttttttttttttttttttttttttaacttggggaacaaaaccttaaaaaccgccggcccggctgcgagtcctaatagtcccgggggagccgaataatttgggtgggaaaaaaaccactaaacttagaactcgctggccgaagtttaaaccttcagttttttgcaactttctcgggagctccgggggtaaacttcggggtggggggtaatttgccggggtaagggggtttttaacacattcggggttcgcccgcgggtcgagcccctacagtagctttagcttcttaaggagggaaaaaaaacggggggtaaaaattaaaaactcgccgcctaatcttcctccaaatccc

SEQ ID NO: 27956 - DNA, 1040 bp, Glycine max
  Clone ID: PAT_MRT3847_125245C.1
atctcccagagagataagttccttagaaatctaatatttcagatcaatcccttcaatttaaagaaacctaattaatcatcaatcatgcagacctcacttcttcgtgagctagttgttggaactccagtcatctcagcaacatatgatcggcctcagaagtcagttaacagatacttacctggtcctgccactcaatgtcaatattcaaccacaacatcaaagcaaatgagattgaggacaaatatatcagaaactgttaagagaaagttaagcttaggggctcgcattctttaaagttgaagaaggagagaggctgctgaaagtttcccagtgttatctgtccactacatccggacccggtcctctagcaggtttcctcttcatctccactgacaaggttgccttctgcagcgagagatcaatgaaagtctttacttgaaaaggccatatgttgaggatccgttataaggttgccattccactgaacaagatcaagtgtgtgaaccaaagccaaaatgttcaaaagccaacacagaagtacatagaaattgtcacggaggacaacttcgatttctggtttatgggggtcttaaaatatcagaaaactttcaaatatcttgagcaggcagtttctcaagcttagctgggttgcaaaatccaccattcaaacttgaatattcatgatgtcaggacaaacacaaagatccaaaagatgataaaaaaaaaaactaaaattttggcagctctcatgaagacgttgagcttcattgtctctgataaaagggatatttcacttcattgtatatatatacatcctaccgggcaccacatttgacctgtgataatagcgaatggatgtggatcatatcagttgagttgcagacttggctgccatcatatctcgttgtgaatgaaagagttcactatttggtgcatcatttgttgcagaatccaaactatctctattatattactgttggaggaaaactgtaagcttctcaaatgtacatgtttgaggctcaattacacattgattcatt

SEQ ID NO: 27957 - DNA, 1280 bp, Glycine max
  Clone ID: PAT_MRT3847_125246C.1
aattcggctcgagcgaacgtggttgatgatctaaggttgagtcatcccaccaaagtatcaagattcacttctgctgcggataaaaaaaaaaaagggattcacttcctagttttcagccctttaaatacctctttgcaatacaaggaactcatcaacccaagttagcataacttccttaacaacctagtatttcagaccattcttcttgatcagaatccttattaatcatcaatcatgcagacttcacttcttcaaattgttggaactccagtaatctcagcaacatatgatcagcttcaaaagtcagttaacagatacttacctggtcctgccactcaatgtcaatattcaaccacaacatcaaagcaaatgaggctgaggacaaatatatctgaaactgttaagagaaagataagtttaggggctcgcattcttcgagttggtggagtggaaaaagtgttcaagcagttttttagcatggaagaaggggagaggctgttgaaagtttcccaatgttatctttccaccacatctggtcctctagcaggtttcctcttcatctccactgacaaggttgccttctgcagtgagagatcaatgaaagtctttactcggaaaggtcatatgttgaggattcgttacaaggttgctattccactaaagaagatcaagtgtgttaaccaaagtgctaatgctcagaagccgacacagaaatacatagagattgtcactgaggacaactttgatttctggtttatgggtgtcttaaaatatcagaaaactttcaaatatcttgagcaggcagtttctcaagcatagtagagatacttgagtagcaaaatccaccattcaaacttgaagattcatgttgtcaggacaaacacaaagatacaaaagacgataaaaaaaaaactaaaatttggcggctctcatgaagatgttgagctcatcgtctctgataaaagggatttcacttcattgtatatatatacatcctaccggacaccacatttgacctgtgataatagcgaatggatgtggatcatatcagttgaattgcagacttggctgtcatcatatctcgttgtgaaagaaagagttcactatttggagatcatttgttgcagaatccaaactatatgtgcatcatttgttgcagaatccaaactatctctattatattactgttggaggaaaactgtaagcttctcaaatgtacatgttagaggctcaattacacattgattcattatgtaaatgttttcagaacctgaatttct

SEQ ID NO: 27958 - DNA, 733 bp, Glycine max
  Clone ID: PAT_MRT3847_125247C.1
ggctcgagggcttggttagtcaagaaccagcactatttgcaacaacaatagctggaaatattttatttggaaaagaagatgcagacatggataaagtcatacaagctgccatggctgcaaatgctcattctttcattcaaggattacctgatggttatcaaactcaggttggagaaggtggcacccaactttcagggggccaaaagcaaagaattgccatagcaagagcagtgctaagaaacccaaaagtattgcttttagatgaggcaacaagtgctctagatgctgaatcggagctcattgtccaacaggcattggaaaaaataatgtcaaacagaacaacaatagttgttgctcatagattatccaccatacgcgatgtagatacaattgttgtgttgaagaacggccaggtggttgaaagtgggactcatttggaattgatgtccaacaacggggagtatgtgaatctggtgagtttgcaggcatcacaaagcctcacaaactctagatcaatatctcgctccgaaagttcaagaaattctagttttagagaaccttcagacaacctgaccttagaggagccgttgaagttggatacagcagcagaactgtaatcaagagatcaacacttgccatcaaagactacttccactccatcaattttgcatttactgaaactgaatgctccagagtggccctatgcaatacttgggtcagtggtgcaatattg

SEQ ID NO: 27959 - DNA, 172 bp, Glycine max
  Clone ID: PAT_MRT3847_125248C.1
agaaatatcactatgtaagtactgattgggtaacgaaagtaagagaaaaagggagttcacagtggacaccattgctcactcagggttaggatttttcttcattgctgttgagaaaagtttcttcctttcttgctcttctgatcattacgttcattcatcctttgggctagtt

SEQ ID NO: 27960 - DNA, 204 bp, Glycine max
  Clone ID: PAT_MRT3847_125249C.1
attgtgacatcttttgattctcaaatttgggcacaccttcaatcaaaatggcgcagaacctagccaggacccaaaaaccattatcaaaaaccttatgcaaaactattatgccaaaacctcttaaacaaaattgttttcccctaacttgtccgtcacctcataccgcttccgcccaaagtagaaaacaaacaagtatcgccccca

SEQ ID NO: 27961 - DNA, 335 bp, Glycine max
  Clone ID: PAT_MRT3847_12524C.1
cgacccaagcgtacggggtaatgttctgcctgtcactggttcttgtctcagtcaccattgcacattcttcgatgcatattctcttacgcactctctctcgatctcacgctttctccttctgtctccattgatcgatttcaaccacgctccacttcatcagctgtgctccgccgttctcctcggtgttactccgcatcctttggtcctacactcttagcttccgaaaacgaatccatcatgcagtttgtgatttttggggctgtttatagctctgttgcaaaacatgaacaagtatgctctaccacagtaggtgagcattcagacgtctgttgcac

SEQ ID NO: 27962 - DNA, 394 bp, Glycine max
  Clone ID: PAT_MRT3847_125250C.1
gatattttgcacgcaaagcttcagcatacaattggaattcgattacattctgacttacatgttccttgcatggctttcatcaaggaaccctgcgaagcatttgtaacaggattgatttcacacagacttatttacacacaccaaatgctggatatcgacgtctacacctgtacacaaaataaaccgctcttcacgtagacaaaacctaacagaacctatcattatggaagaagagccctgttccaatccctaaggcatttcttaagtggatcagtgatcttccctcggcacaatgcaatgaacactacgtcacactcttgacccagtgagatgacccgtgcaccagttagcaatgctttgtccaactgctcttgtacatacttgtacccggggt

SEQ ID NO: 27963 - DNA, 400 bp, Glycine max
  Clone ID: PAT_MRT3847_125251C.1
ttccgactaatcggactttccgatcgcgccagtgcatatatgaatgaactgactctaggctatcatctcacaacgtaacagaatagaaatccatcttgaaagaatctcataaggatcgcgcaacaactatacaaatggtttttgtgccttatctattgaaaatcttgcagcatagctggggtatggatttttttgcctggcgctttatacaagatagctatgtattgtatgagtatgcattctgttaacataattaaatttttgccgattctgattcgcatttttataatttaatatggatatcaatatagcatgtatgttcagatttgattgctggatgttgacatagatgtttgcttcgttcttgaatactatgaactaatcatctgctaacaaactc

SEQ ID NO: 27964 - DNA, 823 bp, Glycine max
  Clone ID: PAT_MRT3847_125252C.1
ttgaaaatcttgtgtcaatgaagcagtgaagccacgttgacattctcatggagtccagagtcagttcttttcttccatgagaatcaaatcctcctgtaaaactactacattacaaggctcaagaggttttacattgcccatctataatcacagcgttgtgtatgcataacatcgtggcatttattatatacgaaataactaatacaaggtgccatgatagcctttttctgttttcagctttctcttcaaatgttgtgaatgcttacgccacttttatattattcaccaaacattgacgtcaactagcacgatttgttgtgactagttaagcacaaaatggtcagattatagaaggcaacaaacatcacagaactacttagttttagacaagccaagcttagcgaaagtaattgcgattggaacatagatatatttataaatcttatgttgaattgcatacaagaaaacagacggaatttgattcttgtgattaaccctgcttccctagaacacagtcgtaaatccaggtgagcagtttattttcttcacaatgtcattggcaaaacaacgatgttaattggagggagaggcttgctcgacaagcttcttgtcccttcgttccatggccacgtcccacatatcgttcccgatgtgcttaggtctgccatgcgcggatttgtgaatgtaatactgagcgtttcccatgacgcagagcattcccgctatgattcccagcggcagcaccgcttccatccatctcaagttcatcttcccttcttcttcttccaactctctctctctctcgcttctcttcactcttttc

SEQ ID NO: 27965 - DNA, 176 bp, Glycine max
  Clone ID: PAT_MRT3847_125253C.1
gcatcataagattaaaatttggatgtagaacctcagaataggggccaaccctattcaacaaaaaagtttattaacctttcggcattcaaaaagtcacatgtggtttataaaaagcctatttatttttacaaaaaattaacccccaaaattaatcctaactccctaaaaaatctttt

SEQ ID NO: 27966 - DNA, 508 bp, Glycine max
  unsure (1)..(508): unsure at all n locations
  Clone ID: PAT_MRT3847_125254C.1
aatgccccatgatggaaacattcaccgagaatcgcacaacagctccaaagttacaaaatatatgggcttttgaaggagaaaaggaggggagatggcagtgggaaggtgacttgaatgccaccatacaaaaagattttaaaaataagcttttggagtctgcacgaagtgaatcatatcttcggctcagaaatagcccagtacaaaagatatggcatggctcactgtccatcccagactcgtgcttcagtaacttgggcaccttgattgttgacggctgccaatttttatcagatgcagtgctacccttcaatttacttcctttattacctaaattgaaaaatttgaaagttcaaaactgtgaatatgtgaaaaccatatttgatgtgaaatatataacccaagacagaaaaatgacaactatgggagcaaccagcatccncctcccttttccccttaagaaattgactttatcggagcttgcaaatctggagaaatgttggaatgaaca

SEQ ID NO: 27967 - DNA, 255 bp, Glycine max
  Clone ID: PAT_MRT3847_125255C.1
gggagcgacagaaaaaaacacagaccgcccccaagccccgacagaaacaaagaaggagcaaagccaccgggcgaaaccaaacacaccaaacccgaaaagcagcccgcagaaacaccgcagcgcccaccaaaggcggaaggcccacacgggaggcaacaacaccgaaaaccaacgagcagaccgaaccacaccacgaaagcaaggccgcagccccagagaaccaccaccaaaggggaaacagcccaaggaaaagaa

SEQ ID NO: 27968 - DNA, 457 bp, Glycine max
  Clone ID: PAT_MRT3847_125256C.1
gcataaatacgcgaaaacccaaaaggagaagaagataagcatagagatagagaccgagcaaacgagagaaagcgagaatgcgaaaatacaagagaatgacggcagaccgccagatcatgagcaactgatcttattcgcaaaagaactggaggacactcgcacactagcagattacaaaagagagaacgagtccactctccatctggctctccggctgcgcggaggagccaaaaaacaagagaaaaagaaataccccaagcaccaaacacaaaagcaaaaacgccaaaatggcaagctcgcactcctacaaagtcaaaaagtccaccaatcccccaaggttcagagacgagtgaaggagtgcccaaagggacaatgagaccccggtagctaaatagtcaaacacttacgacggcagtactgagggaagggcggatggacacatgaaaaccagaaatca

SEQ ID NO: 27969 - DNA, 382 bp, Glycine max
  Clone ID: PAT_MRT3847_125257C.1
tttttaaacattgaacattctctttttgatattgatattaagagacacattggcagggcttacatacaaacagagagtacatggtattagctgatctcgtaaaccattacaaaagagcatgcgggtaacccaataggacgatgaggacagaaccgcggtgattaacagacggggaaagtcatggatattccacatattataagggcctcgcaaaaaaaacttccaacctagaggagcgggatgatttacttaggccttctcccactggaggggttcgaccacttgacatgtgaagacaggggcttgtatatcaaagcgttcatatgcaagagtggtaaaggacgtggaattttcacgcctcctgaagaaaagggtgatggag

SEQ ID NO: 27970 - DNA, 424 bp, Glycine max
  Clone ID: PAT_MRT3847_125258C.1
attgtattcatattcaagataagatgagggagaagaaaattttggctcttgtgatgtttgtcatggcttatggtttggcagtaacaacactcagtgcaagttatcaactttattttcctgaaacgtgcaatggatatagagaattacttgccttctgtgggacctatttggcggatgtgaagtccagtccaagttcttattgttgtaatgcagcaactattgcgtttcccaaagccagccgtagcagtgatttttgtaattgtttgcgggttgttggaccactattacaatttcaatcaaagcttctaagccttcctggtgcctgtgaaattataccttctttttctatgcagtcatgtatatatggggcctaattccctttcccaaaccaaaaataaaattggtttatgaatattttggttaa

SEQ ID NO: 27971 - DNA, 415 bp, Glycine max
  Clone ID: PAT_MRT3847_125259C.1
gaaattttcaccaagttatgggtttccttgccaaattctttaccacctaaaacaactttctcggggcatcttcgtaaactcacattgaaccaaaaagaaacttgaccttaccaacttgcctctccaacacaattgagtacactgcacaaactgtcctgctatgatcgttactactagtgccctaaccttatactacattacaaccgattaatctaaaaaatgaaatacctgacactatttgataaacattaaactcaatacaaaaatccccatatcttaccaccaacatttttaccactatccttttcatgattcatgatgacttcagaagtaattacttccatattcccaaacttttttgaggggaaaagactatcgcccccaccttaaatatctttgacccccacattaaaac

SEQ ID NO: 27972 - DNA, 1189 bp, Glycine max
  Clone ID: PAT_MRT3847_12525C.1
ctagcgtggctcgtgcaaatatggtgttcacaatgtggttgaggcctctgatactagcctctgtttttgtatgggcagtggcaactccttctccacaaggatgtgatttttctcatggcagatggatcattgatgaagcttccttacaccctctctatgatgcctcaagggactgtcccttcattgggtttgattgctcaagatatgcaaggcctgataaggattatctcaagtatagatggatgccctctggttgtgatcttccaaggtttgatggtaagaagttcttggagagaagcataggaaagaagataatgtttgtgggggactccataagtaacaacatgtggcagtcactcacttgtttgctacacattgcagtcccaaactcaaattacactttaacaagtcaaacacaggaacttttggtgttctcagttccggaatataaagcttcaatcatgtggttgaaaaatgggttcctagttgatttggttcatgacaaagaaagaggtagaattttgaaattggatagcattagttctggggaccagtggaaagatgtggatgttttgattttcaacacctaccattggtggactcacactggacagtctcaagggtgggattactttcaagtggggaatgaattaataaagaacatggatcacatggaagctttcaagattgggctgagtacttgggctaaatgggttgattctaacattgatccttcaaagactaaagtcttgtttcagggaatcgctgcttcccatgttgataaaaaggggtgcctaaggcaaactcaaccagatgaaggaccaatgccaccatatcctggtgcggacattgtgaagagcgttataagtaacatggcaaagcctgcagaattgctagacatcactctgctcacacaactgaggagggatggtcacccctctatctacacagggcgtggcacttcttttgatgactgcagtcactggtgtctggctggtgttcctgatgcttggaatctcgagttgtttcggctcgagtttggaaattattagtatcttcatctcatttgtcctttatttatgttatccttggttatttatttattgcccttgaggaaatagggctctcataaatttgaatatgagcttttaattaaattcgaaatattaaaaaatgccatgtttaaaaa

SEQ ID NO: 27973 - DNA, 772 bp, Glycine max
  Clone ID: PAT_MRT3847_125260C.1
tttccgggccggaaaccccgtcgaccacgcgtccgtattatttaaactcatttttttttggttggccgaattaaacccagatgatagtatactagtttgtatctaataaaaaaattgatgactaaaacttaaaaaactctttgttcctgtgcatttgtatgcacgaatatcacaaatggcatttgagtatgtgaatttcttttatgaaccaggcataggtgctttgcttcgcccctccggtttgaacttattcttaaagcatatgaaaatatagagggtttttttttcatttcgcttaggaaaaataagtgcgtaagcttttactgtatgataatattcacaaacaacatggagaaggaccaaagatgttgctgaaaaaaccttgaagatcaagatgtaaaacaattgatagatcaaatccacacggagcgaggcaaataagttaaagtaagaccttgtttatttaatgtttgcaaaaataattttctatttgcggtaaattaaaatcatatgttgtacatgcagaagttctatttgcctatgaacaaaaatgaaataacaagagctagaaatcctgattgcaattttttatgttagccatataaatccttaatttacgtgcttaattgtttgatgaggaagatatataggagtcttgttggacctccccctgttttccttgcttagggaataaaacctttatcatcatcacccaagatgtttaaattacatttaaactcattgggcatcattcttctactttactcaaatg

SEQ ID NO: 27974 - DNA, 486 bp, Glycine max
  Clone ID: PAT_MRT3847_125261C.1
taaaaaagagctgaggagacggacatcatgcctgcccagcagcccaccgtgttcaagcgtttcgtcgaggttggccgtgtcgttctcgtcaacgacggcccctctgccggcaagctcgccgtcattgccgagatcatcgaccacaaccgggcgctcattgacggccccacctccggtgtcccccgccagtcgctcccttaccgcaacatgatcctgaccccttacaccatcgcctcgctcccccgcggtgccggctcgggctcgatcaagaaggccgtcgagaaggccggtgtcaccgagaagtgggaggcgtcgggctgggccaagaagctcgcggccaggcaatccaggaaggatgcctccgactttgaccgtttccagatcatgctcgccaagaagtctcgccgcgacctcgtccgcagggcgtacgtcaaggagaagaaggcttctgcgtaaacttggtgggcctgggttgcttaggttttt

SEQ ID NO: 27975 - DNA, 2417 bp, Glycine max
  Clone ID: PAT_MRT3847_125262C.1
ccacaatggacttatccgccgacctgttttctaggaccaggcagcttggtctttgattattggatgtcatgttcctcttcagctttcaatagttgttcaacgcgtcggcatgtctagacgatgctagataaatttggattttttcctttcaacctttgtttgagttatttctccttctctggtagcttggggtggttaggtggtgataaaaataagtttattcaattgttgatgaaattgcatcttctggaacatttactgacgactttgttggtccgcctcgatccaggcagcttcctgctgagaaaacttttaaaatcactgtttctgttagtaagattggacttccacttagtgttagtcatttttggcctagataagcttcacccgcatgtattgattcaaggattgggattcaaagtctggatgattaactttgattcgatggctatcaatttcattcacaatccaacgattgatactcttagtctcctcttacctgcagatgattttggttttttccacctattctgggatgtccggatgcattagcgtttcgtgcaaaaaaatcctgcactgaaatcgaagatggaaattgttcagtcaaaccaacacctgcatatggaaggagatgatgacgatgaggttattgttttcaaacctgtagtggctgagacacgagctgatgtgattgcctcatcatgggcaccccatgtgggtttggaaccttttccaaaagcatctggaggggatttaatatttcctgtaaattcttcttgaaggattattacaaacgtgctgcattcctttgctaccccttcaaactccaactctacttccttgtcattgattttttggagtttatctgcctagacatgttgcaggaggttgctactacaaaagaatttgctgagctctcaagtctggttgattgaagataaacaagcatctttagggtggacagagggtgataaataaaatccagtcatcttggagcttgtatgtatcttctggaattggtggtataactatggtttgttcacttctctagtggaaatgtcataatggtgcgccatgcgccatgcgcctgtaagaatttgttaccgtcttctagctgctggtgatacatgatgctagcccctttttttactacctcaaagcttcagactagttgggaagattggtaggtatgaagcgctcgtctatagttggataatgggatatgataatgactttgtgaagcatgcttaagtacaagtgtctagtggtttgcatctgtgttagtgttatcgtgtttatataaccagtgatatacaaacggtttactttctccctttcacctagtttaggctccaatggtcctcttaactactctcagtcaaattctcagcaagtcagtaacaacggcttgagtcctactgccagctttccctttcctggaaaacaagttcctcctgtgcctcttcaagtggagaaacagaatggttggcaagattatcaaacttatgatcttttaaaatcacatcatggtcagcagcttcagccacaacagctcacaactggaaaccagcagttttctcctctgcccgagcaatttcaaggacagtcaatgtggacaggtcgttactttgtgtgatgtcagtatgagagtatagatggcatattgcgaatgtgctgcatccttttgctactcaatcaaactccagcttagctgcctcgtcattgaatgttgttggagtttctttggccttggcttgttgcaggcacttgctactacaaaagatttatggtgagcttgtcagctcggacaaaggaagataaacatgcatctttaccgttcaaagttcgtatgaagtaaatgccttgtctggttggttggggtggataggtggtgataaataaaatgactattcagttgtcttggagcttatatcttctgggattggtggtgtcacaatggtttgttcacacttctctagtggaaatgtcataatgatgcacctgtaaaaattgttgttactatcatttggttgcaagtgatacatagtgctagcccttttttatgctgcaatgcttcagactatatatagttgggaaaggttggtaaagataagaagtgggtgtcaaagttggataatggggtatgaaattattgacgttatggggctcacttgttgagcacatgtgtttagttgttgcgtcttcgttaaggttcttatcttattatatgttgtgtatgacgagtggtatatgtggtttattttctaatttttctaagtcgaggggttgactcgaacttcaaaataaattggtggattgttgaatgcaaatccatcttggtctgtatgagtacaatgatttatctacccataatcggatttaccatattttttgctaaaaaaaaaaaaagggcggcc

SEQ ID NO: 27976 - DNA, 1224 bp, Glycine max
  unsure (1)..(1224): unsure at all n locations
  Clone ID: PAT_MRT3847_125263C.1
ttttattataagctcggatcaaaaggattttagctgctgggaaggctttagcaaatgttgttaaggttgataaacaaatgatctattttgattcaaaggtgaagaaatttgtaattggtgttgagcctcaaactgcagatgattttggtttttccacctattcaggcatgtcgaatgcaaaagagttagtgcaagaaaatcctgcacagaaatcgaagatggaaattgttcagtcaaaccaacaccagcatatggaaggagatgatgacgatgaggttattgttttcaaacctgtagtggctgagacacgagctgatgtgattgcctcatcatgggcaccccatgtgggtttggaaccttttccaaaagcatctggaggggatttaatatttcatgttaattctacttctaatcctctaagtaacctaagtcatcaaactttatctgttcctggtggtggtatggtgcctcaacacctgcaaccagttcagccacatacatcaaggtggttagaggaggaaatttctcttgctaacaatttaaaaggtcttgggttatttgagaatggacatgtgatgaaacctggtctacaagaagcggttggcttctccaaccatgtttcacttccttttcctatccaacaatctataggtgctgatactaatggcatgttttatggtttctcaaaagctttggagtctgcagtaccatccaaagttgataccattgcatcttctggagtagttactgataatttagctgtaaaaacgtcagctttgccagttggttcaagaaaagccccagtcagtcgacctactaggcaccttggacctcctcctggtttcagtcatgttcctcccaaacaaggtattgaatccaccgtttcagattcaattagtgggaacccaattatggatgattatagttggttggatggctatcatttgcattcatcaacaaaaggattaggctccaatggtcctcttaactactctcagtcaaattctcagcaagtcagtaacaacggcttgagtcctactgccagctttccctttcctggaaaacaagttactcctgtgccttntcaagtggagaaacagaatggttggcaagattatcaaacttatgatcttttaaaatcacatcatggtcagcagcttcagccacaacagctcacaactggaaatcagcagttntctcctctgcccgagcaatttcaagaca

SEQ ID NO: 27977 - DNA, 336 bp, Glycine max
  Clone ID: PAT_MRT3847_125264C.1
cagcctatcatggcgtgagttggtgactacactatcaacataaatgtgtcagtgtgacaggtagaggctactggaggctagcacacgagtttagtacaagtatgacgctcgataatcttccagctatacctacactagtccttgtcatgatgggcctgactaatatccctggataacggtcaaaatcatgaatcctatgaactcagcttctgacgggtcatgcgaaatatgacttgatatctaattaaactggtcctgtatattgtaacacttaagacgtcagattatgagtcatatattcatccattgagtggttcactcagaatctcactcaga

SEQ ID NO: 27978 - DNA, 271 bp, Glycine max
  unsure (1)..(271): unsure at all n locations
  Clone ID: PAT_MRT3847_125265C.1
ctcagtctctgtgtttgcggctgaggattccgaacgagtgaccttcntcgtttctcgcaaagtttaagtaattcatgggtaangaaaangttcacatcaacattgtcgtcattggacatgtcgactctgggaagtcaactaccactggtcacttgatctacanncttgggggttnttgacaaggnttgantcanngttcgaaanggggntccccgaantgaccaaaaggtcnttccaagtaagcccngggtnccccnaaanntcnaangtt

SEQ ID NO: 27979 - DNA, 260 bp, Glycine max
  Clone ID: PAT_MRT3847_125266C.1
cgagaagacgacagatagggggagcaagagtgaagagcgaatagaatggctcccaagggtttgagatcgggttttgctgtgttatgcttctcaacactgtcactgagtcgttgtcttgcggaggataatggacttgttatgaacttttacaaggaattatgccctcatgctgtatacatcatcaaataacaagttaagcttttttacaatgcgccacaagaacacttgcttttttctggcttataaacatctttcatgac

SEQ ID NO: 27980 - DNA, 375 bp, Glycine max
  Clone ID: PAT_MRT3847_125267C.1
ctccggcaaaaacaaccctttttaaattaagccttggagatcctaaaaacgccttccaattttacaagttaaaaacataacttatgcccccaacgggaaacaaagagatccctttctgcaggttttatggacaaaagtttcaacaaaacgccatgggcccccttaaaaaatatctgtttctatggatgtatatatggagatttatctccaagaagcagcttccccaaaaacatgtgaaaggatggttcattgcttggggggacaaggaccacaagggcccactggtttttttgatggactaacctttatggggggggaacccaaaatcacaccgttacagttaaaagctgtaattgcccttttagccggggcaaa

SEQ ID NO: 27981 - DNA, 435 bp, Glycine max
  Clone ID: PAT_MRT3847_125268C.1
gggactttatctttttaaaaaaaaaaaaaaaaaaaaaaaaaaaaataaaaaaaaaaaaaaaaaaaaaaaaagggcagacaaataaaagataaacaaacttaaatacacaaaacatgcgggggcctcccttttttagggtccaacctacccttccttgcatgggccgttttttaacattgtgttgcctggaaaaattttagtgggtcggggggctcatttttcttggaagcgagttgcccattcccccggcttggctaaattttttatgggcccgcaccgttcctctttcccaacttgggcgctaactgaaagggccaggggccgtccccttttctggcacattagtcacctggggggggaaggtaaccccccttgtgcccgttacttttgccaggggggtggggcgggttcctttggctgtctcctttccctttc

SEQ ID NO: 27982 - DNA, 796 bp, Glycine max
  unsure (1)..(796): unsure at all n locations
  Clone ID: PAT_MRT3847_125269C.1
gcatgcctgcagttctgcaccacatatttaccataacctgtggttaataaagtagctaatatcaataatttatttgataatagataatagagtaaattagactacatctcctaaagtttatgaaattacacaaccgtctcctacctttatttattcctacactaacctccccttagttatttaaaaatatacacaaacacctccttatacattacatttaccccccttagctttttaagaatatacattgacacccctctaattatttgaaaaacactacattgggctcccctaaagggaggttagtgtaaatgtaaaaaaataaaatgggaggtttgtgtaatttagactaggcatcacttgacattgagaaggaaccatttttcaaatttggcactaaaaaatagaactataacattaagttttacggagaaagttatcaaaataatatctttccaaactcaagaatgagctttcacgtgataagctcttattgaataagtgctcgattgctgaagatccagagtagccctctatataaggtacaagaattatgattgacaaggaccagttatactagattataatacaatggttctcacttgacaatgacatgggactcctttattcaatgaaaatttagttcacatttcgttctgggaaaaagggattgatgaatgtgtccccaagatatctaataaaaatgataaattttgccatatgtaaaattcattntggtggtgataaaagtataaacttcattttcctagtccatgccccatatgtcatctgaaca

SEQ ID NO: 27983 - DNA, 619 bp, Glycine max
  Clone ID: PAT_MRT3847_12526C.1
caacaaatctctcttactcctatccttcttcccctacttatatctaataaatctctctaactaactaattaactaaatcatcaatagtttatgtgttttaactcacttttccttctccttatatcctaacactatactagattgagcaaagagttgtattttatattgggtaaattttgtggtggactaccttaacatgtggtccattaattggtgcaccatcataattactagctattataagtaaacgcgcatctatctggttttgtatagtgtctcaaactttttttagagtgtgtttggatgagggaatttaaaacagaattttaaattctaagaatttcaaatacttcaattaaaatttttttattttcaaaattttgtgtttggataaaaaaaattaaaattttgagggtaaaagaaaatgagtcgagagttcgagaatgagatttcggaaacttttaagtggaagagaggatgaatgttacacaggaaatacgaaaacattttagaaaattcttctataaaaagagaatttcaatttctcacattaaaaggaaattaaaatatcatattttaggtggttaaaattctatttaaaattttaaatcttcatgaa

SEQ ID NO: 27984 - DNA, 240 bp, Glycine max
  Clone ID: PAT_MRT3847_125270C.1
gcgtcttgtgcgggaaatttggtagaaaccggtggggggtatactgaaaatactagagtttcgattcgtttggggaacggatttgtaggggtgattatctacgtttttattgttgcttatcaaggtatgaatgtttcggagcatagctgctgataggataagactgatacagaatgtattgattagtaaggttggtgggagtttgctgcttggaagaacggttgtgtaatggttaagatt

SEQ ID NO: 27985 - DNA, 239 bp, Glycine max
  Clone ID: PAT_MRT3847_125271C.1
aaggcacctacgcatcttaaggtctacatctgcggcaattcacagataacaaagcacatgtctcttagcaatttagctctcaagacacattactatgaccaaacactatctcattttccagaacaaggcacctctgtgccaccaccaagtgcttacgcaaaaccatgtcaacaatgttctgaaacggcacccggcgtatttgaccgaaaaccgcaaaccagaacaactgactcaatttt

SEQ ID NO: 27986 - DNA, 821 bp, Glycine max
  Clone ID: PAT_MRT3847_125272C.1
catgaccattgaaaacggtgcaagtcaccactcccacttcgttcgcagaacaagatttcttgaacatgtacttcaaggatatttacaagccaatccctttaaattacaatcttgtcctcgccatgctctggcgccacccggaaaacgttaaattagaccaagtcaaggttgttcactattgcgcagcggggtcgaaaccgtggagatatacggggaaggaagagaatatgcagagggaggacataaagatgctggtgaaaaaatggtgggatatctacaatgatgcttcgcttgactacaagccattgatgagtgcaagtgaagctccagcaccggatggtgttgacaatattgaaccattcgtgcaggctctgtcagaggttggtcatgttcaatatgtcactgcgccctcagcagcttaaaaaaacaaggaagtgaaaaaaaatatatatataaaaaaagaattgtgaaaagagaaggtagaaaacgaggaggagtaggtggaagactttgcggtcaaaacaagggaggtttctttctttcttactttttggtgtagttattgggagcagtcgtggcttgctttagaaattggacctctccagcttttatgtatatttgttttctttaattttgctcttttggaatattcttaatctttggtgggtctgttcataagagtctgtatctggtcttggtctacaagtatatgtgtttaatttatgtatatttctgttgtctccttaatttcctttggttggactttgccattgtaaaaatacttttaacttttaaggcaatgcttaatgattaagggaaaa

SEQ ID NO: 27987 - DNA, 358 bp, Glycine max
  Clone ID: PAT_MRT3847_125273C.1
tgctctcttcttcaccgtggttagctccacatatgcgccatgcaccccaccccccaaaacttcaaaacacccacctgcaccaaacacacctcccccaaagcaggcatgtttccccaaagacacttttaaggatgcaggaaggactgatgtgataggccagatcaacgtgcaacttgccaagccaccaaagaccccatgctgcaccctcattgagggactaagtgatcttcaagctgcagattgcctttgcactgatacaagagctaatgtgtagggcatcaacctcaatgttccaatgaacttgagctcgctactcaactactgtggaaagggtgttcccaagggtttcgtctgctat

SEQ ID NO: 27988 - DNA, 2952 bp, Glycine max
  Clone ID: PAT_MRT3847_125274C.1
cctcgagccgacaaaaaacatagtttccactttccactgtaccaaagtcacgcttgctccctctcttaaccgcttccctctttgttctctctctctctctctctcttgaacacacatccttggtcttgaacaggtttttgggtgaaggagtagtgttggtggctttttatatcttttagtggataaggatacagcagcatgcggtggtggcttagtctctcagttgatgtataccgcaaagtgatttccttgaatctgtattgcaaagttattctgtaactcttaagtcccttttgatcaaaaaccttttacaatcatctcactcatctcttccttgccttgaatcaatgggatccaatttttttgttgttgttccttgttatgtccgtcagattagctgaaaacccccacccctatcttgtttcaaacctcttattttcaatcagcctcttttaacattttagttgtcattagtttctaagccatttctctccttagggaggtgtttgtagacaagtcaaattagctaatcttagttttgtatattgttcattttggttaaaccggttttcactactggattgggagggttcagacttcagaatcattgtctctgggaacatagttgttcttccattttgaagggttggaaaagatagttatggtgcgccaagcagcgagtcaaaccagatttcgggcattgaaacatgagaatggatatgcagggagctccaccataatagttagggttatagcatgctttcaacctctcacagattgccaggctgaatactttcgtcatttgctcaagcctgttacgtaatagttttttgctttttgatcgtgttgggttaaatctggtggtttagttgttttccttgttggtgaaagagttaccaatagtaaaagatagcacttgtgtttgattcgtttttcttcaggtgattgttggggttgaatgggagaagattgcagaacctggattccggagctgcattttgattggcaatctccgaatttgagctccttcaatgctacaccctttggtgtggggaagcaaaatggtacttctgcagctatgaattcgggtgccaacgtggtcacaagaaacgcggcaatgccagcttatgcgtcctctgccttaccgcattcgcagttaggacattctggtgaacctcatggttggttttattgtttgcctcgctttcgccagggatttaccacgcctgctcaaaccttcaatgcagaggaaaaactccctgctggccatgccaatggtttaggggtggaagttgcgccgaatagggaatcgggtttccctcagaagcaattgctggttattgatcaaacgggtgatcaaacaactcttgtttatagttcaaggtttgggggtcccgttgattgtcatgtgtcctgggattcaaagctgcatggttctatcaatttgaacaatgggaatgaattgcttaatttaaggagagatgtgaatcatgtggttggacttggacctactttggatgataaagttcatgaaaatccaggaactgatgatgacattgaaagcgagatgcatgaggacacagaggaaatcaatgcattgctttactctgacagtgatggttattccactgaggatgatgatgatgatgaagttactagcacaggacattcacccagtacaatgaccacgcacgatgataaccaggaagaaccccataggagaaccgccgaagaagttgctagctccgtcggagaaacaaagaagcgaaagctattggacggtgcttatgatgatgacaacttgcagttcatggacactgctagttctctgaatgggaaaaaaagaccctttgaagtcgaagatgatgccgaatcaagatgctctagtggtggcaacagtagtagtagagggtcaggtggaatgggttccttgtcaggcaataaaaagatgagaaaggagaagattcaagatgttctgagcatcctgcaatgcatagttcctggtggaaaggacaaggacccaatcgagcttcttgatgaagccattcgttgcttgaaatcattgaaactcaaggccatagaacttggacttgatgctactatataagttgtggacaattggaaatcagcatcacctatcacttatttagtacgttatctttgtgttttggtttgtagaataaacaaggtatgagtgtgaaacgaatcctttgaagcccttgctcaattataaagttggaagaaaatagagaaatcaggtgggctttgagtaatggtagtagtttgtgtgtgaagaaagagggtgaggtatttcagcgtattatgccgcaataaaggaaaaaaaaaaaaaagcaaagaaatgaatgattagtccatgtcttgggggttagagaaagtagcactaacgctggcatggggtgtgtgagttgtgtgtttttttgaaatgagaagaccactggttgttccaaaaacgagagtgcacgcctcttggttgttatggggcccaacctcacttcctctttttgtaaccttgtcgtgttcaatcctttgtgggtttgcctttttctctgatgtaaaaattatcacttctccttttgtgaaagagattgtgacaactttggctataaaggggggcccctcttcccctctattttttctacttgacggatggcacagtaatgtaacaccacgcttgtgggaaatactgatttttttgctgtcgtttagtgctgttattattgttattgttgtgtatcttaatttgtgtagtagggtatgtggacttattaaagaaggtaggaagaaggggtaatatcttggtctgatgtaattttatttggttgttgattctgttgtctttttgcctatgtagttacgtcgcatacacgcatttaatgatatgagaaagtgatgtgctgtttaaaacttctatcttcatatttaaatgtcctt

SEQ ID NO: 27989 - DNA, 401 bp, Glycine max
  Clone ID: PAT_MRT3847_125275C.1
aacttatcatatcgttaacaagaagaacacgtaacagaaagacacatccaaaggaagtctctggttatttcaattaattaagagaaaggactcgaatagttggttattcatggaagacaccgcacaacaaatcaagcgtccttttggtgttcctgaaggaccagaattcactgttgggttggatgtacctttgagcggcgccaaaaatatcttggcgtttgcggagtgataagtggttatcttctttaattgctagaggcatttataatagtcaagaaagtgaggttcctcttatagatctattttgtactctgctagcccatgctgaaccggagcaacgtattatagcatacttgggatgaagttgttgtgctggcatcatctgatttgtcattacaact

SEQ ID NO: 27990 - DNA, 2045 bp, Glycine max
  Clone ID: PAT_MRT3847_125276C.1
cggaatttggattccggagctgcattttgattggcaatctcctaatttgagctccttcgatgctgctgcaccctttggcgccaggaagcaaagtggtacttctgcagctatgaatctgggtgccaacgtggtcacgagtaatgcggcaatgccagtttatgcatcctctgcgctgcctgattcgcagtcaggacattctgttttacctcatggttggctttattgtttgcctcgctttcgacagggatttactatgcctgctcgtaacttcaatgcaaaggaaaaactccctgctggccacgcgaaagatttaggcgaggaaattgcgccgaatggggaactgggtttccctcagaagcaattcctggttattgatcaaacgggtgatcaaacaactcttgttcttagttcaaggtttgggggtcctcttgcttcctggaattcaaagctgcatggtttcaacaatttgaacaatgggaatgaattgcttaatttaaggagagatgtgaatcatgtggttggacttggaccaactttgaacgataaagttgatgaaaatcaaagaactgatgatgacattgaaagcgagatgcatgaggacaccgaggaaatcaatgcattgctttactctgagagtgatggttattccactgaggatgatgatgatgatgaagttactagcacaggacattcacccagtacaatgaccacacacgatgataaccaggaagaaccggataggggaaccgccaaagaagttgctagctccgttggagaaacaaagaagcgaaaactatgggacggtgcttatgacgacggcgatatgcagttcatggacactgctaattctctaaatgggaaaagactctccgaagttggagatgatgccgaatcaaaatgctccagtggtggcaacggtagtagagggttaggtgaaatgggttcattgtcaggcaataaaaagatgagaaaggagaagattcaagatgttctgagcattctgcaatgcatagttcctggtggaaaggacaaggacccaattgagcttattgatgaagccattcgttgcttgaaatcattgaaactcaaggccatagaacttggacttgatgctactatataagttttggataattggaaatcagcataattttatcacttatttagtacgttatctttgtgtttttgggttgtagaataaacataggtatgaagggtgttgtggtagtggtgagtgtgaatgaatgtgaaatgaatcccttgaagcccttcaattattaagttggaagaagatagagaaatcaggtggttttgagtaatggtagtagtttgtgtgtgaagaaagaggtgaggtattatgccgcaataaaggaaaaaacaaaaatgaatgattagtccatgtcttgggggttagagaaagtagcactaacgctggcatggggtgtgtgagctgtatttttatttttatttttaatgagaagaccactggtttatccaaaaaagtaacccaaaaacgagagtgcacgcctcttggctgttatggggcccccaacctcacttcctctttttgtaaccctgtcgtgtttaatcctttgtgggtttgccttttctctgatgtagaaatgatcactagcagggctaaagcacccttccctttagagagagaaattgtgacaactttggctaaagggggggccctgcccttgtccatttttatacttgacggatggcacagtaatgtaacaacacgcttgtgggaaaacactgattttcgtgtgttttagtgctattgttattatgggccttcccttggagggtgtatggacttgttacagaagaagggaagggtgatatcttggtcggatgtaatttaatgtggttggtgctactgttgtctttttgcctatgtagttacgtcgcatgcacgcatttaagtgatatgagaaagtgatgtgctgttttaggtggggggggggggggggggggagggcggccgctatagaaggatccaaggcttacggtacggcggtgccagtgcgaacggt

SEQ ID NO: 27991 - DNA, 1542 bp, Glycine max
  Clone ID: PAT_MRT3847_125277C.1
aattcggctcgagggggtccacaaacaccaccacctgtagtagctgtagcagtggctctagttggattaagagtgattttttaaccttggaagaggcacaaaacgacaacgttgaagcggcgggtaaaaggttttcgtttatttcacaccttcttgtcggcagcaagaactcctgggctaaggaaactttaacttgccaagaagaacaacacagtccagtttcagttcttcaggttggagaagatgaattctcaccttttgatcaaagccttgccaatattcaaaggaattcccggggcgaccacagcgtccggaaaacagaagttcatacaaacagttcaaaaattggagagtcatgcaaaatttgaccttgcaaacttagaccaatgtctctcattggatgacaattctggctatgatgaagaatatgaagaagaagaagatgatgataatgatgacattgaagaacaagattggattgaggaaaaggcaaagcagctgctacattgtgtcaaagcaagagtttcagcacatggctgtatagactatttggatacacttctgttggattttttcagggaagaactaagtggaagtagaaaccaatacaagaatgaagaggagtttgagttggagacattgagaataactgaggattggataaatgggtcatttgcttttgatgcagggcatgctgacaaacatgcttacataaaggacatggagaggagagatcagtggagtaggttggaggaggatcaagaagaattggcctttgaaattgagacagctatattgcatagtttgattgctgatcttctggacctggatgcttaatacttaatagtttcccttttcaaagttcaaatcaagttttggcaattgcttcttcgcctccataatggcttcgtgtacctttttaagtttatgaaacacctaattcggaatgtaaattacattccagaaagactaattcgaaatgtaattttacattccaggttaggtggaagcaattgcctcaagttctttaagatctctgggcctttagcctcacttttctcaacagaaattatctggccgcacttgaagtccgaatcagaaaagtaggtttcatcctacagcacccatttagattttaggcttaccaaccagaccagaaaaataaggatacctaccaaccaagggcagagggatgcctacttttgtggtaacaaaggacatataggtcagagtttggtgagttttggatactgttatatgaaggggtaatgagatgctagtggacataagtacatgattgggctgtactgtacttaaatttagttatggcttaattagattttggactttggagtgtagcatattaattagtggatttcaaggcataactcatgcctacttttgttaaggtacaggtactgaggaagtcttttgattgtgctgttgttctatatatctgtaaaggaaattaatcagcatgtagcacttctcttttcaggctaatgttgaaaaagttcaaatacaaagcatttctaccaaaaa

SEQ ID NO: 27992 - DNA, 180 bp, Glycine max
  unsure (1)..(180): unsure at all n locations
  Clone ID: PAT_MRT3847_125278C.1
aggtaccgccccagagaattcccggcaccacaccacgcgngtgacacacgcgtccgtgacgcgcagaaagtcagggggatttagacacaagctgcggctttaaacaaagactcaataaaaagttgtattcaaaatctcacaagaggaatacctcacagctagggcaactcaagcgccccc

SEQ ID NO: 27993 - DNA, 418 bp, Glycine max
  Clone ID: PAT_MRT3847_125279C.1
cccacgcgtccgtacggctgcgagaagacgacagaagggggcgatccaaatccaaaaaaagaagacttcaaaaaatcggaagggtacttttgtaattatatggagactcgtgagatcagaatatcagatcgaatttaaacgggtcatattcgcattttcatttcattttgaattgaaaccgcggagagtttgctgctacatcgatcatcatcacctcatggacggacacgatccacaagacccaaagcagagccctgctgacatgactgcctttgtgcaaaatcttcttcagcagatgcaaaataggttccagacaatgtccgactccattgttacaaagattgatgatatgggaagtcgcataaatgagttggaacaaagcatcaatgacctgagagcagagatgggagtggagtcc

SEQ ID NO: 27994 - DNA, 374 bp, Glycine max
  Clone ID: PAT_MRT3847_12527C.1
gtgcatcttaccctctaccctaaacttggtctctactgcagttccttttctaaatacagatgtatgttcataagtgatgatgaatatatctggattatgattgaaatattgaatgcatgatattcatgcatccttttattctaaaggtttattttagttactccgtttactcttacatgtactgcgccttcaaatattgcagtcactgattgacttgagttgatggcaacattcttttatgttctaatacacacattgcatgagacgagaaaagaatcagatgtctcaggatgtaacataattgtacatctcctcgaaaagacggaatccaagttcttggacatgctgattcaaatcaccgctgagctcacttt

SEQ ID NO: 27995 - DNA, 934 bp, Glycine max
  Clone ID: PAT_MRT3847_125280C.1
gtcctataagagcattgaaagatgaggataaagggtaccctcctgtgtaccctgttggaccaattgtccaaagtggtgatgatgatgcaaaagggttggacttggagtgtttaacatggttggacaaacaacaagttggttcagttttgtatgtttcttttgggagtggtggaacactttcgcaagagcaaataactgagcttgcttttggtttggaattgagtaatcacaagttcttatgggttttgagagcaccgaataatgcaacatctgatgctgcttatcttggtgcacaaaatgatgttgaccctttgaaattcttgccatgtgggtttttggagagaaccaaagagaaaggtatggttgttccttcatgggcaccccaaattcaagtccttagccacagttcagttggtggattcttgactcactgtggctggaattcgatcctcgagagtgtgctgcatggtgtgccattgatcacttggccactgtatgctgagcagagaatgaatgcggttgtgctttgtgaggatctcaaagtgggattgaggccgagagttggtgaaaatggtttggtcgagagaaaagaaattgctgatgttgtgaagcgtttgatggaaggaagggaaggtggggaaatgcgaaaaagaatgaagaaactagaagttgcggctgttaatgctctcaaagaagatgggtcttctaccaagactctttcagagttggcactaatgtggaaaaatgtggcttaggaaaacaagttttttatttatgttatgcatgcagcttgtgtagtagtgcctgtaatgttcaggtatttcgtatcttagtttttatttatgtaatgtaatgcagcttgtatggtgcttgtgtttttagttataaataaataaactttggtcattacaaaatcaaaaaaaaaaaccccaaa

SEQ ID NO: 27996 - DNA, 674 bp, Glycine max
  Clone ID: PAT_MRT3847_125281C.1
ttcggacatgactctcggcaacggatatctcggctcttgcatcgatgaagaacgtagcgaaatgcgatacttggtgtgaattgcagaatcccgtgaaccatcgagtctttgaacgcaagttgcgcccgaagccattaggccgagggcacgcctttttcatttcattttgaattgaaaccgcggagagtttgctgctacatcgatcatcatcacctcatggacggacacgatccacaagacccaaagcagagccctgctgacatgactgcctttgtgcaaaatcttcttcagcagatgcaaaataggttccagacaatgtccgactccattgttacaaagattgatgatatgggaagtcgcataaatgagttggaacaaagcatcaatgacctgagagcagagatgggagtggagtcctctccatcacctgcagcccctgctaagctaacggaggagataaccaaagaagagggttcagcttaagtggcattctgatttcagttgctcattattcatgcattgtattgcacaaggattgatattctgcatctacttttgtctgctgtagtggctcagaaaacagatgtgctgtatagctatgagtgtatctgattatttgtagctaactcgtattgtttttatgatttatgggtacacctatacttttatgttgg

SEQ ID NO: 27997 - DNA, 591 bp, Glycine max
  Clone ID: PAT_MRT3847_125282C.1
gggacttggggggaaccccgcagcgagacctaggaagcacgacaacaacactcatcagagggaaaagtcgcgcccactgccaccgcgtccaaagatgatcgatgatcaagatctgggtttctttgccaattttcttggcgtcttcatctttgtactagtgatcgcgtatcattttgtcatggctgacccaaagttcgaaggaaactagtaatgcttttaagtttaagatgtaattttgtgttgtagacttgggaatgtgaacgttagcttactaaaacttccataaacatcaaaggagcataacatttcaatttttgctatacttatgcgtgctcccttaagttattttttgctgttaaggagtgtttgttggtaaactaatgaaaatactggattttctttaagattagaggattttgcttgatgatgtgctactatattttgtgcaatcatcatatgagcaatatagtatagtgtagtatctatttttttgaaatttcaaattaaaccttccttccgtattgacttttgcattgtgtgcatatcatatgtgcattcaattaaagctttcccccttaagatggttgccac

SEQ ID NO: 27998 - DNA, 422 bp, Glycine max
  unsure (1)..(422): unsure at all n locations
  Clone ID: PAT_MRT3847_125283C.1
gggagttatatcatttttttttttttttttttttttgggggaaataaaacaaggtttattaaattnnnnaactaatttattttaataacaagtgttcattatccaacaatacattataaaacggatttttttagataggaaaactctgtagaactattctattagttaaattggttgtggagttattaacaggatgtcagtttttgttgaaaaatcaaatatagtcagttgtaacagaatattcattttcattttggtgtcagttatagtgagcatgtgttttgttttttattttcaaaatggtatgctcaaaaattggttttctgtatgcagaataattaggctgtggatttgtaatgttgttttgtaaggttttaatgtttcttttattaacaatgtttatgtataaaggagtttgattg

SEQ ID NO: 27999 - DNA, 1434 bp, Glycine max
  Clone ID: PAT_MRT3847_125284C.1
ggcgatccaaatccaaaaaaagaagacttcaaaaaatcggaagggtacttttgtaattatatggaaacccgtgagatcagaatatcagatcgaatttaaacgggtcaaattcgcattttcccgggcgcctgtgcggcgctcgaggcgacccggagggacttaaggtgtgaaatgtttcgtaacacgcagcgagacctaggaagcacgacaacaacactcatcagagggaaaagtcgcgcccactgccaccgcgtccaaagatgatcgatgatcaagatctgggtttatcgcaacgagacctaggaagcacgacgacaacaacactcgtcctcacaccgactgccaccgcgtccaaagatgattgatgatcaagatctgggtttctttgccaattttcttggcgtcttcatctttgtactggtcatagcgtatcattttgtcatggctgacccaaagttcgaaggaaactaggaatgtagactgaggtgctttgcaaatggaaatgaatttgatgcaatcaagaactgtagtttgggaatgtgaacgttaagcttactaaaactttcataaacatcaaaggagcataacatttcaattttcgctatacttatgcgtgctcccttaagttatgttttgcagttaaggaactttcgttgatagactaatgaaaacactgaatttgctttaagattagaggattttgcatgacgatgtccgacttcattgttacaaagattgatgattgggtgttcccataaatgagttggaacatagcatcaatgacctaagagaagagatgggagtggagtcctctcaatcacctgcgacctaaaaaaaaaaaaaaaaaatcaattcattttgaattgaaaccgcggagagtttgcagctgcatcatcgatcatcgtcacctcatggacggacacgattcacaagacccgaagcagagccctgctgacatgactgcctttgtgcaaaatcttctccagcagatgcaaaataggttccagacaatgtccgactccattgttacaaagattgatgatatgggaagtcgcataaatgagttggaacaaagcatcaatgacctaagagcagagatgggagtggagtcctctccatcacctgcgacccctgctaagccaacagaggaaatcaccaaagaagagggttcagcttaagtggcgtgttctgatttcagttgctcgttattcatgtattcatgtattgtattgcacaaggattgatgttatgcatctacttttgtctgctgtagtggttcagaaaacagatgtgctgtatagctatgagtgcatctgattatttgtagctaactcgtattttttttatgacttatgggtacacctatactttatgttgcgattactttgttgccaatgtcatcatgtccattttttgctcaacatgctctggggc

SEQ ID NO: 28000 - DNA, 502 bp, Glycine max
  unsure (1)..(502): unsure at all n locations
  Clone ID: PAT_MRT3847_125285C.1
gcgtccgcnnccacgcccgtccgtaccggtcttgtcgagacccacgcgtaggtacggggccgagaagaaatcagaaggggcccttcaatccttcaattcaagtttcaagcacttctacttccttctctcaatggatgcaaaacctcctcaacttgcttcacaacctttgaactatcagacatggttcttgaaagtttccatccactgtgaaggttgcaggaggaaagtaaagaaagttctgaggagcattgacggtgttttcactgcaacaatagaccaacagcagcagaaagtaacagtcaccggaagtgttggtgtagagatccttctcaggaaactgatcagagccggaaaacacgccgagatatggccggagaatctcaacctcgacgacgaaagaatcgccggcaaagggaagaaaaagaagaagaagaagaagaatgaagcacgagaaccacagagcttgggaaacaagggagctgaaaaaaatgctgctaccact

SEQ ID NO: 28001 - DNA, 1614 bp, Glycine max
  Clone ID: PAT_MRT3847_125286C.1
atgtctgaagaaactgatatggatgatgaaaatgaacaagaatatggtgtgaatgaacatgtgtttgatgcccgagatgatgttttgcagtgggttcgatcagttgctcatgaaaatggatttgtgccggtgattatgaggtcagacacaaacactggtattggttgtaaaaggagtggtcagtataggtctagaagaaagattttgttagaagagatactgggagtaggaaatgtgggtgtcccttcaagcttcgtgggaaatcagtggttggagggtaaggctttagaacggcttcgaggtttatttctaagacgtgatgccttccctggaattattatgactggtagaaacctagcattgatgaatgtagtgaaaattgtattccttgagtgtacaagcttgttgtacaggtttcacatcgacaagaatgtcaaggaaaaatataaatccctaattggtcaaaaaaatgcttgggaatatgtgatggatgcctggggaagtttgccaatgtttgttaactatgttaacgaaacatggataatcccccacaaggaaaaatttgttatagcttggacgaataaggtgatgcacttaggaaacacaacaacaaacagggttgaatctgctcattgggctttaaaaagagtattacaaaatagccttggagacttatgtagtgtttgggatgccatgaacaacatgatcatgttgcaacacactgaaattaaagcatcctttgaaacaagtacacatgtgattggacatctttttaaatttaccttatataagaggcttcttggcatggtttcaaggtgttgtttaaatcaaattgctgctgagtttgagcgtgtacattatgttggcaagaatccttcttgttgtggttgtgtcatgaaaactacacatggtcttccttctgaatgtgagctatctaaatatgttcttggtagcatcctactatattcaattcatatgttttggaggagactaagtttttcagaccaagggttatctgagccccaagtgaccataaaggaaaagatgaaaaccatatctaagagatttgaggaacttgatgtttgtggtaaagtaactctagagagtaaatttcgggaaattgcatgccctgatcaaaactctatgtgtcctcctccagaaaaggtcaacactaaaggtgcacagaagaaaccgatgaagagaaaccaaagatcaacaaagcgtgatctgtcttactgggagtatgttgatgttttacattctgtgcaaaatagtaattcttcagtgaagcgtaatgcatcatcttttgaccagcctattccaagaaggaccatgccgatggtggatcaatttcatcctgttatacacgatttcattgacaacattgtggatgtcaaagctgacggtaactgtggatatcgtgtgattcctgctttattaggtatgagtaaagagtgttggtccttggtgcgcaaccatttgcttaaagaacttggcaaatggtcagatgactatatcaagctctttggtggcacagacagattcaaggaattaaggaggtccctacttgttgatgggttttccatggtaggttcttgatggtttgctttttaa

SEQ ID NO: 28002 - DNA, 290 bp, Glycine max
  Clone ID: PAT_MRT3847_125287C.1
ggtgtgggtttttctatcttttacgctgttttaaacaacatatattttaacaaaaaaaaaaaaagggggggagggaaaaaaaaaagggggggccgaaatttttgcccccccccccaataaaagaccaaacaaacctggggcaaaaaaagcggaattgcagtacaaacccggggggagaggaccccttttgtttgccaaaaaaacaggttaagggacctcaacaaaggggcgaaaacttggggggagggaaaaagaaaaaacgccggggggccgcccaaaaaacccgggaa

SEQ ID NO: 28003 - DNA, 338 bp, Glycine max
  Clone ID: PAT_MRT3847_125288C.1
gggaagaggaaaatcggccgggggcaaaaacaatatatttttccgggggagaaggggccgaggggaggattttccttttttttcggggctaaacaggaaaggaccccgtttaggggagacccccccccggggggttttttttttagggaaaaaaaggcccttattttaaggcccaaggttagggtttggggggggggggggccttcgttccccacataaaggggtcccccggaataagagggccccccccaaggggggggaggagtgtcgccccttggcaaaaccccggggggggatcccacaccgcggggggtttattcctagcgggcgcccccccc

SEQ ID NO: 28004 - DNA, 482 bp, Glycine max
  Clone ID: PAT_MRT3847_125289C.1
actgttcattgcagttccatgacaatgttaaagcctttgacttttttgtttttggcttggttctttcagtttcctgttgttaatggtgcacacgcagtgtcttccttgttgaggtgttactttttcttgtttttttctctccaagttttccctcaaccaaacagaatgagctaaaaaaatgtggaattttctctttcttcttccacttcaggtcttccggatgcttttattttgggtagttattttggtttttggatgagtgatatgattacttatctgacatatagctttttttaccagattttttggttgtttctaggttgctttttacttgcatcttttgctgttgaatatcgctcccataatttgcttttgctttccatactacattggaatgttgatttttttttttttctatactgaattcctctgctatgtccaattgaccaattcaagatgtatctattctgtccctaatcatc

SEQ ID NO: 28005 - DNA, 585 bp, Glycine max
  Clone ID: PAT_MRT3847_12528C.1
ctttttcttttttttttttttttcttttttaaacgtaccccccttatgggattaccaaacaaatccaaaacaaactgttataacaacccttttttttttttaaattgaaggctgtacccatattttgttacaagtccaggcgctaaaaattcttgattgaagaaataaccttggggaaaaataacaggcttaattgaatgaggggcatccccccttggggggcaatccttgtattataggcctaattgctaataaaagggtggatggggggccacccccctttcctaaaattggatggcctatacttttgcagggataaacgatcccctccaaaccccctgggggcttcagattccctttgaaatgaataatccgaaggctgggtactttattttggacccttggactatgctacctgggagatacgtacggattggattcactaacctccggactggaaacaactttaacatcacccagattcaactattttattgccttcaaaacctctgaatattaatgcaagaaaggctgcctgctcaattccccttgagaaacaaattgaaaaggtaaagccggttcttg

SEQ ID NO: 28006 - DNA, 572 bp, Glycine max
  Clone ID: PAT_MRT3847_125290C.1
agtttccgtcatcactgtatgacgtcctccttctttggggggggggggggggtctttagaatatacaaggtgagatgagagaaataacaaaaggataacccaaacaaagtagggaagacctttgattattgggttgttagagacgagcggcgggaagggcccccacagcggtatgtggtacgtggtattaagcacttataagacttagactggggaatagtccaggtgctgggggcaccccgttaccataaaaataaaatatggcgcggcgaggcgaacgccgccacggttagtaagcaacgtaggggaaaagcatcgctagcgtggcgcacgcacgacgcatgagccgggtaatggcgcgcccattatgtcgatcgacgaaaggaaataacgccgccagacccgtttattaggggggacgtataaaaatagccatagcccttgacggacgacaccgcctataacacttaaatagtcagccgcagatgaataaacgttttaagccgggcacaggttcgtttagccgatgattgcctcattgaaggtatgggtagttaggtgattgatagaga

SEQ ID NO: 28007 - DNA, 700 bp, Glycine max
  unsure (1)..(700): unsure at all n locations
  Clone ID: PAT_MRT3847_125291C.1
cggaagacgacagaagggggacactcattttacctggaaattcccactttcctcatcagacccagtaaccaaccctgagaacaatcccctccatttcatttccttcttcagaaggattcttccatgatttctgattcaatccatttttcacactgcaattttctaggagaattcgcataaccccactaccagaaaactccaaaaattaaaactttttaaggttttcagttaacccttttgttattgagtttgtaagcgagccatgcctgaggttttggatataagctccgacgaagaagagggtttggaggagagtctcactgtaacagacttcagttggataagagagatgttgcaaacttccgatgaagaatccgatgattcagtcgaggttgtcgtaatccacgagaacaggcctcagatgaagtcaaagtcttcaactttgactgtgaaagatgtgggcgatgatgatgacgatgacgatgattgcgtgattttggagggtgaccctgaaaacagtgtcgcatcagtggaagaggaagcaaatggatcagatgangtgctagtaattgnggaaaagggtcagattgcatgccgagactatcctcacgcgccgacatctttgtggtaaaattccattctcttccacaccccacaagcagcactgtagccagtgccattgntatgtatgtgactccct

SEQ ID NO: 28008 - DNA, 148 bp, Glycine max
  Clone ID: PAT_MRT3847_125292C.1
ttttcttttttttttttttttttttcaaaattttttggattagcaacaaagctttgatcataaagggagcccatggtatagaaatcacatttggttttatactatttaatgtgaaaaacaaaatatgagcccttactagcttaaacat

SEQ ID NO: 28009 - DNA, 155 bp, Glycine max
  Clone ID: PAT_MRT3847_125293C.1
gtgactcgttctgtgtcggctgcgacttgacctcttgttggttcggctgctagaagaccatctaccggacagctgctagatgacgacggaacggggagcacagtatcgccggcaagcccggtaacacctgcagaggctcccccatgttcgcttac

SEQ ID NO: 28010 - DNA, 272 bp, Glycine max
  unsure (1)..(272): unsure at all n locations
  Clone ID: PAT_MRT3847_125294C.1
aaaaaaaaaaaaattgactgttttatttaacaaacccttccaacaaaattttgntcttgnaacctcctcaacccactggaggtcgtgatctgtaaatttttagttaattatacaacaaattttttaaaaaaaaattattttctcttctgagctccttcttatttatcgactaatccaccttcaattattttccaagatttcaataaaatcttttcttccgtgttatctcttttacttaattccaaattttgtaagtataatacttggctatg

SEQ ID NO: 28011 - DNA, 537 bp, Glycine max
  Clone ID: PAT_MRT3847_125295C.1
ctcgagccgctgtttctcttaatttttaaaattccaggaattcaaaagtttggtggttggattctgttttttgggcagcaatggcgaaagcacgcaagtcgcaagaagaaattgcgagtgaagccatcaagcatgctttgaaggctctgcggaagcgccatttgcttgaggaagctgctcatgctcccactgttctagctctttctagacccatcgtttctcagggctctgagtggaaagagaaagcagagaatcttcaaatggaacttcagcaatgctacaaagctcaatctcgcctgtctgagcaacttgttgtggaagtagctgagtccagagcttcgaaaacgtctcttcaagagaaagaaaatgcattggctgatctgcaaaaggagttgactgaattgagggatgagtgctctcaattgaaggtggacttggaagaaaaaattaaatctctggaactggttgtcagtgagaattctgaacttaaagcacaactggagcagatgactactaaagccaatatagctgaagctg

SEQ ID NO: 28012 - DNA, 297 bp, Glycine max
  Clone ID: PAT_MRT3847_125296C.1
ctttcgcgtgagactatccctttctcatgtcgtggatgctggcgcgtcgaataatgcattgctgtcttgctggccacatgcccccgaaaggagctgatgcttgaaggatcaaacctaatggatttcgtgtttcgtgaaaccgatcaggtaaagattacggtgaccgactctaaacactccctggtcatgcattccatgctgttccaactcaaacttcaaatatttcactacgggtaaatcgttgaagctacatcaatatgagaacacgctggtattacgcacgacttcctattcctc

SEQ ID NO: 28013 - DNA, 891 bp, Glycine max
  Clone ID: PAT_MRT3847_125297C.1
cggtcgtttttattaaattccttggatgaaggtgatgaagatgaaggtactcgttttctttgttgttaatttctcttctttttccttcgatttcgttttcgcgtcttcaaaaaccagcctggcgccactgttgctagattcacaccaacgctgatattttcttttgttttgtttctccgctgtccgggattgtaaattccgggtcgggtcgtgaccgttttttacgacagcgatgggcgatcttcatgtgaacggcgtcgttttcggggaggatcgcccctgcgcgtcctcgccgccgtcgccgccgcttccgccttggaatcccgatccatcctccgtcgcggccgacgcctgggcggcggccgagagaaacaccgctgagattctccgccgcatacggcccacgctcgccgccgaccgcaggcgcagggaggtcgtcgattacgtacagagactcatccggtacggcgcgcgctgcgaggtttttccatatgggtcagttccgttaaaaacatatcttccagacggagatattgatttgactgcactcagctgtgaaaacattgaggatggcctggtatctgatgttcgtgctgttcttcatggagaggaaatcaatgaagctgctgaatatgaagtaaaggatgttcgtttcattgatgcagaggttaagcttgttaaatgcattgtacaggatattgttgtagacatctctttcaatcagttaggaggactcagtacattatgttttcttgagaaggttgatcgacttgttgccaaggatcatctcttcaaacgtagtattatccttattaaagcttggtgctactacgagagccgtgtactgggtgcccatcatggtctgatttcaacatatgctttggaaacact

SEQ ID NO: 28014 - DNA, 518 bp, Glycine max
  Clone ID: PAT_MRT3847_125298C.1
gggcttaaagtatttgtttattgaatcataatttcgaattatgggatggttgttgagaaggtatcaaggggttagatactggatagccacaactacctcccactcgaagcatccgctcaccttgaataggattagaactcatgatttgaaaccaactcatgattggaaaccaattaggtcacatatgataattatttatatgtttttatcttttaattaaggcgtttgggatttaaattttaattattttttggatattaaataatttgtattgagagaaaaatattcaccttaaatatatttataatttttaacaaagattaatcatcacttttatcaatattatgttgagaaataaaaaatcatgatatgaagattactattaaatttttaaggggaattttttttataattatttacgcctacatgaactcacccaaatctcatggcctaaaaaatattttcgcccctagactaattcccatgggaatagcaattaagacctttttttttatttt

SEQ ID NO: 28015 - DNA, 476 bp, Glycine max
  Clone ID: PAT_MRT3847_125299C.1
ctcataatatacttccaccacgttatgggtatacttgcggcgcttcttgtctacctcttacgtctctctcctggttccagcatatcaactcatcgatccatattggaccttgacctagccaagtttaccactctgaaacaggtgtctacactgttccagctatggccgatagagcatggacgtgtctaccataaccacgaagaagaggcgaatgcgacttagagatgtatcagcgattacctgggaactatatcagggacatgaatgcaaacagaccatcaccctattctcatcgtttaggattgatcaagttcagctgacatcactccgtgagagttcatcataaagtacttgcaagctcccaaggatgtgtgcgatcgcatcaaggtggcctgctagataatgatgaaggaacaatattcttgtgaccatgcacctgcatcatgcgattggagaaaaaaacgtgtcatcaccca

SEQ ID NO: 28016 - DNA, 185 bp, Glycine max
  Clone ID: PAT_MRT3847_12529C.1
actcacattggggtcttcattttttttttctttagtatgtgaataatttgtacataatccctctctaacaatttccaagtacaaaataccactaattattggagctaccagaaaacccctgaatcacccacccaaacctataaatatctgtagaaatagatcacagacttgttgccttcaaaaac

SEQ ID NO: 28017 - DNA, 506 bp, Glycine max
  Clone ID: PAT_MRT3847_1252C.1
atcaaacatccaatattacaacattgctagtcaaaatcaactcatgaatcatattctcaacaggtcttatacacaagcacactgttaccagcactgcacaaaaatacatataaattttttaatacattagctatgctcctaggttttaaattgccgggacaatgcatttctataataaagtgagaccttcagacttataaaactcagaagcctgaagtttattaaaatttggaagtataaagtaaacaagagggtaagtactaacagtcataaatccttctctattcacagaaacacctctaaagctagaggaccaaagccacccccagaaactatagaacacaacccaattgattttggtcagaaacacaaagttgaatctgcccctaaaatttcccataccagattcagagcaatcctaaacacaattggaaactaatccatcagccaacacaaaagagactggcactcctgacacctcttgtcaacaatttatgttaatccac

SEQ ID NO: 28018 - DNA, 2669 bp, Glycine max
  unsure (1)..(2669): unsure at all n locations
  Clone ID: PAT_MRT3847_125300C.1
cggacgcgtgggctttttttcttctcttttctcgtgttctttatctctctcgctagctcacagaagaagaagaagtaaaaggcctttatttataaataaaagaaaaggagagaacagattataggaaacaaagcatgaacggtgctgcatgtgttgaggcagagtgctgtgagtttgtggaagttgatcccacgggaagatatggaagatacaatgaaattcttggcaaaggagcttctaagacagtctatagagcatttgatgagtatgaagggatagaagtagcatggaatcaagtaaagttttatgactttttgcagaatcctgaagatcttgagaggttatacagtgaaattcatcttctcaagacattgaaacacaagaacatcatgaagttgtatacttcctgggttgatactgccaacagacacattaactttgtcactgagatgtttacctctgggactctgagacagtacagacttaaacacagacgggtgaatatcagagctgttaagcattggtgcaggcagattttggaagggcttctctatctgcacagccatgatcctcctgtgatccatagagatctcaagtgtgataacattttcatcaatggcaaccaaggggaagtcaaaattggtgatctgggccttgctgcaattctccgcaaatctaatgctggttttactccaggcacacctgagtttatggctccagaagtgtatgaagaggattacaatgagttggttgacatatactcttttggaatgtgcatcttagagatggtcacttttgaatatccttatagtgaatgcaaccatcctgctcaaatttacaagaaagttgtatctgggaagaagccagaagctctttacaaagtagacaatcccgaggttaggcagtttgtagagaaatgcttagcaactgtgtccctcagactttcagctagggaactcttggaggacccttttctccaaattgatgattatggatttgactcaaaagttttgcagtatcaaagagattgttatgaagtaacgccattaattagacaacctgtgaatggaatttgtatcattaacaacaacttaatgagtggggacactgataatattggtggttatgggcctgtatctgaattggattatcatcaagacgattttgaagcgactgattttcgtctcgttctttgtgaggcggtcgtcatttcggctgctgttgtctccccgatccttgctacacgagcagacgatgccatcctttcgaggctctcctctgcagtctaggtaggtcgaattagaaacatctacttccatttgacattgagactgataccgcactgagtgttgcaaatgaaatggtagctgagcttgatataaatgaccaagatgtaacaaatttagcaaatatgatagacaatgaaattgcaacattggttccagagtggaaaacaggacccataatagaggaaaaatcagaatgttcaagtgcaagtgtctgcctcaattgtgctgcaaacggttacttgtttgattatgtatcatcaaataatccatgtggcaagaaccttcaatttcttcattgttctaaaactggatgtgctgcagttcatggccgatttgaagagataacataccaagttgaagggtctgaaaatagtgctagagaaggtgcactggatgaatcaagccaatccaatggcattcaatatacagatatctgggctcagagagatgcaccggatttatgccatgaagagttaaaagagatgcactgtgaccaagctcatgaggcatcaaactcatcaaacatcaaggaggatagaaaaactgttaatgtggatgaacaaagtgatctcaataccaaaaagtcttcttcaaaccctgcaccaaattgtgttttcttggactatgaaaatgaaataaggcaagaactaagatggctcaaagcaaagtaccaaatgcagttaagggagcttagagaccaacaactagggcgtaaaccaaaatttactagcatatctcctgaccccgaaaaaattggagcatttgaaagatggaattctgaggctatcagatacacccaatttgaagatacaaaacaataaaccactattgagaactatagtttctgggaagcattttcatgttgaatctgagaaatgcaacactttggctgatcaaatggttcaaaatgttgatgagatttgtcagtctaacagtcctgagcaaatgatcacagccagggatttctttacaggagtattgcttccacactcacttcagagggcaacctcacttcctgttgatgcagtagatgtctagaaactagaaacccccaaagttcataattttctcatcataagtgggcaccaatgtatctacattaactggttgccagtttacttaaatttagggaaagaaaatcagagccagagagtgataggagttactcaaacgaccctagatgtaattagcttgtgggcacccttttctagtaaggtcacttgacctagtatgaaaaatgccatatgcaaatcatgcacaggctaacgcaatcacattaatgtaagcaaagttttcccttgagatgctgaatttcagctccatctcctagaggattatatattacagatcatatgagatgctatattagnnnnnnannaa

SEQ ID NO: 28019 - DNA, 734 bp, Glycine max
  Clone ID: PAT_MRT3847_125301C.1
ggaatgtgcatcttagagatggtcacttttgaatatccttatagtgaatgcaaccatcctgctcaaatttacaagaaagttgtatctgggaagaagccagaagctctttacaaagtagacaatcccgaggttaggcagtttgtagagaaatgcttagcaactgtgtccctcagactttcagctagggaactcttggaggacccttttctccaaattgatgattatggatttgactcaaaagttttgcagtatcaaagagattgttatgaagtaacgccattaattagacaacctgtgaatggaatttgtatcattaacaacaacttaatgagtggggacactgataatattggtggttatgggcctgtatctgaattggattatcatcaagacgattttgaagcgactgaaattggtctctttgattgtgaagaggacgacaatttggctgaagttgacaccacaatcaaaggtagaagagaagacgatggcatctttttgagactcagaatagcagataaggaaggtcgaattagaaatatctacttcccatttgacattgagactgataccgcattgagtgttgcaaatgaaatggtagctgagctcgacataaatgaccaagatgtaacaaatttagcaagtatgatagacaatgaaattgcagattggtcccagagtggaaaacaggacccagaatagagtaaaaatcagaatgttcaagtgcaagtgtc

SEQ ID NO: 28020 - DNA, 261 bp, Glycine max
  Clone ID: PAT_MRT3847_125302C.1
gggtttagttttttctacttctttacgtagcttttctagtctctgactcgggactgaagcgcaagtccccttctgaggccctgtctgtgggcggggaaaaaaccaggacctgtttcacccgagacacgcctgcgcaaactagatgggggggtgcaaatggccgggggaagcctttctccggagaaggagggggggggatgcaaaagagcgggtggcgcccacaccaagataaagagccgccccacctgctgaacgggggga

SEQ ID NO: 28021 - DNA, 248 bp, Glycine max
  Clone ID: PAT_MRT3847_125303C.1
ttcggcctcgagagtaactaaaattcagaggtgccaaaaatcctgcctctagtctacatgttctgaaaatcggatacctataatggtactcgtttatttatcacaatgatttttttatatccataaaagaatcaaagttttaaaaaaaaatcaaagttgaatactcagaaaaatttataataattcacttatacctatcatttgatttgattgaagtactagaccccttaatattgtgacaattctta

SEQ ID NO: 28022 - DNA, 158 bp, Glycine max
  Clone ID: PAT_MRT3847_125304C.1
gggggacccgtgaatcaatatccttggggatagaatgtggggcttggtggtgaatctggtggaccaaagtggtcggtaggtattcctttggtcaagaatggtggatagattgattcattattttaacgtactttggagcattggatgagtgaatggcc

SEQ ID NO: 28023 - DNA, 463 bp, Glycine max
  Clone ID: PAT_MRT3847_125305C.1
acagtcccctcccttaataaaactagtagggaaaaaacttgctaacgaattttttctactgggagagtaatcgagacattccaaacccataaaaaacctgaatcaaacccttgacatcgccgatacacatgtttcaaactgaacaaagttcagtcacctgcaataccaaaacctaatgtccctagacccaggactggaatgaaaaacactaaatggaaaccatgcgccaacaaactaaccattccaaaacaaggcaaaccttgaaaaggatagccgcctcaattttaaactcctacatttccaagattctagaatacagcttcttccactatgaacactgaccttgggcagatctacatatagctttatacaccaggggttaatagaattctatttgtgttactacctgaagtgtgagggaatgctaccgctaccccaggggaataaaaaaattatacaaaaa

SEQ ID NO: 28024 - DNA, 256 bp, Glycine max
  Clone ID: PAT_MRT3847_125306C.1
agcgacggcgccctttttttttttttttcacaaagtgaatttcataagcatcccttgaaagtggttccaaaacttgctagagttctacaatttagaatttaaaaacttttgtcgttttgaataaggccaaaaaaccaataaaaaaaaaaaaaaaaaaaaaaaaataaaacacataaacttcaaaaaaaaatagaagattggtgaacaaaaaaaaaaaaacctcgaagaggggggccccctcatacgggaaattcac

SEQ ID NO: 28025 - DNA, 415 bp, Glycine max
  Clone ID: PAT_MRT3847_125307C.1
ccaaggcttccgaaaaaaagaaaggaatccatacccgtgggcaaaggcattggtggggacctgttacagaaccttggcaaccaacaggaacggtttaccgaattttaacaagaagggttccatgctaactttgaaagggcaaaaaacccaaggcgcttcaaaaatcgtggcaaaactaacctacttcctttttaagaagggccacaattaaatttcaaccgtggacggccatccttccggggtaaacgccggaatgctcgatttggaaagggaaaactttaactttgccgggaaacagaaaattttaaagttcaaccaaaggttcaatttgatcccaacacttaagggaacctataaggggtggatggacttattcggataaaactttgccggagggggtcatttgaccggaagg

SEQ ID NO: 28026 - DNA, 364 bp, Glycine max
  Clone ID: PAT_MRT3847_125308C.1
aacacattgaatcatgtctgtaccgtacgatatgctgagcaacagccagaatggccatattccggctagcgagcggatacccgtcattgccaggccatttgtcagtgagagggcgaagaagaccctggatatcgtagaaaagttcgtcgaagaagaatgcattcccgccgacgccgtatacacacgccaaatcggccaaaccacaaaggagcgcttctcctcgcacccttccatcatcgaagacctgaagaagcgagctcaggagctgggtctctggaacatgttcttgcccaaggcacacttcaaggagggcgctggcttcagcaatctcgagtacggcctcatggctgagtacttgggcaag

SEQ ID NO: 28027 - DNA, 424 bp, Glycine max
  Clone ID: PAT_MRT3847_125309C.1
ccctacgcgtccgattgaaattttcacaagaggaatttcttacagcttggtcaactcaggtgcgtcctgcaacaactctgttggctgatgggtgtccatatttgcatgctatggcgcatgatagttcagggtgtacaataccagacgattgtgacattggcgctaagttgacaaccataaacaatatgtgtgcatatgggctcaatcctggtatttcaggatctcgtgttttgggcaccattcctcagtctatttcacagcagactgtctggaatcaaatggctacagtgcgaacaccattgaattttgattctagcaagcacagcttgtgtcaaaactttatcgaccttcttggaggaggaattttagtggacacaactggagattggatcacacttatactaaattttccaatttgtaactt

SEQ ID NO: 28028 - DNA, 349 bp, Glycine max
  Clone ID: PAT_MRT3847_12530C.1
ttttttttcttttttttttttgggaggatgacaattatgacaacaaattatttatcagttgtgagaagagggtaatattactttaacaataacatctttttagaagatggatggccaagcctaaagtgctgcaagtctatgggtattttattacatgaaaaaattgaaacactagcagaaaccccaggaataaaagttgtgatagaactaggagcatactccttgagaggaagcatcgtcagcctataaagacctttcaccatatcaactgtaccaatcctctttaggttctgcatatcctggataaaacatttatcattcatgaaaattagcttgcaaggcaatgaag

SEQ ID NO: 28029 - DNA, 2626 bp, Glycine max
  Clone ID: PAT_MRT3847_125310C.1
caaatgcggctggaaggatgagtccagcgaatctggaggaggagtgcttgaaacttctgaaaggagagcacagcgtctggctgggctccggtcgtcttctggtaaccaagttctgcaaagctgaggatcagtcctcagtccgtagggtctacgatgcgcttggacctcactttctctatcgcctcctcagaaccgctatggcaagtggaggaggaggcctcaacgatccccaaccgcaaccttaagcttatccatcacgcttctcgccgcattttgtcgtgttcccgatattgcttcctcggaggacatgcttttctatatcccccagctgaggagctattgtcttggaagtaatatccaccaggtctgtcttatctgttcttgaagaatgctatgagtttctatacttggtgtctgctgcttctgaaagtggattcgcgagatttttcgattccggaggcatcaagatgctagcttctcaaatgcgttctctgcaagatgtacaatatttgattatacatcagaagaggctcttttaaactgtccagatttcgactatagaactcttagcagtctttatcttctcattgcaagatgtctggcatcatcagaacaggatactaaagcgtatatggatctttctgagattgtctcttctggcttctctcgatgggctcatcggtacccccacatcagagacgctgtcaagaactaattttgatcctctcgatctggattagttagagatggatgctttcaacttccaaggtattatcattgttgaagtgatctaatgatgtgccaaataatacatggaattggaaaaaggctacctatcagaggattgaagctcatggttacaaatcaatgcctttagatcggatccctacttgcccataaccggttaaaaagggacacagaccttttgttacaagtaggaaaaaccatggtctccacatattgtgaacatactatgagaaatttgaatacggagacttgtgacgctcgttaaaaaaaaaaagaatttgttcgttttagcacaggatagaaaaataaatagtcgtctgtattccaaactgtttgtaccatcattttccgttaggagatataggttgtagataacattttaatccatgtttttcttattaaatgagttggcctaattaaaatatgaagcacctctggatacttctgccacagctgaagcaattttttcaaagcgacataatgtggctgatgcttactccttggttgagaggataataaaattaatatcaaatgttgaaggaaatgatggaaacctccttgatgaaggcacattgacaaagctgattcaccaactgaatgagacaattgctgttgtactagagtatttagaagatgcaaaggaacatgggcaaaagaaaggagatgatttacttgcttcagtgcgaattattgggagctatcttgcagaagcacctgtagcatgcaaggagaaggttcaagatcttttagggtatatgctttctcttgaaggtgaagatgaacaaaggcccttctacgctgtttgctttctgctacctatgttgtctcaaattactatggagattgaaggatgcaaagctttggcttcatgtaaaggacttgaggctgttttagattgcttcagtaaattagttgggtcacatgcttttctggttgaggataatggttgcatctttatggcatgtgatacaataatgaatcttttattaaagaaagacaaagttcagataaagttggatgtatcagctattgttgatcttcttaaagtgttggctcattggtcagaaaacactgatgaaatgtcaagtatgatgatggcttcaagcatttgtacactgatatttgattatacatcagaagaggctcttttaaactgtccagatttcgactatagaactcttagcagtctttatcttctcattgcaagatgtctggcatcatcagaacaggatactaaagtggatatggatctttctgagattgtctcttctggcttctctcgatgggctcatcggtacccccacatcagagacgctgtcaagaactaattttgatcctctcgatctggattagttagagatggatactttcaacttccaaggtattatcattgttgaagtgaactaatgatgtgccaaatacatggaattggaaaaagactacctatcagaggattgaagctcatggttacaaatcaatgcctttagatcgcatccctccttgcccataaccggttaaaaagggacacagaccttttgttacaagtaggaaaaaccatggtctccacatattgtgaacatactatgagaaatttgaatacggagacttgtgacgcttgttaaaaaaaaagaatttgttcgttttagcacaggatagaaaaataaatagtcgtctgtatatccaaactgtttgtaccattattttccgttaggagatataggttttagataacattttaatccatgtttttcttattagattttggtccctaatttcttttttcttttggtattgatttataatctttatgcattcacattttttctattaaaaaaaaaaaaaaaaaaaaaaaaataccaagggcggccgctctagagga

SEQ ID NO: 28030 - DNA, 156 bp, Glycine max
  Clone ID: PAT_MRT3847_125311C.1
cgtgaagatgagagatgagaccccgaaaccccatcttcacatttcaatatgggacttcaaaccctccatcaatggataaacccatcaaactaatcagcacaatgaccctatggaaaaaaagtgaaaaatccaccttccaaatcttcaatcattatt

SEQ ID NO: 28031 - DNA, 500 bp, Glycine max
  Clone ID: PAT_MRT3847_125312C.1
ggctcgaggcttaatcatgaatcgacgtcgtttaccggagaggacactctcggcatcccccaaaccattttcatttttgaaaaggagttatcctttttgatcgattttccagaaagcgttccgattgtgctgctattccgtgtccgactcggctgagtttggccgatccaaacaagcgagtcagttgttggaggaaagcccctcacccaagaggaaccagttccacccgtatgctccagattggaaaaatggttacactctagaaggttaaaccccttctgtggtccctctagcacactatcgaagatactagatactccatccgcacgtttcgaagctattcatgatattgatttcagtgcttctgacttgaaaacattggaacgaactgaccgaagcaatttgcttcttcataccatcaaaactgaagagaagaaaacctctatcgagaatggcagtcatttgcaaacaaatgaaaagatgctgtctgctccaagtgg

SEQ ID NO: 28032 - DNA, 475 bp, Glycine max
  Clone ID: PAT_MRT3847_125313C.1
catcaatgttatggttgtctatggaccacagcacttttatgagttctacagttaagttgcttaaacacatggactcattaatatattgactacggggtgcacttcaagactgtactcagggctttgctttttacctcaaaatgatcagttctaaatcatttcccaaattttattgttaaatgcttcctatgactcatggcaaaataaaaacattaaggatccaagtgcttatgttccctttgatcaattgcgttaatgcaagcatgatatcaaaaactgctaaccttatcaactaagtgcttaacatggtttcaggacacctttatcaaaggcattgcgcgtggctggcaacgccgtatctaaaagccattttatttatggtgcatatgcacactgcacatcttgaattcaagatagtttgatgacaaaacactaccccagtgtgttcaaaacattaattgcaaaggccttggct

SEQ ID NO: 28033 - DNA, 737 bp, Glycine max
  unsure (1)..(737): unsure at all n locations
  Clone ID: PAT_MRT3847_125314C.1
gcgcccacgcgtccgcccacgcgtncgaaccattgtggcctcactaagggatgaagcatataagcggcctcaagcacattcaactgtacccgacgcgagcacaaaaatggtaaccattgtgggttcttacaatgtcactcctaatcaaccaactccaaaggatccttcatggctatccgatagtgaccaaatcggtgtcctaggtcatgtagccattgtctacatatacgaagcaaatcccaacagcaacaccattgagagattgaggaactctcttagcaagcttttggtgtactactatccattcgctggcagattcagcttgacaaaaagtggtcgcatagaagtggattgtaacgcaaagggagtgacattgattgaagctaaaacctcacacacacttgatgattatggagacttttcaccttcaaagttgaccgaggaacttgttccagatattgattatactccacccatagaggagattcccctattactacttcaattcacaaggttccattgtggtaaaggccttgccattggagttgttatctctcaccctatgactgatgcaaccggcctcactcagttcatgaatagatgggcaaagctggctcgaggagaagaactaaaccctaatgaaattccttttctcgatcgaacactactcaaatntccacaccagccatcatcacaacgcgttgatcaaccagagttgaagccctgtactacattag

SEQ ID NO: 28034 - DNA, 1134 bp, Glycine max
  Clone ID: PAT_MRT3847_125315C.1
cagcagctataggaaagaaaggttcagaggcaggtccaactcatgtgcttgttgtccgtggattggatgaaaatgctgatgaggaaatgctccgctatgagttttccaaacatgctccgattaaggatctgcgtcttgtgagagacaagtttactcatgtctcaaggggatttgcatttgtacacttttattcggtcgatgatgctaccaaagctctcgaggcaacaaatggaactatgctagaaaagaatgggcagattctaagagtggcgtatgcaaaaagtatcctaggccctggatcaggaacatcaggaacttcccaatcaagcagtcttgcagctgctgctattgaggctgcgacatttgcccaacagtatgattctgtgggatgggctccaaaagaatacaatccagatgccaaacaatctactggtccagaagttggtgctccacaatcaggctttgtttgggatgaagcatcgggctattactatgatgctgcttctgggttttactatgatggaaatactggtctttactatgatggtaataatgggatttggtattcatatgaccaccaaactcagcagtacacaccttgcactgatcaaaatcagaataaaacgtctaataacgagtctgaaccttctaaggtatctgatagttcttaaagtaaaaaggtcatttgtgcaccagctactactgttgcttcagttgagaagccagcttcattggcagatgctgtacaggctgcagaagctgctgctttagctgcaggagaagaaagagatgggagaggaattataaagcctgtcctggcacaaaccccacaaaatagggcaggactttggagtcctcaaaagaagttggatcccaacctttaggtgcaggcagggggcagttacaaaatgtttattcataaaaaaacacttaccaggtttcgggggatgtcaaagagtttaggttttagccccgtaaataggagttagcttttataaaaaaattatttagatgttttatcaaaattcttattgttaaccctagtttgccaggacaattttggaattcattttttggaatttaggcaacatgtccaaatctgccccaattaagcaaaatttccgctttggttgg

SEQ ID NO: 28035 - DNA, 106 bp, Glycine max
  Clone ID: PAT_MRT3847_125316C.1
cagatttaatttcagatagattagcccttggactgggtgcttctggccctctgaaacttgaagatgtgaaagagatatcggagatgtgccttaaagtggcatccag

SEQ ID NO: 28036 - DNA, 238 bp, Glycine max
  Clone ID: PAT_MRT3847_125317C.1
gccacgcgttcgtacgcctaccggttcacgaattccatacttacggcaaaccatcagcgacttcgagtcacgctgcagcaactgggacatctgcatctggtagactaatgctacagtccgaaccacataattgttccagtagaagactgatatgaagaggtccacaaccagatcatgacatgtatttactgactgtggagaccttatgatgaacaatccatttacaactattaatgat

SEQ ID NO: 28037 - DNA, 318 bp, Glycine max
  unsure (1)..(318): unsure at all n locations
  Clone ID: PAT_MRT3847_125318C.1
ggctcgagatctctgtgtgctcaatggccatagaccctgtatcagcgattgaaggtgggttgcctcccagggaccaccacgacccacccgcggccccattctacgaccccggcgagcccggacagaggncctccatccgagcccttatagccgggatccggacgccgtacgatcagtacacgaatccatactcccggccttcggtttgtaccacctaacagacaccggcgccgagccctgcacagttgctggcgttctcggactcggtggggccggaggaggcccgaaagcggtcgccgcctattgcaccgaccgcat

SEQ ID NO: 28038 - DNA, 459 bp, Glycine max
  Clone ID: PAT_MRT3847_125319C.1
tacggctgcgagaagacgacagaagggccctacgcgctgagcgcgtctggggctagactttttttcaactttttgtttattttcttcatcttttaagcttttaatccctcctttttttatatctgtaagtcatgaataaaaaaaatcaattcttaataattaaacataaataactacttaaataatcatttttaaagatatttttattataaaaaaaactcatatttaataactatcggttaaggccaatagatttgaagcgtgatatccgtgatgtgtttaactcaagggaatgtcttgtccttgtaaatgataacagtttgtgggatattgtcaatgtcaacatttcttcagtatttgttacttaaattcaaagtcgatctgcattgatttaccttgtgctgaatggccccctattaatctataaagtacccagatatagggttagaccctatattc

SEQ ID NO: 28039 - DNA, 245 bp, Glycine max
  unsure (1)..(245): unsure at all n locations
  Clone ID: PAT_MRT3847_12531C.1
gtgatatagggacctgatnntgaaaaaancgagtttaatggttcaaatcaatnttaattgaaaattggggccaattttctgatgtcttcagagcaaaacatcctgatagattgtatgcagaagggnagcctacaccagttggtcacaaaatacaggtgctgaagtatttaacttcggaagtagaattgatcatattctgttttctggttcatgctaacatgaattggacctgcaatgccatagtt

SEQ ID NO: 28040 - DNA, 374 bp, Glycine max
  Clone ID: PAT_MRT3847_125320C.1
tccatacctcgcgcctgccgctaatggggcgccttccatgtcaggaaccatggcgtacccccttcactcatcacctcccgccgccgcgccggcctcaccatcttctcggacactcacattcctgacaagctctgggactcctgctcggcctccgctcacgaaggttactgaagcaaaatgctcgcatcaactatctccgatgaaaacgatgccgttcaggtcctcgattgaaaggactacttcgaccaccatacgctgctactctcacgccggaactctaacaggtggccggagtttcataccgactatcgtgagctggtggcgacgtataacgactagatgacgattctggcgcaaaagttgctggctttgat

SEQ ID NO: 28041 - DNA, 751 bp, Glycine max
  Clone ID: PAT_MRT3847_125321C.1
atggaaaacaagataggggcacaaaagagcactaaccagggaacatatgtatacacacatgtagtgagagagaaaaaaaaagggtggtttttggtttctcttttggttcctttcttatatgccatatttgcatctgatgcagcaattcctctgtaacggttattatttttgtgaaggggttggagagaaacactgatcagtgactactgcttggttgctactactgaaaatggattacagcaatgacaacaaggagccatgggattggcatagggaggattattgtctccaaaggagtttcaattatgaaatttcacaagggatatggaatggagtttctcaaaatgaagatctttcctttgtgttcaatgatgaaacaaccccagtgaaggcttgtggggactttgcgtacaatgtcaataatagtgagtcaaataatgtacaaaaggaatcagacaaatgtttgaagagttcttaccaaattaagagaaggcggatgctacaattcaattctcaagatgggggtcatttactctccaatgaacagatgtcttcagcatatttgaaagggaaggaggagccaaaggaggatgttttccctgaattttcacaatgggtgtctgggacaccaggaagtgcatcagcttccaattatgaggaccttgagtcagctgaagggtgggctagcagattgctttaaggatgctgaaatgcaattgtgtcctggatgaatttggaatttttctggggc

SEQ ID NO: 28042 - DNA, 314 bp, Glycine max
  unsure (1)..(314): unsure at all n locations
  Clone ID: PAT_MRT3847_125322C.1
agtnncatnaaacncttanntnagctngngaattcnnctcnanatttcannncantgatcnacnaannacttaanctnatcataatcgncagcgnnaattgaagaagatnacgatcagaaacatcgcagtnggaangcctgaaganncgantcaccaccnanangttgaangaggcnttcantgnagncatctcaatnttcatcttcnnnttcnanggntcaggntcnggcatagnntanaacaagctcaagagaactgtgtnncagcctgncngcatnatataaggtacangagaaggatnngnagngttgan

SEQ ID NO: 28043 - DNA, 283 bp, Glycine max
  unsure (1)..(283): unsure at all n locations
  Clone ID: PAT_MRT3847_125323C.1
ggngattcttgtcttnacttggaagagttgtgctttaacattcttngccatgaaactgaaacngnagacccatgctgaanccggagcaacgtattgtagcagttaagcatntggggaatactncttggtcaatgtacaaatggaggaaanagctgagatgattnctaaaatttgcatgacttccatncgaataactggtaagcnnttggtggtggnggaatgngcnaccatcanaagngggcccanccgtganccnccatgtggnncttgngntgggcnngcg

SEQ ID NO: 28044 - DNA, 239 bp, Glycine max
  unsure (1)..(239): unsure at all n locations
  Clone ID: PAT_MRT3847_125324C.1
aaactaaacatttttttcattaaaatctgaggatgaatagaacttataacccatggggcaatacgggaacangaaattacgctctgccatgctggcagttcaacccttgcccactacaacacaccaccgaccaaatgactcctagacttctctatcaaacgcgggaagaggagcactccccgccgcctaggggcccgagccacccaacccaggggaggacaaacccccccctggcccac

SEQ ID NO: 28045 - DNA, 474 bp, Glycine max
  Clone ID: PAT_MRT3847_125325C.1
gggattttgctcgtctaaaatgagaataatagtaaaaatatgacatttcctaatagagatgttgcatgtcgtgtaatgatgggtcatgaaagaaactccgaatacactttaatttgactgactagaaattttttcacaacatactattttttttaaaattgatttctgttttgcctggtgaaacttatttaacggttcaacattcttataattttgaatcctaattttcactgttatgataaatcttttgcaaaaccaatcaccgtcaccatctatcttgctttgttatttcatgtggcttgccttgttctattgttgttatggacagggtaggtcttttgctcttttatggtagaactattcaatgataatgatgccttcttcactgtttatttttttttaaaaaaaatcattgtgctgctatattgaccatgtatttcagtggcatagagaaagcagcgagcctatgtatca

SEQ ID NO: 28046 - DNA, 234 bp, Glycine max
  unsure (1)..(234): unsure at all n locations
  Clone ID: PAT_MRT3847_125326C.1
cctanataatccgccacacaggnagccgcacccgaataccgttacaaaagcaatcgctcacttgttttcaagaaccttccaatctcttcctactcaatggcgaacgatctcttaagggaaagaaaatcactctctgagccgaccacagactacgtgaatcaatagctaccccactcttagatcatttgccgaacactctccaatttgatataggacctcctgtcaagattcaaa

SEQ ID NO: 28047 - DNA, 126 bp, Glycine max
  unsure (1)..(126): unsure at all n locations
  Clone ID: PAT_MRT3847_125327C.1
gcggttagtcacncttcgtgngtgctcattcgnccaagatgnctnangaaacccagacccaanaccaaccaatggaggcagagnatttccnnacctntgccttgtaggnagaaantgnccagtaaa

SEQ ID NO: 28048 - DNA, 462 bp, Glycine max
  Clone ID: PAT_MRT3847_125328C.1
gcggccggcctgtatttttttcgtttttcttgttacgaaccatacattcaaaaagaaatggagggttatcacccagaagcctttgctctacgaagtggagccgataaatcgcctggtgaccccattgtcacttttcttcattgtctcgtgacatgccttgcaaatagccttccttgacccaaaacgaacaaggctccttcattggaccgggggaaggtggctctacgaaatattgaacccgcgtgtgcttgaactaaacaactagagtgagcctggaccaagttgcctaatatggcttattttaactatattggccacgagggacaccatatcactgttctacactctattacatccgcaccacgtgctgggtatattagcattctaagaagtcgcttgtgtaccatatatccctgatctcccccgttcccagagtacctttccataaaaattaccctacct

SEQ ID NO: 28049 - DNA, 409 bp, Glycine max
  Clone ID: PAT_MRT3847_125329C.1
tttttctttaagcacaaaatactttgataactttatattatgttacatgcatgcatagcatatatcgcctgctctcatattagtcagcaggaacaaatattgtgagatccaaccaccctttaattgcacatttgccactcaaatatatacttaaaagaggggctgggagatgaaataagttctgagctcattcaactacacgtggccaaaccatttctattaatacttggaacttgagctggctccaggatcatgttgctctgaggagctaatgcaacacagggcctcatgatgacttgcaggatacctcggtgctttgacagggcattatcgaccggcgtactcggtggaaccagaggggacttggctctggctagtgatgatggtcgctactgagaggaatgagtgg

SEQ ID NO: 28050 - DNA, 260 bp, Glycine max
  Clone ID: PAT_MRT3847_12532C.1
aaaaaaaaaaaacctcctattactagcagcaaaaattatgagaaccaggggtactttataacaaccccaaattaaagctcaccacaagggcaacttgtgcaaaaaaggaccctttctcctattttcctacaactcattttcactcgcaagaaagcttaaatcttttttaaacaaggggtatttagaggaaaaaaaaaacactgggctgaaggatatatctacctggatcttttcaagcccaagctgggcagaaatagccc

SEQ ID NO: 28051 - DNA, 404 bp, Glycine max
  unsure (1)..(404): unsure at all n locations
  Clone ID: PAT_MRT3847_125330C.1
tggggnatgatgcgatgtcaaggttcgcgggcccgcgntaatgaaccgattcgacgagctgactgctcagtggtcggccgccgccctttttttttttttttttttttgggtgctatacaggtgcaaacccattcacaccagcataaactctatattgagccatggagacacgtcccaggaaaggtaccatatcatcctttgagaaactttaaaccctgcaccaaaaagataaaagctcatgccttgcatagatgagcagaaatatttggaaggatcaaaagagcccacggttaagatttgcttcactcagggccataaatcctcaaagtcacatgacatacattggtaaaaccctttgttgctgcttatatttggaggccggcgtccggaaattgaaaataaat

SEQ ID NO: 28052 - DNA, 125 bp, Glycine max
  Clone ID: PAT_MRT3847_125331C.1
acaaaggctaaagcgtggctcttacaaacattaaccagccagaagctgccaacatagacacaaaggagtcgaaacatcctataacataccgcagcctaaatgttcatcaattaatcaccctatac

SEQ ID NO: 28053 - DNA, 301 bp, Glycine max
  Clone ID: PAT_MRT3847_125332C.1
tgttgggaacacgtgacaggacgcacaacccacgggccgtttggaacaagtgccttctgttacaacactgcaggttgataggcgttcatacatgaatgctaaggggcaagaaagcccggtgactacaataccaggggatatgggcatagcagtaacaataggagccaaaaacagtacgaccccggatgggcacaaacctgccatttgaggaccacgtcttgggggcaccatgactaaacccattggacagaaaactgttcacaaacaacagggaagaatgagaacaccattgagtaaagat

SEQ ID NO: 28054 - DNA, 271 bp, Glycine max
  Clone ID: PAT_MRT3847_125333C.1
gttaattcaatttctttacgaatcgtgccctcggatacagaatttgaagtacgttagaccaaatctgtggaattaagaaatttcagatcttgctgctcactctaacctgttctcgctaaccatgtctgatacacattccggaatgagaggtcgctgtatgcaaccatagttttattaggattttttcttttttggttttaattaggtttttttggtggttttccttaaacctgattttttcaaatcctttttttggattgtggtttgatca

SEQ ID NO: 28055 - DNA, 354 bp, Glycine max
  Clone ID: PAT_MRT3847_125334C.1
aatcttgtcttttattttttttcaattaaggaccaattatacagggggcaaacttgggtcaagcattctgggggaaaaatttaaggggaaaaaaaaaaacacacttggaccaaaaaaggtagaggccaaggtcccacccttcttaggcccaaccatgttgggaatgtgaggggcaacaaccccaggggcgacagtaccatttgggaaaggcctacatacctaaagaccattccaaacacccaatagaataacgcgaggcttaatacgggtgctcctaacccccattggggtgatgcccgttaacaccaaaccccgaggagcaaaatattcaacaacagaggctaaataaaccgg

SEQ ID NO: 28056 - DNA, 266 bp, Glycine max
  Clone ID: PAT_MRT3847_125335C.1
ctcgagccgctcgagccgctcttttcgtggttctaagtgctaaccaataagagcatctataccgagttcccaacactgcttgctcttacagctggcttctcggcatattcatcccattgaacctctcactctcccacatgtctcttgaagccagactgcaccattcatgctacattcttgtttaatttgtccccacattcttctattttccttcctcaatttgcttgtgattgagccttgtcaagaaatctaaccaaaataaactc

SEQ ID NO: 28057 - DNA, 388 bp, Glycine max
  Clone ID: PAT_MRT3847_125336C.1
gctaactgttgtttaattaatctagcatgcctttcccgggatatgaggttggaaactgtcattgccaaggaggtaattgatgaaaaaaaggagagggagaatattttttcaaaatcaagattattgtaattttttagcaattaaatatttttatttttagttatgttgttcaattggtttttaatttttttatttggagtgcgtcattcattaaataaaattcaaaagttgtaattaaaaatcattgtaacatattaatttttgacacaatagcacaataaaaatgcgagtacaaaaacttacaagcattaattatttgattaaattcaaatttcaaataatttattattaactatatacgattcacccctcgaccacttttacaaat

SEQ ID NO: 28058 - DNA, 376 bp, Glycine max
  Clone ID: PAT_MRT3847_125337C.1
cgttaagccgcattttgcgcctgtgttcaaaagtgtcatcctccctctcctgcaatactcaaaggatgacgagcaaatgtgggcggatgatgacgaggaggtgttgcgcttcaaatgggatggtaacgaggatttgcatcatgcatcttacgctgcctcaactcttcttcaaaagctttgcaaacgccaaggaacaatggactatctgatggtatacatcattgagaatttgaactcaacttgcgacgttcgtcaagccgacggtgcccttcatatggtcgcgattgaatcctgtcagatggctaaacccaaaaatatcagattagacgctgaaaaattgtcggatgctcatgtgattccgcgcacagcacatgaa

SEQ ID NO: 28059 - DNA, 352 bp, Glycine max
  Clone ID: PAT_MRT3847_125338C.1
caatagttactcactcactacacaccataggcagagagacctctcgctcactctcaaaatcacttccaccactgcgaacaaaaccactgttcttaaaattaaaaaccctaacctctctcaaaattttccattttcggagtttcttcttcagaaccgttttcatgcattttcgccaaactccttctcacaagcatgacaagcaccatgcaactaactatggtcaagggcacgatccctgtggctttgagtagaagagtgtgttgtcagtgtcaagcatccctgtggccgccatggcgaattgggttttttgctcccgttccccttgtgaggagagtttcgagtgagagggtgg

SEQ ID NO: 28060 - DNA, 2490 bp, Glycine max
  Clone ID: PAT_MRT3847_125339C.1
cgccacaagaagcgtagcactcgctttcccctgccatcaaagatagtaacaatagttactcactcactacacaccagaggcagagagacctctcgctcactctcaaaatcacttccaccactccgaacaaaaccactgttcctaaaattaaaaaccctaacctctctcaaaattttccattttcggagtttcttcttcagaaccgttttcatgcattttcgccaaactccttctcacaagatcgagctttggacacttgaagcatttcactaatatctgttacagattactgagattgttttgtttttcatttttggttgttttttttggcggaaataactcgtaataagcatgacaagcaccatgcaactaactatggtcaagggcacgatccctgtggctttgagtagaagagtgtgttgtcagtgtcaagcatccctgtggccgccatggcgaattgggttttttgctcccgttccccttgtgaggagagtttcaagtgagagggtggcgacactcagggttagttgcatcaaggcaactgaaagtgatgtggttgagggtgaaagtgggggctttgcggaaactgaaatgagttacacatgtgtcatgaagtttggtggctcctcggttgccaatgctgaaagaatgagagaggttgccaaccttattctgagcttcccggaagagaggccaataattgttctctctgccatgggaaagacaactaacatgcttttgctggctggagaaaaagctgtaagctgtggagtaactaatgctgatagtattgatgagctcaacataataaaagatcttcatctcaggactgtggaacagcttggagtggacagaaatgttattgagaagcatctagaagaattggagcaacttctaaaggggatagctatgatgaaagagttgactccacggactcaagactatttagtttcatttggagagtgcatgtccactaggatatttgctgcatatcttaatacattaggagttaaggcccgccaatatgatgcatttgagatgggtattataacaactgatgacttcacaaatgctgacattttggaagcaacatatcctgctgttgcaaagaggttacatagtgattgggtttctgatcctgctattccaattgttacaggcttccttggaaaggcacgaaaatcatgtgcggtgacaacattgggtagaggtggaagtgatttaactgctacaacaattgggaaagcgctagggttgccagaaatccaggtatggaaagatgttgatggtgttctaacctgtgatccaaatatatgcccacaagcaaaacctgttccatatttgacatttgatgaggctgctgaacttgcatactttggtgctcagtgttaaacacaattatttgataggagaaactcaatactgcaaatgtacaactggggaaggaatagagaaactgaaaaaggagcctacagggctaattgcaaaaggctattctcttgaccatggagagaacaccggatagaagttatcaacaaagtcctccatccacagtctatgagaccggctagggaaagtgatattcctgttagggttaaaaattcatacaaccctaaagctccaggtactctgattgctaagacaagggatatgagcaaggcattattaacaagcattgttttgaaacgtaatgtgaccatgttagatattgtaagcactcgcatgcttggtcagtttgggttccttgctaaggtattttcaatattcgaagagttaggcatatcagttgatgttgtagctacaagtgaagttagtatttccttgacattggatccatcaaagctatggagcagagagctaattcaacaggaacttgactatgttgtcgaagaactggaaaaaattgctgtggtaaatctcttaaagaccagatccataatctctctcattggaaatgttcagaagtcatcactaatattggagaaggcctttcatgttcttcgaactcttgggatcactgttcaaatgatctctcagggtgcatctaaggtgaatatctcgttagttataaatgacagtgaagcagaccagtgtgtcagggctctccacaaagccttctttgagagcgaactctctgaattagagaatgaatgcatacctagaaatggttcggttcctgcattatcttagcggtatacttttgttttgccaatatagcagattaatatcttatcttataggttaagaaattttttggctaggaggaataacgatatattagtacagtatttattagtatgttattgccagagtaaacctttgtatattctggtcgcctcctctataagggggtttgaccaggtgcaagcagttatttatattttattgtgagtttgaataatcttcttaatacttataggagaattatataattgatatcactatcaatcatttggttttgccaatatagcagattaataccttatctta

SEQ ID NO: 28061 - DNA, 195 bp, Glycine max
  Clone ID: PAT_MRT3847_12533C.1
aagaagttctcgtttaagacatccccagatcctggacagaagtctcggcaacgtgatatcatatgtggtggcatgggaaagaccaactcatcaaggatatggactatgacgacattgtttcccacatcgacgatatgcactatgcaagtggatagacctcacagggagacccactcacagctcaagtgcaagaat

SEQ ID NO: 28062 - DNA, 2636 bp, Glycine max
  Clone ID: PAT_MRT3847_125340C.1
cccacgcgttcgttcgagagtgatcccgaagaggccgtgagatcgttcgcaatgcggtgaaggcgcgaggccagtgatgatgaataaactgacgccgacgctgacagaagagacgccactttcgatggccggataactcattctgttgacttcgacggtgagggcggcgtggcagattatgatgacgaataatacttggaacaagaacaggaagcggtggtggatgaggaagaagaggaggtctaagaagaagatttagaagaagaatagagtagcgaacatgaatatgaaggaggtgctaatggcacagtggtgaaagattctgatgatgctgatgtgaaagcccttttggaggaatcagggaatggagatgaagaagagaagaaggagaatgaaccatttgcggtgcccactgctggagcattctatatgcacgatgataggttcagggacaatgccggtgcacgtcacgaggcgaatcggctctgggtgggagtccaaggatgataggaagtggggacatgataagtttgaggaaattacgttgccggtgaaaggtactataaagaaggtaaggagaccttcgaagggtaattttcgaggctttggtggtaaaacacgtggtgttgaccatcagaggaagatatgttagaggtagccggaaagggtatgataacagaggcaatcaaactcagagcaccagaaagtgttgtttgtgggagaggaccccgagggataggagcctactaataagaacattgattcagcatccctggtaaaaaataaactacctgggaagcagccttcgaaatcatcacatgttggtttgggaaaaactctggctccggtcaagattttgcagtctgattgttgattgtgcctgatagtgagtctcaacattgaatttgcatcgaggaatccaccccacttactttacgaattcttgcagcagagaaatcagggtctgaataaaatccaccctaaagagctgtggttgggtatggagcgttaggttcccgggcaaacatcagggacttttgcttcaagcgaggaaaataatttttagaaagcaaaggatgtatggctgtcaccacaggaagcagctatatattgatgggcctggcactccatctgttggaaaggcttttaacaatatgcatattccaccacctggatcttctggagttaatccttctcagtctgctcatccaagaggtcacgggaggagtggagcagtaccagtgcagatgaattatcagcctgttacctctcataatcaaccaagtaaaattgatccaacacaactcccggctattcaaagaactgctccagggcgaacttcaccttctttgaaagcccctgctccacaggttggtaatcgacctggtagtgggtctcaagcttcatctccccccaaaacatcgagcgcgattagttcattggattctggagaaattgatgcagcttcagatttcgacaaattgaagggtgcattggttgggaaagttagaggagctacacaaaggagtggaaggggctcttttgtttacggtcgagctatggggactgctggagatatcagtgggactcatggagatcttaacttcccaaccttcttgcccgttatgcaatttggagggcaacatcccggtggcataggagttcctgctgttggcatggcatttcctggatatgttggtcagcctcaacttggtttgggaaactctgaaatgacctggctaccagttttgactggggcagcgggtgctttaggggcagcgggtgctctaggggctacatattgtccaccctatctcactgttgatggtgcttatcatgcccgacaatcaggacaaacatctgcaacacctatttcaagcaaggaaaataatgtgaataaagctaataatgaatggaaatcaccacagaaatcagagcctgtaaatgatgagtttggacagaggcaaaataagccccgcagatactcggagatgaattttgggcaatgaagtattatagaatgcaacttgtttgaataaaaagataaggccttcttcctcctggtcctttgtcttcaagcttttgttcaggagtacttgggcagcaatatgtttcaagaatttttagtgttatataacgcctgttcatgctgttctccatttaaagaagttaattgcagcttgacaggtggtagttgcttgtgtaattgtgcgatttttcttgcgttttgctttcgtgaagctcgtgagaaacttaggcaggtttttctacaactatgaatgtgggaaaaaagaacgacgattgtgttgcagcaactgattgctcgtggaattgaaaatttctcgtgtaaatggttttcttgttcgtctggtatgtacttgtggtaaatttgttacgagacgtcaaatagtgtaatcctcttatttttccaaattcaaattagtgtttttgactgagtggtttttgcttttgaattcattgtttcttctattgagatttgagactcatctgaaggatgttaatatagtactcttacctaagacagttttggtattcgatgaaaacgatggtttttattgttatactctatcttggttgactacatcgaaattaatgaaatatataatttaagtagg

SEQ ID NO: 28063 - DNA, 1060 bp, Glycine max
  unsure (1)..(1060): unsure at all n locations
  Clone ID: PAT_MRT3847_125341C.1
ctttcaaaaggttaataaccagctgcaaaagaatacaaaggtttactcactactcactagtaataccaactaccaagactagtgatacaccaatgctttgccattcctcccaacccagcatatttcttcaagtaaaatacattgtccaggtactctcatcaccaaggcaagagatatgagcaaggcagtattaacaagcattgttttgaaacgtaatgtgaccatgttggatatagcaagcactcgcatgcttggtcagtatggtttccttgctaaggtgttttcaatctttgaagagttaggcatatcagttgatgttgtagctacaagtgaagtcagtgtttccttgacactggatccatcaaagctatggagcagagagctaattcagcaggaacttgaccatgttgtagaagaactcgagaaaatcgctgtggtgaatctcctgcagaatagatccatcatctctctcattggaaatgttcagagatcatcactaatattggagaaggttctgtattatgctccctttatttaaattagttcatatcctaactttcacttatgtataaagatttactgaatttattacaatattactatctgggccttttcctccctcccttttgctgtgtgtggggacaggggaatatcgtattattttatatgggaagccttggggtgcatttctgatattggaaaaaaacccactggttttataatgtgtttttaaatttaggcgcaaattaattcatgtcaacctgcaggattatgttctgtaattagtctatgtttagctctttctgtcagcgacttaaggaaatcactgattgattctattgcaggctttccgtgttcttcgaacccttggcatcacggtgcaaatgatctctcagggtgcatctaaggtgaacatctcattggttgtaaatgacagtgaagcggagcagtgtgtgagggctctccacttagccttctttgagagtgagctctcagagttagagatggattacaaaaatggtaatggctctgttcatgaattatctntaggggacacttg

SEQ ID NO: 28064 - DNA, 455 bp, Glycine max
  Clone ID: PAT_MRT3847_125342C.1
ggaaaaattagaggattacactatttgacgtttttgtcacaaatttacctcaagtacataccagacgaacaagaaaaccatttacacgagaaatttttaattgcgcgagctatcagttgctgcaacacaatcgtcgttcttttttgccacattcttagttgtagaaaaacctgcctaagtttctcacgaggcttacgaaagcaaaacgcaagaaaaatttgggaaagaagccaactagaataatttcctcagcagcaactacaaggacatcaactgcaaatttatttatacttaccgcacaattacacaagcaactaccacctgtggagctgcagttaacttctttaaatggagaacagcatgaacaggcgttatataacacttaaaattcttgaaacatattgctgcccaagttctcctgaacaaaagcttgaagacaaaggaccaggatgaag

SEQ ID NO: 28065 - DNA, 2882 bp, Glycine max
  Clone ID: PAT_MRT3847_125343C.1
gacacacttctaccactccgatcaaaaccactgttcctaaaataaaaccctaacctctttcaaattttccattttccgagtttcttcttctgaaccgctttcctgcattttcgccaaactccttctcacaagttatttattactttgaactccataaatagcccccggtttctgctcgaacaacctacattctatttattctttttttttaatttcattgggatggatataatttgattacctaccttccataatttctctaagatcgagctttggagaacttgaggcatttgagtaacaaccccttttcatatccctgaagggttgtgactattttagataataacaaggcaagcatgttgctcaggggaggcctttcccagcgtccgcgggtccgcgcgttacttatgtgcggctctaggccgccaccgttgcgcccacacaccttccctttgtttccattttccactttctcatgctcacttccaaaactcctccattcattcctcgcatttccatcttccaaagctctttctctcaaagatcgagctttggaaaacttgaggaagcattttagtaacaatccctttttcagatccctgaagggttgtgttcatttgttcgaaataataacaacttgcttggaacaagcataagccatggcaagcgcgttgcagcagcttcaaggggttcaagggaaacttgctttgagtatgagtgtgaggaggagcttgcatcattgcaagtctcaaattgggtttgcagcacttggtgctcctgtttgtgcaaggagagtttggggcaatagggtggcattcagtgtcactacttgcaaggcctgaacaagtgatgtgattgagaagaatgcgactgagaatgggatggtgagtagtgagggtgaaaccagtttcacttgtgtcatgaagtttggtggctcctctgtggcttctgctgataggatgaaagaggtggctacccttatattgagttttcccgaggagaggcctattgttgttctctctgctatgggaaaaacaacaaacaagcttttgctggctggagagaaagctgtgagttgtggtgttatcaatgtatcaagtattgaggagctttgctttataaaagacctgcatctaaggactgtggatcagcttggtgtggacggatctgttatttcaaagcatctagaagaattggagcaacttctgaaggggatagctatgatgaaagaattgactaaaaggactcaggactatttagtctcctttggagaatgcatgtcgacaaggatctttgctgcatatcttaataaaataggtgtcaaggctcgccaatatgatgcatttgagattggttttataacaactgacgacttcacaaatgcggacattttggaagcaacttatccagctgttgcaaagagattacatggtgattggctctctgatcctgcaattgcaattgttacaggcttccttggaaaggcccggaaatcatgtgcagtgacaacactgggtagagggggcagtgatttgacagctacaacaattgggaaagcactagggttgcctgagatccaggtatggaaggatgttgatggtgtcctaacctgtgatccaaatatatacccaaaagcggaacctgttccttatttgacatttgatgaggctgcagaactagcgtactttggtgctcaggttctacatccacagtctatgagacctgccagagaaagtgatattcctgttagggttaaaaattcttacaaccctaaagctccaggtactctcatcaccaaggcaagagatatgagcaaggcagtattaacaagcattgttttgaaacgtaatgtgaccatgttggatatagcaagcactcgcatgcttggtcagtatggtttccttgctaaggtgttttcaatctttgaagagttaggcatatcagttgatgttgtagctacaagtgaagtcagtgtttccttgacactggatccatcaaagctatggagcagagagctaattcagcaggcaagtgaacttgaccatgttgtagaagaactcgagaaaatcgctgtggtgaatctcctacagaatagatccatcatctctctcattggaaatgttcagagatcatcactaatattggagaaggctttccgtgttcttcgaacccttggcgtcactgtgcaaatgatctcccagggtgcatctaaggtgaacatctcattggttgtaaatgacagtgaagcagagcagtgtgtgagggctctccactcagccttctttgagagtgagctctcagagttagagatggattacaaaaatggcaatggttctgttgatgagttatcttaggggacacttgagtgtgtcaattctttgtcctaaagagtatgtgtcccaattttatatgctaatgtcaagcaagcatttttgaatttctcctagccttgtcactgtgatgtaccagaacaatgtattttacttgaagaaatatgctgggttgggaggaatggcaaagcattggtgtatcactagtcttggtagttggtattactagtgagtagtgagtaaacctttgtattcttttgtagctgctttcaaaaggttaataaccagctgcaaatcaattattattgactatattattgactagcactagtacagtatttattagtcctgttactactagagtatacctttgtatattctggtcgcctcctccataaggggggatgaccagctgcaagaagttatttgtaatttattgtgagtgagtttgaataaacttcttaatactgagaattatgtaattgatatcactatctatcattatattattgggttagaattgtcatatcaataaagttaatcttttgtttt

SEQ ID NO: 28066 - DNA, 555 bp, Glycine max
  Clone ID: PAT_MRT3847_125344C.1
cggacgcgtgggttgaattgcagccaaatgccacatcaggcatgggtgttgctgatcacagcaaaaacaccttcatggaattgaagcagaagaaggttcatcgttatgtgatctttaaggtcgatgagaagaaaagggaggttgtggttgagaagactggtggcccggctgagagctatgacgattttgctgcatctttgccggagaatgattgcagatatgctgtctttgactatgatttcgtcacttctgagaactgtcaaaagagcaaaatcttcttcattgcatggttagttagtttctctcttttttatatgtaaaagaaaaaggatctatatcttggtctacataattaaaagcattgttgcaccaaccagcaagatgtttgtgaggcatgatacatgataggcattttcttgtgcaaaaagcaaaccctgtggcatatatgatcatatcatatgtttggcagtttcaaaataaaccatgccatgcattctcttaagcccatgtcaatattgcactggttaagtgtcactctttgcttgtctctgatat

SEQ ID NO: 28067 - DNA, 536 bp, Glycine max
  Clone ID: PAT_MRT3847_125345C.1
attgacttgtgggtacgcccactaccactgtctcacccgatacttacaagcttgaaggcatggacaatcgtgccatcgagagatttgagagtgaaactgttgatatgaacatgaggtctttcaagattgcctgtgtgctctatacgcttaaggcttaccgtgaactaggaatcacaagatgatatctgtccttagagggagtaatggaaacacaccaataaactatctgcacatatcagttgatgcccactggacacatggtgctttcatcaagaacatgatcactgtgacataccaagctgactgtgctgatgttatcatagcttccactactgctggttatgaagctctaattgcaactgatgctcagactctggaacatgctctgctttcattcaccctcggtgtgaaacagatgatgcgttgctgtaacatgatggatgctactacaccaaagtacttccaagccttgtctgatgaaattgctaaggaagatccatcctctatgaagaaagctggatacaaccctgacaaga

SEQ ID NO: 28068 - DNA, 389 bp, Glycine max
  Clone ID: PAT_MRT3847_125346C.1
cgccattttcgctctcctcacgctcagtgtgcatgtgaatctctctctctgtatttactggcactagcttgcaaaaactaactgcaaatatactcattcagttacgcaatttccagcccaagaagatctcgtttcgccgatccaaactaatccgaaaatgaagcctaacaaaaccgtaaaccctctcatgcaccttcgaccacaacgtgggtgcctatgggtttactgtgaggctcagcacctgcaaagataccgtgaatatgctaacatttacaaggaggaagaggaggaaaggtcagataggtggaactcatttctcgatagacaggctgagtcttctgaattggtcacagacggattaattgtgggggaggggggtgagaagtttt

SEQ ID NO: 28069 - DNA, 452 bp, Glycine max
  Clone ID: PAT_MRT3847_125347C.1
tccgggatttttcatctttggtgctattgctgtttagaggcgtgcaagaagttctacatcagttatatttttccttgtgcgcagcgtgtttggattgcttggaactataagggactataagacaagatgaaactggttcttattgaccttcaaaataggtatgcttggtataacttcttgcacaagtgctattgtcccaaatcaccaatgtggactctttttttgcttaaaatatatcgttttcatgctatgaacttatgatgtcatttgcatactgtccattgtttgttgtgttgttattgcattgtaagacttgatgcttaaattggtttggtaaggacacgaaagatattgactcggtcctactcgaggtatgctggatgttgatttcgtagccactgtactttttgaggtactagaatcagtagatctagtgaaattgatcatgaacc

SEQ ID NO: 28070 - DNA, 287 bp, Glycine max
  unsure (1)..(287): unsure at all n locations
  Clone ID: PAT_MRT3847_125348C.1
cctgnccccgggcaaagggaaatttttactgttcacccttaacaatcaattccacaaactattatcccttttttttttaccaaaaatcaatcaaaaaaaccccattcctgccgcacctaaaaaaaaagaaatgttttacaaaaaaaaaaccccaaccggtttttgaaatttttataaaaaaaaaatattaaatattttcaaatgcccccttagcaaaacgtataaatttccatatccaaccgggagccctttttaaattgccatccaaaattaagggaacccgggcc

SEQ ID NO: 28071 - DNA, 527 bp, Glycine max
  Clone ID: PAT_MRT3847_125349C.1
ccacgcgtccgctcttttgaatctcccctacttctctctctctctctctctatggcacccttccctttttctctacttcccatgcttgcttcctctgctctcaaaagctctatatccattatatgttagtgaactaaaagtagaatttgagcttcacgttgagaagcaagtatgcctttggaggatttctacaggatatttggtgccacaaagctcaaaagtccgttttggacttcatggcagcccttcgaatcaccatgcttgttggagcatgtaactttaccagtggaactggggttctttgtgatcttgttagtccaactcctaagaaaatacataaaccttatcagcaagcaaaacaaggtcactgatagtgccaaagagattgtgcatccaactgcaatcaaatttgggtttgcttacaaactcagctttgtttgcaccacgttgatgatggatggtcattcatcactgctatcactgattctgagtcgtgagactcagtgcacccttgaaacttcgggcct

SEQ ID NO: 28072 - DNA, 284 bp, Glycine max
  Clone ID: PAT_MRT3847_12534C.1
ggccatcattcaagctatgtctcaagttaaggctgagactgtacttacttgcacggtgtccactgcatcattcattggctggtcaaaaaattcatcatactcaaatgtccccgacatacattcatgggctccagaccatagaaggtctaccgatcttgggaaggatgaaattagcgtaagatcatcatggcggtgaaaatactgtatagcatgagatgcaagcagttgttgcctacgtgaagaactcctatgctactatgccatctcaaatagattcctttggg

SEQ ID NO: 28073 - DNA, 397 bp, Glycine max
  Clone ID: PAT_MRT3847_125350C.1
gtctactagtcgtcgggcgcccttcgatgggctaataacaacacttatttttggagacgaaaactgaaactctatgggcacgcaaacacatcatcgaaaacagccaagctgaacgagagggccgattatgcccattgccaaacgtgacgccctagctatgccttaacaaccgcgccaggctatgaatgcccacaccgaagcgtacacgaaccataacacgggatgcctctatcacaaagactcgaacagagggactgacgtacagactcagacttgatactatgtagcaaccaaaatgggatccctaaagtcatctcaattgccgtggcatcaacacatggctattgcaaaaaccctggcatatcccatggcaatgagcctggatgcacaccatact

SEQ ID NO: 28074 - DNA, 230 bp, Glycine max
  Clone ID: PAT_MRT3847_125351C.1
aatcccgctcactactagctgactcgctggcggccgcttttttttttttttttatactcaagagtttcgaagattcagacataaagcattttttggccgctaagcacctttcggtttttttacaagctattccctattatttttaaaaactattgctacaatttgtttttttacaacattttcatatttccttcataccacaaagttaatttttgaaaatttcctttctt

SEQ ID NO: 28075 - DNA, 131 bp, Glycine max
  Clone ID: PAT_MRT3847_125352C.1
attatggcgtagagcgacgagcgacacgggtaaacacgcttaactcattcagcaatgcacgaggatccactaagtggtgaagatgaaaaggatcctaagcacaaccacacagagggagcaccacaaacaac

SEQ ID NO: 28076 - DNA, 362 bp, Glycine max
  Clone ID: PAT_MRT3847_125353C.1
cttactgaagaaaccacccattgattttgtagactgattctgaaattttcctatttagaaaactgccatccttggaggagcattttttttaacaagggtgggccgtgaatccttagcttaaaaaacaaaaaacctctaattatttgatacattcctggcctcccaaaagaactatctctcactcccctcacaaccttggctggaattaaaaaggtaaccctttaaccttgaaaagaaaaaacttctcaatgagtcaaacatatggaggcttaactttccccacgaaaaccagaactttgggtctcgttgttaaaaccatattcgtaaaaccttttggacccctttaaattaccaaccttttc

SEQ ID NO: 28077 - DNA, 275 bp, Glycine max
  unsure (1)..(275): unsure at all n locations
  Clone ID: PAT_MRT3847_125354C.1
gttgaagattgacanacanattagcaacaattctgtgttgntaacaatttgctagctgctacncctactcacngaatgganacatttaaaaatcttntatccttgtcttttgaaancaattcctnccactgggagnttacatcagaaatangagcactacatgatctagagcgattgnatntacagcaaccgattgtcaggggaattccagacatttttggcaatttcaccaatatggtttcctgcaatgggaaataatcagttctcgggtagat

SEQ ID NO: 28078 - DNA, 372 bp, Glycine max
  Clone ID: PAT_MRT3847_125355C.1
gaagtttattggcgactatattcattttggcatgggggatgaatctggtcggagagagaaaaaccataaccatttctggaataggaaaggggggcaggggtctaggaaagggaggagcgaaacgacacccgaagggtctgagggataacattcaacgcataacgaagaccgcaattcgccgtctcgcgagacgtgggaccgtgaagcgtatcaatggtctcatgtacgaagaaacccgaagcgttctgaagatcttacttcagaacgtaatacgcgacgctggaacctacactgagcacgctcgacgcaagaccgaaaatgccatggacgatggttactccctccagacgcaagacaagaccctctaccgtt

SEQ ID NO: 28079 - DNA, 256 bp, Glycine max
  Clone ID: PAT_MRT3847_125356C.1
ggaaatagcatacatcaattaacacatgctgttcatcactaatatagtcatccacaggaaatgtgcacaatgaatcgccatgttgcgcataaactgcggggttaatggagcgctaacctgcaatttatacaacgcgggcttacactttcgattggctttaacaaaaattaatggcttacagcagcctaacggcggaaaaccggaaatttttggggtggttgaaccccccaccccaaaaatgcccttaattccaccc

SEQ ID NO: 28080 - DNA, 512 bp, Glycine max
  Clone ID: PAT_MRT3847_125357C.1
ctctaatacgattaactatacgagaaagctggaccccatgcagaacgcgttaacgactttgcgggttgaccgacgcactggtacacgctgcgacaatacgacacatgggggcactatgatgcaatcagcagcggtgatgactctggctgactctgatgaggttctgtgcgtgcaactggcgtaactatgagccctaaaatggccatggtgtctctgaacaggagccatgaagatgatgaactgactgcccggctgcgtagctgaagacaactgacacttgatgctaacttgaccaagaccaaacaagacctggcgctccgtatgggcaacctgtaagactaacttgatgacaccagaactaagcttgccacctgacaacgatgtacgacaatgtgaatgagactgctcttgcagcacctacactagtaagctaggagtacatacagctttcttcagctggagatataccttagatacgaatactgatcgacttttaatgcatatgtacaaac

SEQ ID NO: 28081 - DNA, 338 bp, Glycine max
  Clone ID: PAT_MRT3847_125359C.1
acgagacggggaggatggggatggggaagaggaggtggatttaatacatttgcctctcaagttccatttgatctttttcccgaggtacctatcttcatccctcaaattctcccttctctgtttcattcccacattaatatagtagttgcacaatttattctcacaaattttccacctacaagtaatttgcatcagccctcctacaagtaagccacaagattatctcaatttagtaggacatattatgtactctctatgaagatgctcaaatctagcttgttctaccttatttgcatataactagatagtaatgcaccaaattacagtttcgagtcaaa

SEQ ID NO: 28082 - DNA, 541 bp, Glycine max
  Clone ID: PAT_MRT3847_12535C.1
gcacacaatgcttacactaacacattttaagaatcaaatcattatacatcatattcagttccagttaatgatttcacacgttactagcatcatttacccacttttaccatagaaaaatgtaagttacatatgaaccataggttaggtaacagcgaggtgtctatcctaattcagaatatttaaaatggagtggtgctttcaaagcataaccatgtcacatggaaaagtgctcaagttgccttgtaggtgaaattcaaaacactagctcaagttgccttgtaaatgaaattcatgagccctgcgttcgaaatattcattttcatgtttgccttgtacaagactgcatccccccagtttcaggggatatgaagaagcttgttacagctgcgtccagagcatcgacatgctttcttaagatttttaattgagaggcgagaccatcaacactcttcatctcctcattcaatctgagacaggaatttatatagcgattccccttggtagctgcataagcacagattctgaaggaaccggggcatcg

SEQ ID NO: 28083 - DNA, 151 bp, Glycine max
  Clone ID: PAT_MRT3847_125360C.1
gtgctattcacactaatggaacagggtgcatgacctccagatactgaaagaccatcagttctattcgtctgaataaactctcgaagcgagttgattgacgcatcgaagaaggagacatcacccgtacttattttttgatcaaacatgacat

SEQ ID NO: 28084 - DNA, 354 bp, Glycine max
  Clone ID: PAT_MRT3847_125361C.1
ggcccacaaaaacaaacatcccattccttatcatatttggtcctgaaacattgaaaaaaagtttctcccccttttaacaaaaaccatttgcaacaaaataattgggcccaccccttttttaaaagaaatcaaactcccgataattatcaaaaccttttggatatgctttgggaaaaggggtaacagccttttcccccccccttgatgaagctgggggggggttttttttaaaacttttcccccttggggatcccgggggggggagcacatttgatcaatgcccactttaacccttaaaaaagggggggttgtttgatctcaaaaccccctttttattaaaccaactgggggggg

SEQ ID NO: 28085 - DNA, 476 bp, Glycine max
  unsure (1)..(476): unsure at all n locations
  Clone ID: PAT_MRT3847_125362C.1
attagcggcttttttttaaaagaaaacaaagttacattgggttttatgacagccaggtttgaccaaatacacttgaacccacctatttacagaaacggggcgaaaatattctaagaaaaaaactccacacgattgttctgggaagagtccaactaggggggtacttaacaacnnggcattaagttggggtacccataataccgagggcaaatggcactaggctcttaaaacaacacaaactacgatcgggaagagnctgtagttagaagcgtgggggctctgtggggcaccaacaccaatatgtgagttgcccccacacgttcccatagtcgcctataaattagcctcggctcttaccaaaaagaacttcctaagccttctgaacaaggctgttttttttttgcccaccccagaaggttttttttttcaagtgcccacccaaaaaaaaaagaagcccaccaccgccttccccccaa

SEQ ID NO: 28086 - DNA, 284 bp, Glycine max
  Clone ID: PAT_MRT3847_125363C.1
ccttttattttccctcacttcccaaaggcatcggagagacattctattatttctggtaccacccaaccttcatatcctattttttctaccccggatactaaattttcattgtacccttctgtaccagaacctaaatatatatcactccacatatttttgaccacgatattcttttgtcagcatgacttcctttacaattcgtctaactcatatccccatctaagaattcattatacctgcgtgttcttcatccattattatcattcaaagctctgactgcacat

SEQ ID NO: 28087 - DNA, 1894 bp, Glycine max
  Clone ID: PAT_MRT3847_125364C.1
ggctcgacccacgcgtccgctctgacaagttgaagagatattaatacagttatgttgttctttttgcattggtgttttatctaaagaagcaaggaatcaggtcatggaggctacagatagattaggtggacagtatagccccaatttgcatcctcgatgtacccatttggtggttcagagttttggtggacgcaagtttgagcatgcgctgaagcatggagcaaaaaatggcctctttgttgtcacactgggttggtttgtggatagtgtcaggaaaagtgtgaggttgagtgaatcacattatagagtgaagagttatggggataacaacacgcatttggaggattttagactgcttcctgagtatacaaatgctgaaaattcttgtcttcctgcaagaatcctccaaaccaagcaagctattagtgttgaagaacttcaaagattcactgggagagagtctatcagaaatttggactcaactttgtctggctgctccatctatgttgatccaggcatttcatctgaattgcgaaacaaggttattgagactgcttcaagagaaggtgctagtttggtggaacaatggtttgttggctgcaatgttagtcatgtagtaactgaagggacatcaatccaaagatatcttggatactctagttacctcattacacctctgtgggttctcaaaacagctaaggagaaatatgtgcgaaggcttgttcgcatgtctgttgatttggcaaagcaagttggcctgatgctggaagatatccataatggcatttcaggaaaggaagtaataaagcaaaaagtccttaacaatcttctggatactgaaagtgaagtcggctatgaagaaagacaacaaattgtgaattctgtaaaaaatggagtcagaagtcgccgtggtcgtcgaatgcagacttgtcagactccaatacgtcctataacacccaacaaccttctagactctatctgctggtctatatccgagtcgacttcggctgcttccatttatacagactctttcagtgttgaagatcctagtgaaaaccatacttcaatatttttttatgcaaaaggggatggcaaggattcggaagcttcattttcaaactccactcgtcctctgacagaaagtgagaaatccgagttgatatttaaaaaccctttccttaccatactattcccaattgaccgatttgctgagatgggtccttcttcaagaacatttttcagccataatggttttaggtgtcttcaggtgttggatcatatccatgcattttatcaggagaacatgtcaagggaagaaatagaagctgcaattcatagtgattcaagacacgctgataggcttcgatcagtgtactctagtaaggaaacagcagaacatggctatgtactgtttaaaagggtcgaattcttgggtagtcgtacaagttttgaaatgttgaagcgtgtaactggggacaactcctccaacgtttatgagctattacttagggcctaaggtaattttattatacaaggattccccatattggtatgaatggccaaaaatggggaaatgtttagcttgtccctagaacaaatgagaaaaaatgattcattaatattttaatattatttttgttatattatttagagggaagggcaaaaggttatatggtaagaagttcgaaacttggacatcattatcaacgccaaacccggtcttaaatatttgagtgataaggtcctatagaatgaatgttttgaattatattttatactccgttcatgtaaaggtttttctgctttgtgcatataaattaatgataaataggattatgattttcataagggtatgaatggcctacagtggggaaatgtttagcttgtccataga

SEQ ID NO: 28088 - DNA, 352 bp, Glycine max
  unsure (1)..(352): unsure at all n locations
  Clone ID: PAT_MRT3847_125365C.1
ggggaaggagcaggangngncgaggggagcgaacaagnaccccgagagacagccaanggggacggcggcgcagagccaagacgacggcaaggactaccaggagccggagccggcgccgcgggnggacccgacggagcnnacggcacggacgaaagacagagttttttttttagagnangnggccaccnggcaggancgctatatcactgccctacaccgcatgggagacgccggggctaagtctaagtgtagaaccgncgggatccaaggaatcgcttgggccttcggtggcatgatcttcgacctcgtttactgcaccgctggcatctcagggggacacataaaacccggc

SEQ ID NO: 28089 - DNA, 240 bp, Glycine max
  Clone ID: PAT_MRT3847_125366C.1
ggcggagatagaaaaagagagaggtagagaaaagcgaagagtctctctcttcctatctctctctttcaatgtcagggcacaaatcttccacctctactactaaataatcttccttctaacctatatcacaaggaaacgcgaaaaaagaaattaacaaaagaggtaaagggttctagaagccgccaatttttatttgctttaaatttgtctgagtcagagacgttcgagattgtaaccatg

SEQ ID NO: 28090 - DNA, 114 bp, Glycine max
  unsure (1)..(114): unsure at all n locations
  Clone ID: PAT_MRT3847_125367C.1
agattcaacaggancagangaaaccccgagagcagcccactttggaggaangagcgacccnncgctgggcagnncccggccacaaacnacgganaaggcaccagcaagccgagg

SEQ ID NO: 28091 - DNA, 232 bp, Glycine max
  Clone ID: PAT_MRT3847_125368C.1
cgtgaacgttataaatgtaaatattatggcacacacatgtataactactcttggacctcctgccacaatatttacatgtgtgtgccatagcaattttgtttttcttttgtggaggggggggggaattacttaattttccccctaatataatttcttacacggtatttttcatagttaattttgaagtttcaagacaaaaaaaaaaaaaaaaggggcggccgccgattattga

SEQ ID NO: 28092 - DNA, 1814 bp, Glycine max
  Clone ID: PAT_MRT3847_125369C.1
cccctccgacctttttaggcgtccgctttttctctctctccattccgtgttttcagctccggtaacctctccttctccgccgccgttgctatctccgccgtgaccttccatccctcaacgccccacagatcttcaatttgattgcttgggtcaacaatttctgtcattctcaatcatggcaactagacttcagtttgaaaataattgtgaagttggagtcttctctaaactcaccaatgcttactgtttggttgcgattggaggttctgaaagcttctacagtgtatttgaagctgagttagcagatgttatccctgtggtcaagacatccattggtggtactcgtatcattggtcgtctttgtgctggaaacaagaatgggcttctcttgccccataccaccacagaccaagagcttcaacaattgagaaacagtctacctgatcaagttgttgttcagcgaatagatgaaagattatctgctctgggttacctgcgagaagttgtcagaatgggggatagttatttattttctgaagttgcgagagtgaagaaatggcgcaagacttggcattggatttggaggagcttcgccgcctccacagcatcgccaaaagacctcgaaccctctctcttctctcctccgaaattcgtaacctcgaaaagttatcgtcagaggaagcttctgcgcagattccggcgccgatttcgaccggaactaaagtggcgccttcacctgcgctgaagtatgcggcactcgcgtcgttcagttgggaccaggatagtgacaaagttaagatatatgtgttaatggagggaatcgatgagaataaggttgaatccgagtttaagtcgatgtcattcgatgttaagttccatgatgttcaagggaagaactaccgatgtgcaatatcaaaattgcacaatgagatagtaccggagaaatgcaaggattgtggtcaagcctaaaagggcaatcattacattggtgaagtggcccacacacacactgatcttgacggggtgactgaagagatgattgcagatgttcttggagtagaagttttcaggaagaccattgctggtaaaaatgttgttggttgttactgtgcattctcaaacagaggtggcttggttcatcctcatacttccatataagactggggtgggcattctacacttctttggttcctttggtggctgggaccataaacctgggtagcgaattaatagctgctggaatacagttactgattggaccgcatttgtgtttttgacaccaccgcacgggctatctgtgattgagagtgttttcaagctgagagagcacagcctagtgcaattgtggatgagatgaggaaatccctcattgatacttggcttccaaaggaaactggctagatttgcacttcaaagaagacaagcttaagccaaatctggacaaagagaaagacccaatggcgggaattatggacatgatgaagaatatgtatgaggatggggacgatgagatgaagaaaaccattgcaaaagcatggactgatgctagaactgggaaaactgctgaccctttaagtagctaccgttgagcgaccaaaagaggttcagatgcttagttcctgtttctagagaatgatttgctctatttaattacattatcttgttttaaaatgaatgtttggcctgtgttcatggtacttgtagaagattagatgtgcagttattgttaccaaagttatactttgatataatgatgcgattttcgtctgtggttgctcgaataaaaaatgattaaaaaaagaaagggcggccgc

SEQ ID NO: 28093 - DNA, 1683 bp, Glycine max
  Clone ID: PAT_MRT3847_12536C.1
ccacgtacggctgcgagaagacgacagaaggggattgagaagtaagatggaggttgttatgcgccgtaagtaatttgtttgttggattggaattgagaaaacagcaacaaggggaaatgggagatagagaagaacaaggcgagggtgctggctcctccttggaattggaagctcctattccagagacccaaaaagaaatcccaatttcagatggcatcgcattcaacaatcagagcgcgattttccaagccatcgaggttgtggaacgagactcgttggccatcgctcagagtttcacttctctcttcgcttccctccgattggccctctccgaatccacatccacctctctccatcacatgcagtgcttcaccgatgccaccggtcgccttcaggaatctgtgcttgatgcagctaccaaggggaatcgctatataaattcctgtctcagattgaatgaggagatgaagagtgttgatggtctcgcctctcaattttaaagaaaaatcttaagaaagcatgtcgatgctctggacgcagctgttaacaagcttcttcatatcccctgaaactggggggatgcagtcttgtacaagttaatatagggggtagagaactggtgatatttcctcttttcccctcataaacataagggataaagagtttacagattgttccccatgttacaatgtgtatgtcacaagatttttctagtgcacggtatggttaaagttttagatgttgatgattttgtgtgtgcgcctttgtcttgatcattgtgctgttaatagttgtttggatacagaactctgggaatgaatgtacttagagactagagtagcatattttgatgctttattttgttttgaaatgggtggtataaacattataggcttcttgttgagaaacctatgaccatccatctttttgagatggattgaggtaagctgtctttacacttttttgtatgatgcccacactgacagaaagaaaaaagtgtaaatgtaaagaaaaaaagaaagatggattaatggagcgtgtataagaataagaccttttgaccaactgactaggcctggattctatgttgcacaggcaaacatgaaaatgaatatttcgaacgcaggctcatgaatttcatctacaaggcaacttgagctagtgttttgaatttcacctacaaggcaacttgagcacttttccatgtgacatggttatgctttgaaagcaccactccattttaaatattctgaattaggatagacacctcgctgttacctaacctatggttcatatgtaacttacattcttctatggtaaaagtgggtaaatgatgctagtaacgtgtgaaatcattaactggaactgaatatgatgtataatgatttgattcttaaaatgtgttagtgtaagcattgtgtgagggactgatagttgcacctagtatgcaagatatataatagaatttggattgatttgggagggatattataatgaaacctactacctagagagacatcttgcaacaacgtattgaggtataagcacagacatgaaaagtgattattaattgaaaatgcatatagttaccacattttaagttatcggcaggtaattaaatgtctttttatattattttacttttatcaactagttcaataattaggtttactatatattttt

SEQ ID NO: 28094 - DNA, 2207 bp, Glycine max
  Clone ID: PAT_MRT3847_125370C.1
aagtcaaaacactaccctaatttctttctgtctctctttagtctttctctttttctctctctccattccgtgttttcagctccggtaacctctccttctccgccgccgttgctatctccgccgtgaccttccatccctcaacgccccacagatcttcaatttgattgcttgggtcaacaatttctgtcattctcaatcatggcaactagacttcagtttgaaaataattgtgaagttggagtcttctctaaactcaccaatgcttactgtttggttgcgattggaggttctgaaagcttctacagtgtatttgaagctgagttagcagatgttatccctgtggtcaagacatccattggtggtactcgtatcattggtcgtctttgtgctggaaacaagaatgggcttctcttgccccataccaccacagaccaagagcttcaacaattgagaaacagtctacctgatcaagttgttgttcagcgaatagatgaaagattatctgctctgggaaattgtatcgcatgtaatgaccatgtggccctcacacacactgatcttgacagggagactgaagagatgattgcagatgttcttggagtagaagttttcaggcagaccattgctggtaatattcttgttggtagttactgtgccttctccaacagaggtggcttggttcaccctcatacttccatagaagacttggatgaactttctacacttcttcaggttcctttggtgcctgggcccgtaacccggggtagtaaagtaatagcggctggaatgccagttaatgattggcccgcattttgtggttccgacccccccgcaacggagctatttgtgattgaaagtgttttcaagttaagagaagcccagcctatggcaattgtggggtagtaaaggagttccgttattggcaagactattgcagtagaagtacaaaacgcaataccctaatttgtttctctgtctctgtctctgtctctctctccattcgtgctttcagctccggcaacctctcttccggcgccgccgctatctcggccgcgcaccagttattcttctcttcatatcttcaatttgattacttgggtcaacgatttctgtcattctcaatcatggcaactagacttcagtttgaaaataattgagaagttggagtcttctctaaacttaccaatgcctactgtttggttgccattggtggttctgaaagcttctacagtgtatttgaagccgagttagcaggtgttatccctgtggtcaagacatccattggcggtactcgtattattggtcgtctttgtgctggtaacaagaatgggcttctcttgccccataccaccacagaccaagaacttcaacatttgagaaacagtctacctgatcaagttgttgttcagcgaatagacgaaagggtatctgctctgggaaattgtatagcatgtaatgaccatgtggccctcacacacactgatcttgacagggagactgaagagatgattgcagatgttcttggagtagaagttttcaggcagaccattgctggcaatattcttgttggtagttactgtgccttctccaatagaggtggcttggttcaccctcatacttccatagaagacttggatgaactttctacacttcttcaggttcctttggtggctgggaccgtgaaccggggtagtgaagtaatagcagctggaatgacagttaatgattggactgcattttgtggttccgacaccacagcaacagagctatctgtgatcgagagtgttttcaagctgagagaagcgcagcctagtgcaattgtggatgagatgaggaaatccctcattgatacctatgtctgaactgtggtagtaatagtgttttgttttatgcaatatattgcactgctgattgttaagattttctaatttaagttttggtgatagtttgtcttttgtagtgtgggcatatatattcccatcgtgttgtactcttttccttaattgtgatatcatataatatcatgtgctgatttttgttaccaacaaatcaaatgcatgtaagggtgctcttgcgttccactcatggtgacggcctaaataatagccttaggttgattcgaagcaatcaaattttgtcacgttaagaaaaatttcttacatttcttgatgtataaattctgcattttttaactctttgaaagaaag

SEQ ID NO: 28095 - DNA, 330 bp, Glycine max
  Clone ID: PAT_MRT3847_125371C.1
atttttatttttccccttcaatctttgttttttttttgtttttttttcttttttttccccccggggcctaaaaaattataaataaaaaggggtctttttcgaaagttctacaagggcaaatccattgcacaaattcccaaccggccaacccccctgccaaaaaaaaataataattaaccccccatatgggggcccccctatgggcttaagggtaaattttcaaccctggcttctatatcagggggcctagagttccttagttcaaaggcccgctggtccaaggacccccccaaaccattggaggggcccaaaaaaacatttggggccccc

SEQ ID NO: 28096 - DNA, 404 bp, Glycine max
  unsure (1)..(404): unsure at all n locations
  Clone ID: PAT_MRT3847_125372C.1
gatactcggccgagaaagnnngacaaaccgcgggcacaggttgccgcaccggaaaaccggaaacaaaagcaannncggacaggaggcaagaaggacccaagggctccctacgacgagggggacgaangccgaagggaaagaaaagcaccccctgggccggccacagacaccgggaancaaaanctnngccactcaaagaggagcggctgaacactctcctatgtgatataggacttcgagtcagatttaaacttcttctgcctctttctcagttctctgcggaatttcaagttcaggctggtgaaatctcggatcaggactcccactgctctatctggcataggattgcgtgggtagacggagatatttctgtcctttctgtcactctcttattttcactgatc

SEQ ID NO: 28097 - DNA, 196 bp, Glycine max
  Clone ID: PAT_MRT3847_125373C.1
aggtcttccacacggcatgcaaaaatgttgatgctgatcagaggtttactcatgactcggagaacttaacaacagacttgccacgactggtcactggactggtaaagccatccgtggacattttgtggatcactcggagaatgaaactgttcacaggtcggatgggagttgccatactctatgcttacatcgcact

SEQ ID NO: 28098 - DNA, 214 bp, Glycine max
  Clone ID: PAT_MRT3847_125374C.1
aagatctattcaatggatctatagtaggggatatttcaagaatttagtagtcaataagcagggttatagtatattggacatcactgtaaaaatacgggaataggttattatataatactaataaggtgagttatatattggaagtatcaatgaatgtgagagcaggtgaaaaactctatcttgagttggactttggcacatccggtgccaggtt

SEQ ID NO: 28099 - DNA, 488 bp, Glycine max
  Clone ID: PAT_MRT3847_125375C.1
cggctcgagggctggcagtacttgatcacacatttcagtgattttcaactggcgtgtttgggaagtttctttctacatgaaggtgttttcttcttgtctggacttcccttcatatggcttgagagggcagggtggatgagcaagtacaaaattcaggtctgcccttgttcaaatttgtttttatctcaattttgtttttctatttagaatgagcatcagtcatgactaaactgctccaacattgtttgctttgacttaaaattagtgttccttcacatgcaccttgtttttatatcaattattccttttaccctgtttccttggtgctaagaacaagtgaagaagttcctggatatttctcttttcatagtgtgtttggataacacaaaagaatcagttctatcccacaaaatcatgacgatatcatgaaaaaaagtaaaagcaactatttgttggttactttcaccgtgaaaaagtaattgattatt

SEQ ID NO: 28100 - DNA, 196 bp, Glycine max
  Clone ID: PAT_MRT3847_125376C.1
agcaatacaatagcaaggcgagagaagaccgtagcatgaatacatttcatgtactagaaacccttatacaccaaaacaccaccagctaatgcacgtacacgaaaccgttgcattggatttggagattaaaaaatgaagggggaattaaacattctatataaaccgccaaaacaaacgaaacgcttcaatggagctc

SEQ ID NO: 28101 - DNA, 398 bp, Glycine max
  Clone ID: PAT_MRT3847_125377C.1
accacgcgaccggacatttccaccatccatactaatttcttaccatgaagaatcttaaaaagcgaggacgcataaccctagaccggcacaaaaccataccatagccatgactagtcttggccctcattctcaggatagggaacctgtaaccctccccatgaaggctaccacagccgtcgacaagaacgacgacaaagccgccaacgccaaccgccgatctagcacccaaatcgaaaccctaaaaaacactaatgctaggacaaacaaagcaccatctagcgacacttcatcgaacactaagaggctggatgatgatactgagagtctagctcatgaaaaagtaccaactgaacttaagaaagctataatgcaaactaggaaggacaaaaagcttactc

SEQ ID NO: 28102 - DNA, 1849 bp, Glycine max
  Clone ID: PAT_MRT3847_125378C.1
cacgaccgcgcgaaagcgggcgactcttacaaacataacacattcagatactcactcacctgtttttagtagtttcttccctattttctgttcataactcagtttgtaactatgactgctgaggttatggctcaagaggagacacaagcagctgaggttgttgttgctgttgagcccctgaaagaggagaaggttgctgaaaaaaatgtgaaaccaagagagtcatcaatggaatcatccaaacccaaaatggtggagaaaagctcttcttacaaggaagagagcagaaaagcttttcatccaaggaagaaagcaagtaactttctgatctcaaggagtttgaaagaaaggccttgtgtgaagtcaagtcaaagctttaagaagctatcttggggaacaccctttttgatccaaagaaggaagctttaccagagaatgaagagaagaagaatgaaggtgaagagaaagaggaagaggaggagaaaaaggttgaagtagaggagaatgatgtgtctatttggggagtgacccttttgccaagcaaagctgctacaagtgttgatgtggttctgttgaagtttttgagggctagggaagctaaagttaaagatgcattgagacgtgtgagaagacgacataagtggaggaaggaatcaaagattgattctgctgtggatgaggattttggctctgacttggcctctgctgcttacatgaatggtgttgaccacgaggggcaccctgtgtgctacaacatctttggtgcatttgaaagtgaagagctttaccagaagacttttgggaccgaggagaagcgcagtgagttcttgaggtggaggtgccagttgatggagaagggtattcagaagctcaatttgaagccaggtggtgtgtcttcattgcttcaaatcaatgaccttaagaactcccctggtccttcaaagcttagggttgccacaaaacaaactcttgcaatgttgcaggacaattatccagaaatggtggcaaaaaatattttcatcaatgttcctttctggtattatgctctcaatgcacttttatcccccttcttaacccaaagaacaaagagcaaatttggtggttgctcgtcctaacaaggtcactgaaacattgaccaagtacattccaattgaggagatcccacttcactatggtggtttcaagagggaaaatgattctgagttctcttcccaagatgttgctgtttcagaactcattctcaaggctggatcaactgcaaccattgaggttcctgcattggaggttggaaactctttgtgctgggatttgactgttctgggttgggagttgagttacaaggaggaatttgttccaactgatgagggttcttacacagttattgttcaaaaagggaagaaaatgggttcccaagaagggcctgttaggaacactttcaggaacaatgaaccagggaaggttgtcctcacaatagagaacacttcaaacaagaagaagaaggtattgtaccgttacaagagcatcaagagctccttctgagaacacaattcagaagttctatttttgttaaattgtgtttttagttgtgtgaagactgaaaaacaagagctattctttcattgttagtgattggtttatataccatttttttttgcctgaaatgaaattgattgaaagttcattcattttatctgtgccaataatgtatctaatctccttattcttctgatgtaaatgattttctgctgggtttccttgaaggattgttagagtgtgtgtctgtctgcttcaatttagcttgtgcactatttatttaatttacacaattttccgtaagttccaagtcaaa

SEQ ID NO: 28103 - DNA, 203 bp, Glycine max
  unsure (1)..(203): unsure at all n locations
  Clone ID: PAT_MRT3847_125379C.1
ttccttaaatataagaatannnnnntgatgggattcaagccaaaatttgtgaatagtgttatgtcggcaataataaacactggctagtggcgactaactaacggaagcaaagaaaattcacgacaatgacccacaaatatggattgaacttaccatgcgttcaaatatgtacaaattccgtctcttcaaaaagatcaaacctg

SEQ ID NO: 28104 - DNA, 635 bp, Glycine max
  Clone ID: PAT_MRT3847_12537C.1
aatcgctatataaattcctgtctcagattgaatgaggagatgaagagtgttgatggtctcgcctctcaattaaaaatcttaagaaagcatgtcgatgctctggacgcagctgttaacaagcttcttcatatcccctgaaactggggggatgcagtcttgtacaaggtttgtttctgtttcccataacaaactcttaaaataagttgaaatatctatcatttcatgtattgcgctgagatagtgatgaagtgcaagtaaagcaacataatatttttctcttccggcagttaatatagggggtagagaactggtgatatttcctcttttcccctcataaacacaagggataaagagtttacagattgttccccatgttacaatgtgtatgtcacaagatttttttagtgcacggtatggttaaagttttagatgttaaagattttgtgtccgcgcctttgtcttgatcactgtgctgttaatagttgtttggatacagaactctgggaatgaaagtacttagagactagagtggcatattttgatgctttattttgttttgaaatgggtggtataaacattatatgcttcttgttgagaaatctatgcccgtccatcttgcagaaagatgggatgag

SEQ ID NO: 28105 - DNA, 305 bp, Glycine max
  Clone ID: PAT_MRT3847_125380C.1
tttgggttttgttttttttttttttttttaggaatagtatttaatattataagcagagattcataattcagattagccgaactttatacagaagcgaccaattaccaaacattaaaaaaaaaaaagaagcaaccatgagcttaacacaccctcctccagtccaagggacttgaacttgctgaaagggaagacatgaccactttattctaaggatgtttgtttaacacaaaacaccagagggcacgaaaaccatcccagacataatacataagtttttaggtacccattaatagtttatcattatt

SEQ ID NO: 28106 - DNA, 689 bp, Glycine max
  Clone ID: PAT_MRT3847_125381C.1
caaggaaacccagaagaaatcatttaagtagatttaggtacattattggcacaggaaaaatgaatgaactttcaatcaatttcatttcgggaaaaaaaaatggtatatcaataacaatgaaagaatagctcttgtttttcagtcttcacacaactactcacctacctccaaaactataagcaaaacccaatttaacaaaagtgttctcacaatttagcaaaacacaatttaactataagcaacttctgaattgtgttctcagaaggagctcttgatggtcttgtaacggtacagtaccctcttcttcttgtttgaagtgttctctattgtgaggacaactttccctggttcattgttcataaaagtgttcctaagaggccattcttgtgaacccattttcttccctttttgaacaataaccgtgtaagagccctcatcagttggaacaaactcctccttgtaactcacctcccaaccgagaacagtcaaatcccagcacaaagagtttccaacctccaatgcaggaacctcaatggttgcagttgatccagccttgagaatgagttctgaaacagcaccatcttgggaagagaactcagaatcattttccctcttgaaaccaccatagtgaagtgggatctcctcaattggaatgtacttggtcaatgtttcagtgaccttgttaggac

SEQ ID NO: 28107 - DNA, 643 bp, Glycine max
  Clone ID: PAT_MRT3847_125382C.1
gtctgaactcaattgtgagtgaaaaggggtttctcgcatttacttcactttgcacttcacttctctctctctctcttgggttgcattgaagctttttgtttgagattctgaagtgaggagcaactttcttcttaatgttcactttgggattattcattgtgttggttggtgacaagctgcaactatgaagagatttctctctcacagttttctccttcaaattgctgtctctcttcttcttgttcttcttctgtttatgaacaagtctcagggctctccaatcaggttcgcaaaatattcgttttctgtcactactaaggttgatgcgctgcctcctgctatccctccaagtagtacacagccacagccctttattccccttctagctccttccccattgatacctttcacaaataattcggtgcctaagttatcaggtcattgttcattgaatttctcagctgctcaagatataatgaccacaactgctactgattgctggacttcctttgctccatatttggcaaacgttgtatgttgtcctcaatttgatgccatgctggtgaccctcatagggcattctagcaaatactctggggtgctagctttgaacacaactcatgctcatcattgcctctctgat

SEQ ID NO: 28108 - DNA, 362 bp, Glycine max
  unsure (1)..(362): unsure at all n locations
  Clone ID: PAT_MRT3847_125383C.1
gggcggacaaactaacattgagcatgaattnttnngtggggagatggcttggatagcaacccatcacttacttttgttggcacacccattatacttacttcagaccgctcatttatgtctgtgttcacacacatcatacctactaaaaaaagtgtatgaagaccgaccacttactgaagggatggtgagggaggtgcctacgactggcttgcatgatcgagccagactgtgtgggggtgactagcttgggacatgcatgggcgggcggcattccttctggatggacatacatagggagcgaacttgtttgggagggtgatgcacactcaacagacacctagtttccatccattaacaaacat

SEQ ID NO: 28109 - DNA, 551 bp, Glycine max
  Clone ID: PAT_MRT3847_125384C.1
atgtaaatcaaaattgaccttcatggtcatcgttcagtctgcacaaccacgaattacaaccttgatgtgaatatatcctcgtagaagaatttcttaagaagttgcatatgtgctatctggaaatgcatgatcacaataacagaaccatcatcttgtggacctcgcataataattcccctatctaatgcacacacatatcctaaaccaaaatacacaggctttccccacccgaaatcggtttcatacgcccgcatgttgatccagcttgtgatttgaagattcggattccctccaaaaggtgcatatctaccttctccttgtcccaagaaaaaagcctttatgcaatccaattgctcctcaccaaatacaacttctaagtgtgaccttatgtacttatctgtaagcaatgccactgcttctctcattttttgggcagcatagctcaatggtcttgttgtcatttctccaacataacattctggtgtcactgttgctaccaaagcattcccaaaagaattcctgcggagaggaggaattaatcgattgggaaa

SEQ ID NO: 28110 - DNA, 117 bp, Glycine max
  Clone ID: PAT_MRT3847_125385C.1
gtcgtaaagctacaagtactggttttggttcaagtgtaaatagtagttctaatcatcaatctggtgctagtgctaaagaagattcattctctgcacacacttctcattcacaatcaa

SEQ ID NO: 28111 - DNA, 353 bp, Glycine max
  unsure (1)..(353): unsure at all n locations
  Clone ID: PAT_MRT3847_125386C.1
cccacgcgtccgtacggctgcgagaagacgacagaaggggattcctgaagcaaccaacagaagcatcgtcgtcgtcatcaccacccaaaaactcagtcaaagcttcacaccctttttcttcttcatcttcgcaatctctctctctctctccgacccttttcatcaaagttccaagatttctcttcccaggcacgcccccagttttcccttttaacaatcttcaaccccgtttcacgttatttaataaaatccttttccttcttaatcccaaatctgaaaccctagctcccgtgacccaatttccgcctcctcagttggcttctgaagtagggggaaaagcnnnnaaaaanaaa

SEQ ID NO: 28112 - DNA, 858 bp, Glycine max
  Clone ID: PAT_MRT3847_125387C.1
ggtgccacattgtcatattttattattacctaagcttttgtcacttagaacaaatttttggtcagttttgaaaaatgggttctggaaaccaggaggtatcaatgttggtggagaatggtggtggtgggaacaacgtgaaggggtttgagcaaggaaatgagacatggcagaacggcacataacatgtcatcatcttctttgcacaagaaatctgacctaactcttgtgtctaaggttcactctatccccctcaggaatgtgttggtgaatttgcaagaggttgttcttggaaccaagctctctattcttttccctgccattccccttgccgttgttgctcaatgctatggctttggaagaccttggatttttgcattgagcttacttgggcttaccccacttgctgaacgagtcagtttcttgacagaacaactcgcttattacactggtcccacagtgggaggacttttgaatgcaacatgtgggaatgctacagagctcatcatagcaatttttgcccttagcaataacaaaattcacgtggtcaagtattctctactgggttccatcatttctaatcttcttctggttctcggaacctctctattctgtggtggcattgcaaacattagaaaggagcaaaaatatgatagaagacaggcagatataaacttgctcatgttgtttgtggcactgctttgccacttgcctgccagtgttgttccattatgttggtgcctcagctgctgacactgcagagtcattctctgcagttgtcaagagctgctagccatggttatggtgattgcttattgcgcttacctcgtcttccaatatggactcaccggcagctatttg

SEQ ID NO: 28113 - DNA, 408 bp, Glycine max
  Clone ID: PAT_MRT3847_125388C.1
acatcctcaacaagaagatattatttatttacatttgaaccaaaagttacattgcaaagtgaaaaaaaaaaaaaaaaaaaaaggctggcaaaaaaccaccatggggaacaaaccagtggagggccattttttttttggcttattataaactcacccttttttaccacatgatctaaagtttaaacagaaaaacttgagagtagaagggagagacatgctttatatgctataaaaaaaattcagtagggccaaaaccaaaggggttgatcttcctccggaattccaaaatggcatgaaccatggggggggggggaggaataaacattttcaagcttgggaaaaatgtaatgaggcaaaagggtcttgctcaagttatttttttcatcctgagacacataaaatcgatca

SEQ ID NO: 28114 - DNA, 336 bp, Glycine max
  unsure (1)..(336): unsure at all n locations
  Clone ID: PAT_MRT3847_125389C.1
gcacgcgnacgnaagcgggggangcggcncgagcaanacaacaagagggaagccagcgacaggcaagccgacagagaaaaaagggggacncgngaagcggacgggggacnnccaaacggaangcccaccaacncccnnggaaccgccggcaaagagncaggcgggacgaaaaacacgggaaaggaaaacaaccaacngagacagggacaaacaaaagccagacggagagaaaaagaaaaagaaaacagaaggcaccgacaagcgaaaaggaacgaacgggggcgcaaacaagcaaaaagccggcgaggcccggccaaaaaagagcggcaaagcaaa

SEQ ID NO: 28115 - DNA, 264 bp, Glycine max
  Clone ID: PAT_MRT3847_12538C.1
aactgctgataaactcataggtccaatgtcggcttgagactagcaggacatcgagcctactcagatcactggaaactcaacccgtgcatctgctcaggatgccgtgctgaatctatttttttgagcatacacgggggtattccttgcaggactatttactgacgaggagataggatcttgcattccacattacgcttgcccagattatgctgcaagaaggcgctatagacagaaagaattcaacccacccttatttaaaacatc

SEQ ID NO: 28116 - DNA, 315 bp, Glycine max
  Clone ID: PAT_MRT3847_125390C.1
aacatgcacccttaagagaaacgtatatcacatgacataactttatatactatggggaacgagttaacttttaacaaccactacacaaaactcatcaaaaagtataccattgtcaacaaagaaacacataaccatatcaaaattccgctagactaaatacgaaacattatttattctcatctgactactaacatatactctaatacacatcattctatcgtcgcataatctaattctctgaactcatactacataattcccaatgatatactcaaacaggataatatctttagcgccgacaccaatatctaccat

SEQ ID NO: 28117 - DNA, 1064 bp, Glycine max
  Clone ID: PAT_MRT3847_125391C.1
ccacgcgtccgcggacgcgtgggcggacgcgtgggcggacgcgtgggcggacgcgtgggctgctattttgtttggaacactgcgtcttcaacccgaaggctgcgccaccacctcagcctccatcgtccacgaattggctaagaataccaatggcataccgacggtgcctcttgataagagggaacctcgtggatcggaggtgccatccgtctttcagttatgttctccacagtgaccaggggaagcacgaaaacaccaatgaaaaatcatcttcaggaggggatggtgattttacccaaacaaggtcctttggaagctctcttaatggaccaatgggtttttttgcgcattcccgtgatagatttctttctccgtgctccagatatggtttctgccgatatatgtcgacggtgaatcagggttcggataagattagtagtgacgtaatgactgatgtggctgatgtcctcaccaacacaaccatggatgctgtagtttctcaggctcccgttgtcaatgaggttgctattgctgctgctgattcttttttgcctgtacaggccttgcagtacgttatagatgctgtgcattcctacactggcttaaattggtgggcagccatagttctaacaaccctgttgattcgaaccgctacagttccactcttaataaatcaacttaaggccacttctaaacttacgttaatgaggcctcatttggaagagataaagcaacaaatggagggactgactatggatcccgtagctgttgctaaaggtcagcagcagatgaagaaactatttaaggaatatggtgtgagtccttttacgccattgaagggactctttatccaagggcctatttttgttagtttttttcttgcgataacaaatatggctgaaaaagtgccatcattcaagcatggcggagcttcttggtttattgatctctcaactcctgatgccttgtacatttttccagctttgacagcattgtcattcttaataacagtagagtgtaatatgcaagaagggatggaaggaaatcctgtggcttgcaccatg

SEQ ID NO: 28118 - DNA, 431 bp, Glycine max
  Clone ID: PAT_MRT3847_125392C.1
taccggctgcgagaagacgacagaaggggacctaagcgataagacgaacagcatgggtaataaaaaagaaacctaaaaaaagacaaaaaaaaaaaaaaaaaagcggacgatactagaggagctcatagcttacccacagcttacatgcgaaggcatacgacttctataagtgtacctaaagtcaatctaaaggcacgtcactgtacaacagttttaaatgggaaaaacctggaaaaccccaacttaacccacttgaatcacattccactttatccagcttgcgtaatctggaaaaagaccgaaaagatcggccttgacaacactttgccaacactgaatgggcaatggtacccaccctgaagcgccctattaagccccattaatggcgggggtacccgcagttacacccatacactatccaacactctaca

SEQ ID NO: 28119 - DNA, 311 bp, Glycine max
  unsure (1)..(311): unsure at all n locations
  Clone ID: PAT_MRT3847_125393C.1
tnangcangcntacgtaagctcggaattnggctcgagnatctccatactgtaagaagagnctatgtngatgnntntcttcatngncanattgtnanncttgntttcntgtaantgnctcntggagtgcnttatnagctttaaacgatgagtaaanntggttgnngaaggaaanggncanccncagtattctggnanngtntancatgaagnagaagttcnccaantcangagggatggaacatttagctatggtagaggcatanggcanaaacaattgnannnntgggacaagnnctcaggtnaggttgca

SEQ ID NO: 28120 - DNA, 402 bp, Glycine max
  Clone ID: PAT_MRT3847_125394C.1
aaaaaaaaccccccctttcacacttttttgcaacatttaaaagggggggggaatttttaaaatgggcagaccttccccaacaaagggggaatccctaatttcctttatggagttaaccaaactaccatgcgaaaaaaaccccattttccagatactgccagggtttccgatttttcaaaaaacttggcatgacccggggaaaaaaaaaacgttggcttaaaagttttcccagctttttaaaagttttgagaaatccccaaaaaaatttaaaaacctgtaacttgttgggaattgcaaaaaaggaaacctaaacgccatgaagtttgatttgccccctcaaaaccccccttttaaaacccttttttaggcccccctcccttttttgggaaaatcaatccccaa

SEQ ID NO: 28121 - DNA, 117 bp, Glycine max
  Clone ID: PAT_MRT3847_125395C.1
tgatcgtgatgaaaggaagctagtttctggactgatacagatgcgggtacatcggtgtaatggagagcagactgcaaattctgtcattgatatatgaatcagcaacatatgtgtata

SEQ ID NO: 28122 - DNA, 1391 bp, Glycine max
  Clone ID: PAT_MRT3847_125396C.1
cccacgcgtccgctccatccacctttttcaccaacccgcatcacaaccatccaacggcgcaaaaaccttagaaggtgactgcacccttgcactctaccgcaccagaaaactttccatctcccttatcctgtgctcatcgctacggccgccactgtaaccacaatgacggaagagcctgaaaccaatccaccgccgccggaaccttcaatcccatccgcaccggccgccgtggaagaaacggcagctccggttacggcaacaacgtcgcaaccaagcgctgaaatcgtcgtccctcttgcgttagctccgaagcggcagcgccgtccaagcgttcgtctaggggagatcggcgaccaacgtgcctccgcacacggccacgaattgcacatgcgacgcccgagcatgccgccatggagctggcgtactccgaaggaatcttcaagaacctcaaaagcgcgctccgtgacgaacctcacgaacggcggcgaagagttcggaaacagcaacagccgaagagggaaagcaaaacgaggaccagcgacaaagagattgagaacaaattgggctccgacagcaacaatcgacgaaaacggtgacgaagaaggtttcagggattttgaacacgaacacgaacagagtccggtgcactcggtggaggacaacggagtggattattggcacgtggatcggaacgaggatcctagggttagggtttcggaaaacgacggcgttgaatcggagtcgcgggaacggaggaagagcgatggagtgaggtcttggctttacgagttagggttgagtcggtatgcgcctatgtttgagatccatgaggtcgatgatgagttgcttccgatgttgactttggaggatctcaaggatatggggatcaatgctgttggttcaagaaggaaaatgtacactgcaatccagaagctgaggaaatgcttgctgtgaccacatgatcaaatcaagatgaatgtatgtatatgtatatgtatgtgtagtttttctttgttctggctttcaaatgtggatagaaaaacgcatgtatgtaatgtatgcatgtacaagagtttttggttatctttgctttctggttgaaatttcttgatggcatgttttctgtgtgattttgtcgcctaatcgaaatagctgcttacctgatttgaaggttttttgaacatgggagaataatgaatccgatgctgaatatgttttcaaataatgtgcaatttaatgctcatttagcttctggttaagctgaggattgatgtggttttgtaaaatagaaatgagaaatatgtagtgtaattaagttgtcctatagtttataacttgtgtattctgtgtcccttcgagcgctgttatattgaaaaatgtttgttcttttt

SEQ ID NO: 28123 - DNA, 382 bp, Glycine max
  Clone ID: PAT_MRT3847_125397C.1
ggctcgagcaaaacagcatattgtggttttgtcttctctatatataagcgacgaaggttttcattgacagggcgtcttcggttgccatatgatgatatcttgctctgggtcctcaacacatacccgtttaatagaaaataaaaccagagtcctgtggttgttaaaactaaggcatccctttggacccatcagtagcgctactactgtgtggacacgtatgtggcttgtgaaggaagcctttcactaggtcaaacaaggaacaagacatgcccattttatgtcatgcgtgacctattattcagaagaaccccagtgttattcttagcaccaggcctaggccatgtgacaacactcactgatcaaaccattgctttccctgtgg

SEQ ID NO: 28124 - DNA, 535 bp, Glycine max
  Clone ID: PAT_MRT3847_125398C.1
attgggctcctagagcgacaatcgacgaaaatggtgacgaaaaaggttttagggatttcgaacacgaacacgaacagagtccagtacactcgatgaaggagaacggagtggattattggcacgtggatcggaacgaggatcctagggttagggtttcggaaaacgatggcgttgaatcggagtcgcaggaacggaggaagagcgatggagttcggtcttggctttacgagttagggctgagtaggtatgcgcctatgtttgagatccatgaggtcgatgacgagttgcttccgatgttgactttggaggatctgaaggacatggggatcaatgctgttggttcaagaaggaaaatgtacactgcaatccagaagctgaggaaatgcttgccgtgacatcaccgtgttgtaatcggatcaagatggatgtatgtatgtattctgtatatgtatatgtatgtgtagtttttctttgttctggctttgaaatgtggatagaaaaacgcatgtatgtacaagagtttttggtttatatc

SEQ ID NO: 28125 - DNA, 671 bp, Glycine max
  unsure (1)..(671): unsure at all n locations
  Clone ID: PAT_MRT3847_125399C.1
ggtaccgccctggcaggctacccggtnccggnaatctcccgccgacgacccaccttgcaggcgaaacgcagcgtttcggcatcatgatacgcggaggccaaaactacgtttcttccgctccggcgttttcaaacgacggcaagcgcctcctcgtttgcagcggctccaccgtgtccatcttcagcaccggcaccggctccctcgtttcctcgctcgaaggccacaccgcctccgtcaccgccgtcgtggtggtcccctcctccactggcctaagctactgctggaccgcttctgtcgacggtaccatccgccactgggacttctccgttcccgaatgcgtcaatattatcgacctttgcttaccaattttctctatggtggtgccttccatattgtctcctcgggaagaaaacgggaagacgccgccgaatgttattgcttacgtgtctgttcaaggtataaaagcaccaccggacaatcccaccaagcctctttatggacagatcaggaagtgtaatttgacccactttcgctctgttagcaaccttatcatgaaagagactgaacgcaggaaatctttaaccattagtccctcgggtaattttttgggtataaaagacaaacggaaacttcatatatgggcagttcctaaaaaggactctgattccgct

SEQ ID NO: 28126 - DNA, 806 bp, Glycine max
  unsure (1)..(806): unsure at all n locations
  Clone ID: PAT_MRT3847_12539C.1
attctttttcaaacgtccatattttgatgagttgaaagtggaaagtagattcagagatcttcatgatgaagatttgtatgttgaagtgaagaaatattggtatcgttgggtatataaacaagatctggaattattaaacttaacaacgatgcacagtaaaaattcgtcgcctgggaagcgcaaatatttggcaattgaagaaaacaagtagcaattgcaattcggctcgagcttgctgttggtgaatcatctatctttatacaaacaaggtcctaacattataaggaaatgtcaaaaatgtccctactttgctgaggtgtcgaaatattaagccatgtagttcccgcccaaaaacgtcaacatcacgctatgtagtttctttttattttgtcttcgggtttttattgcacttttgtttacaatgcgcttctatttccaatgcgcttctatgacagagaggatgtgggctcagaccataatttgcaagagatagaacacacaatgcaagtgttttgaagctaaaccaagtcaccagtaaccctaactgcacctcccttttgtttgaatgagaaagaagatgaaatggaagtggttggatggtgaataaagtcaccagcaacccgagtacaagtttgttttctttgcaggagaaagaagaaggtgaaataagtaacccacaaccctaagtacaggattcttttattatcatgcgattacgaagcgatttccttatttgttatttggtatgttgcgattnttttgtcaaatttgcatgagtacaagtacgtcatggtgtagttttttgg

SEQ ID NO: 28127 - DNA, 1365 bp, Glycine max
  Clone ID: PAT_MRT3847_1253C.1
ccacgcgtccgttttctctctctccctttctttctctgtcacaagtctcaaaactctgttcttgggttgtctgattctctctgaaccacacagcgtgaccggcgagcttaatctcgccggaaaattgccctacgctcgccggaatctccaacttttccgatttgaactccgaattagattctgtctttcctttcctttttgccagtgtttgggtctttagaaacagccaaaattcaaaaaaaaaagaattcgcttttattttctttatcctggggtgagattgcaaggaaaacaatgcagagagaggatatgagatttttgaaaagaaatcacgagatcccttatttttgaattccttgtgttatagatatcctgcaagattcaatttttattcttctttatctctcctttcaaaagttccctatgcgcgtggggttgaattttgtgaggaacagagattttgaagttttttgtgctggggatttggtttttcacaattcaaggatgagtagagtacaaggaagctagcaattagggagttttcagcaatattactctttttccagattgtttggactctgaggctacaggatgccttttcaaatcatggatcagaggggtgtttctgcttcatcccactattttgatgacatttcctttcgctctgagaggaatgttggattacggaaaccaaaatccattaatgaccattacccacaaggaaacaatggaatggtagcatcacctggcaacattttgaacgctacacccccccttgatgtaaatgcaaaagctggcttactgttgccacaggctagtctacctggggataacatacattccacggaatcatcgaattaccgtaccaaatcattgtctgatgcatgtctgcagtcagcacctacctcttatggtttaattgggaacaagattgtgaccaatgctgccccttgtgaaagtagtttattctcaagctccatgtctgagatatttagccaaaagttaaggttattcgggaatgatgttcggtctgatcatctcattaatgctgattcccctcctgaggaagaaccatataaatctcttgaagaaatggaggctgacactatagggaatctccttcctgatgaagatgatctgttttctggtgttgttgatgagttaggatgcagttctcatgccagaacaaatgatgattttgaagattttgatctgtttagcagtgggggaggcatggagatggaaggagatgaacatttaagctcaggaaaaagaataagtgctctcgatggagattttgggtttccttggaggttataaaggaaaacttcctttttgtgaacagccttttagaacactttttgt

SEQ ID NO: 28128 - DNA, 601 bp, Glycine max
  unsure (1)..(601): unsure at all n locations
  Clone ID: PAT_MRT3847_125400C.1
agctcggaattcggctcgagcacacagtaatagtatcaccaactactcttctatcactctcaaaaaaatctctccaaccttattgcttcttcaatcaacaaactattcacagttgcactgtctcctttgttgttgtttgatggaaaactgcatcttccactaccatcaccacacactcctcactctcccttcaatttctcacaaaccccacttcagattcttcacaagacctgatcttggtggtggtggtggtggtgttcgtgttgcttcttcttcttcttgtttgttattccataggcgaagaccctttatcagagcaagtgctggagcaagcccatgtgagtttagtagcctaaactctcctttggagccacgnttccatggtgnggagttcctcattggtgttcttcagaaccaccctcagatgttccatcttgctgttggggaggagctgaagctcttggctgaggatcgtgatgcggcacatgctcgcatggtgcttggttctgcttctgatgaggcctngcttcacaggaggattgcactagtaaaagagaaccaatgtcaaattgctgtagaagatgttatctacttgctgatt

SEQ ID NO: 28129 - DNA, 484 bp, Glycine max
  Clone ID: PAT_MRT3847_125401C.1
ccgtagaaagaggtttaaggtttcacccgccgcgccaaacacaccaccgaaagcggattcaagggaaactatcccaacccctccttacaagaggctggagccaaaggagccacagccaggggaagaagctaagatccacgtcaactgaaacgcgcccacgaaaaaaataccccatacacggacacaaagctactcccgaagccgaaagcaaaaaaatccacacaagccccaaggaaaccgaagagtatggccgaaacaaaagcactgataatcaaccggctaatcaagcaagtcctgccacacaggatccagggccccctaacactctggctcaaccaggcccaggagacgccaaggacccccagaaaggaggaccccaaaatgccttgggtgaaggcccaactatgccatccacaacaccgaaagaaactggcttccaaagcaaagagccagcgggtgttccaccccccggaacatgtgaaag

SEQ ID NO: 28130 - DNA, 496 bp, Glycine max
  Clone ID: PAT_MRT3847_125402C.1
ataccaagctcttattgtattttttatttgtgttgaaatgaccaaaaactacatacatatatgtgcataaataattcttgtgtcccaccatataaaatcttcatgtcaacagagcttttatatctgaggtacctgtatcccggaatcaatatcttcactttcaaacgctcaataatgtaaacagcatcctaaaaactagtagaaaattgatcaacaaattaggaatagaatttaaagacattcccttctatcaacatctttctatgatgtttcgtgcctcttcaacatagtcctgccgaatcaatattttaataataattaagttatacatatgaatcgggagagcaaccattttcctgcatcgagtaaaacatcttctcggcttcctctaatctcccagattcagacgcacaccataaagcattgtaagtgtaattgtccggattcaagccagatcttgacattgaatcaaaaagctttttagctttttattcat

SEQ ID NO: 28131 - DNA, 251 bp, Glycine max
  Clone ID: PAT_MRT3847_125403C.1
gatgcaccctcgtagctggttggatcttatcagcggccgcttttttttttttttttttttttttttactgcgcgagaattctcaaccaaaaaccacactgcaaatacaatgcctcaaacgaaatatttaatggaaacataaaacatgaatctacacaagctgaactcttttagtgaaacaaaaaaatccaactgtggcattattttagcccaaaagggaagacacagttactatccaaatggtacaatgga

SEQ ID NO: 28132 - DNA, 906 bp, Glycine max
  Clone ID: PAT_MRT3847_125404C.1
tacggctgcgagaagaccgccgacggtcccgtctagggttgctcaacccaaaaagactaaactcacgggtccaaccgtttccgttgatccagatctggcagactagtatccgatcctctgtcctctcgaagctttcatcgttcaacatattctcaccatctcagtcatgggcctgctatcttgttttaggtctaccgtcctgagaaaatgttccaaaggaagctctggcatgtcaagattcctgtatacgaacaattttcaacgaaacttgatttcgtctggtggcaatgaatcgtattatgggtattttaacaggagatcatacacttcactttatatgggaactggaactgtgggtgggattacaagtgctagaatcagggtgccaaatgtaggatgtgaaggattcatgtgctcaagtcatctgtcaatcactcaaagaaattcaagattgatccattctactagcaagattgttccaaattctgaaattcagaatataactactgagatggtgaagacaccagaggtctcaagatggatggatcaagtcatccctacaatagccccttgtgatgcagcagaaccatggcaactagggtttcaagatgcagcaacacctataatgcaaggaataatagacttacatcacgatatctttttcttcgtcattcagattggagtttttgtatcatgggtcttgcttcgtgctttatggcatttcaggtctaaaatgaatccaatccctcaaagaattgttcatggaacaacaatcgagattctttggaccatatttcctagtgtcatactaatgttcattgctataccatcgtttgctttgttatactcaatggatgatattgtagtggatccggccattactatcaaagctattggacatcaatg

SEQ ID NO: 28133 - DNA, 475 bp, Glycine max
  Clone ID: PAT_MRT3847_125405C.1
gtcagagtcgcagtcggaaaagcggaagggtttcaaagtgattttggaaggaattttcgatactaggcttacaataggaatctcaaattcatggagctagaccacggatgaaggaatgtcttgattaacttgaatttggaagcttataaatgtcttgattaatttttgttactctgggaaagcatggtttttcatgattttttattttttgcctagttggaactattactgctcactaccttgactcaaagcaatattataaatatttaacttactatggcaggcactgttaatgattggcaagtttacatttattgtgtcactactctaatgtttgggaacatgcataggcataactgtgattaattccttactgtatttgttgttcactatttgcaaagttgttgcctacagagaccctcttattgttgtcttaccgtcattccagaatagcaagtgagctagcccatcttat

SEQ ID NO: 28134 - DNA, 163 bp, Glycine max
  Clone ID: PAT_MRT3847_125406C.1
ttacagataactggctgaatgccatttatttaagaaacatcaggagcgagagtgaatagtctctctgtactgctatatgtatggatgaacactattggacttgatggaaaacactttcgagaggctgacgatatggtaatggaatggcacaaggagggcgagg

SEQ ID NO: 28135 - DNA, 563 bp, Glycine max
  unsure (1)..(563): unsure at all n locations
  Clone ID: PAT_MRT3847_125407C.1
ctttgataactaaggctgcagagaggctcatttcaagtgaaggggaactcaaaacacagcttgagaattttcgaagggatcctgacatatcatgttggcttgaagatgcagcctattttgctgctattgacgatagtttaaacacaatcagctggtacagttggcctgaacctttaagaaatcgacatcttgtagctttagaagatatttaccaacaaaagcgagattttataaatgtatttattgcccaacagttcctgtttcaaaggcagtggcagaaagttcacagctatgcacagagtaagggaatcagcataatgggagacatgccaatatatgttggttatcatagcgcagatgtttgggcaaataagaaacagtttttactgaacaggaagggctttcctcttttagttagtggtgttcctcctgacgcattcagtgaaactggtcagctttggggcagccccctgtatgattggaaagccatggagaaagatggatacctcatgggggtacgtngcatacgacgngcacaaaatttatttgatggatttaggatt

SEQ ID NO: 28136 - DNA, 2540 bp, Glycine max
  Clone ID: PAT_MRT3847_125408C.1
ggacgctgaatatagaaacccaatctctaacatcgtccgttcaaggttcacgagttacttctgactcctgaaattttccatacaaacacatctcattcactggaagagataagagatgggtctgctggcattgaacatctcagtgtgttgtttcccacagcagcgttgccccactctcttcaaacccaccattaccaaacaaaccctctccttccccaccgcttccgctttctcttcctcttccttaactcaactcagcgtgggccaatatttacccgccaactacggcgattgggttcccaaccccgacccggagcttcgcagaagatgcggcattctgctccacccgacgtcgtttcgcggcccctacggaattggcgatcttggcgacgaggcgttccgtttcatcgactggctccaccactcgggttgctccgtttggcaggttcttcccctcgtgccacctggcagaaaggccaacgaagaaggatccccttattctggccaggatgcgaattgtggcaacacgctcttgatctctcttgagggcctcgtcgaggatgggttgttggaaaaacacgagcttcctcaaccaattgatgcagagcgcgtgaatttttcacttgttgctgatgttaaggatcctttgataactaaggctgcagagaggctcatttcaagtgaaggggaactcaaaacacagcttgagaattttcgtcgtgaccctgacatatcaagctggcttgaagatgcagcctattttgctgctattgacgacagtttaaacacaatcagctggtacaattggcctgaacctttaagaaatcgccatcttgtagctctagaagatatttaccaacaaaagcgagattttataaatgtatttattgcccaacagttcttgtttcaaaggcagtggcagaaagttcatagctatgcacagagtaagggaatcagcataatgggagacatgccaatatatgttggttatcatagcgcagatgtttgggcaaataagaaacagtttttactgaacaggaagggctttcctcttttagttagtggtgttcctcctgacgcattcagtgaaaccggccagctctggggcaggttggaagttaatcctatgataaatcttaatttttcatgctctttattcaattcttgtcctgattccaacatataatgttctttcttttttcttaaagatatttgcttattctgtgattatggtcagcaagacatctcccttgacttgtattagtttagttcttttcatctttccatgctttaaccatctgtgcctgtatacaacaatatactgaacctgattagaaagggataggacctaactcaaacccaaagccagctcaagagaagatgattgcctaggtcttacatcgagtattttgaccatatctcttgttgatgctggacattttaacaatttctagacccttattcagcatttttttccttgtcatggtaattgctagcatattttaccacaatacattgtagtaggcttcctgtcctatttagattactgatttctcttatttaatattttcaaattttaatgaaaaagccccctgtatgattggaaagccatggagaaagatggatactcgtggtgggtacgtcgcatacgacgtgcacaaaatttatttgatgaatttaggattgaccactttagaggatttgcaggatattgggctgttccctctgaagcaaaagtagctatgcttggaaagtggaaggacctggaatatccttatttgataccattttcagagctgttggaaggattaatattatagcagaagacttgggagttatcactgaggatgtagtccaactaagaagatccattggagcacctggaatggctgttctccaatttgggtttggaggtgatgctaataaccctcatttgcctcataatcatgagtgcaatcaagttgtctatacagggactcatgacaatgacacaattggaggttggtgggaagctttgaaccaagaagagaaatccaatgtactaagttatctttcattaaatgagggagatgaaatttcatgggcgctaatccagagagtattggcttctgttgctcaaacagcaataatacctatgcaagatgttcttggattgggtaattctgccaggatgaatattcccgcaactcagtttggaaactggggttggagaattggaagttcggtgagctttgatggcttggagagagaggcagacagactcagagaaatgctttcaatgtatggccgactttgaatatggaattcctttgagtgtaaagaagaagagtttgctttgtaaaggcagcttatttggaaaatgctatagtatgcatgatgttgataaatcaacgctgggtgcttatgttggtcaagtaatttgagtattttggatgcttcaatggaaatttgtaaaaatgataatgcctagctcttacatcttgtgatgccatataacatatgatcgtttaaataaggaaaaaaaaatggcatgttatatc

SEQ ID NO: 28137 - DNA, 1382 bp, Glycine max
  Clone ID: PAT_MRT3847_125409C.1
acgagtaaacagatatgcacatgaatatgagttcattgggaggatggttgagcaggtctgctgcaagattaatcccacttgtttacatgttgcggattatttggttggactagagtcacaagtgtcaaaagtaatgaagcttttggacgttggatctgatgatggtgtccaccacatgacagggatccatggtatgggtggaatagggaaaacaacacttgctctgtctgtaatttaattgctaactgttttgatagttcatgttttcttcaaaatgtaagaaaaatcaaacaaacatgagctacaacatttccaaagcatccttctttcatatatacttggaaagaagaaaattaagttagcaagtgagcaacaaggagtttcaatgatacaacatagactccagcgaaagaaggttctcttgattctagatgatgttgacaagctcgagcaattacttccattggctttggaagtaataggttccaacttgtttggaaaaaatacaagaagaaccaaaatctgtcatcaaacaatataaacaaattcttactattcaaatcctagagatacttaaactaagctttgatgcattggaagaagaagagaagagtgcttttcttgacattgcttgttgcttcaaagaatatggacttatattgcttttcttgacattgcttgttgcttcaaaggatatgcattgatagtgctttgcttgacatttgtgcgttgataaatgttgaagatatacttggtgctcattatggtgacaacgtgaaatagtattgacatattggctgaaaaaatctctcataaaggttagagatggtagaggtacattgcacgactttaggacatggttacaaaaattgtcactcaagaatcaccaagagaaccagggaagctataattcaagttttggaagacaacaccttgaggaactagtgaaattgaaatcatatgtctagatttctccatatttgccaaagaaatagtataatggaatagaaaggccttcaagaagatgaaaaacctcaaaacacttattattagaaatggaaaattttccaaaggtcccaaataacttgagttggatggcttatccaagaagtttgtgaatctaacagttttgaattttggccggtgcgaatctttaattacacaaatacctgatgtgtctggtctcccaaatttggaggaacttttatttgaattttgtaagaatttaactacagttcacggttccattgattacttggacaaacttaaaatattgagtgcttttaataaatgtactgaacttggaagtttttcacccatcaagttgatctctcttgaaaaacttgaactttcatattgttctggtctcgagagttttccag

SEQ ID NO: 28138 - DNA, 536 bp, Glycine max
  unsure (1)..(536): unsure at all n locations
  Clone ID: PAT_MRT3847_12540C.1
acaganngtattttttttttttttttgtgggggggttttaaaaaaaacgttcatttaacttttaacaatataaaaataaccctccattcccaaactaaacccccttcaaaacccaatttttttaaacccccaacaaacctttttaaccaaaaaaattccccaccccttttttccccccaaaaattcccaacccatccctttaggcttcccaactttccttatagcaacgcgaataaaaccttgccataataatggccatacctatttcctgtgtaaaattttaatccccccacaattccacccacaatactaccccaaatcataaattttaaacccttgggtcccctaataggaatctaacccacattaatttctttaccctcactgcccctttcccaatataaaacacccccccccccaccttaattaaaaaattccccacccccccaaaaaaacctttttcatataccccccaaacttttttttttttcacacatgataacccccaacaattttttccccttttcccccccctt

SEQ ID NO: 28139 - DNA, 419 bp, Glycine max
  Clone ID: PAT_MRT3847_125410C.1
ggatacaattatctcacccattttgatgcttcagaaacataataggatttgaaacccttcttccttgaccacacaaaagttatccattttggcagtgattggacaagtcacaaaggatgataccattccgataccatgttgaaattatggaactttaggttttgagggaggaaatcgacagaaaagagacttaaaatattgagaattagaatgattaccatgtgacagggtattctggtaaaagctaaagcactaacccttatttatactaatcataatcctaactaaataaggaaaaaaatcatgagatattaggaaagatggtaacccaaccttagacataatgagggaattaaaaaactaaccctgaaggataatctaggatatcctaaaatatgagcaagataacattgggtagg

SEQ ID NO: 28140 - DNA, 289 bp, Glycine max
  Clone ID: PAT_MRT3847_125411C.1
ttttttttttttttctgctagatatctaaaatggggggggttctattttatttttttctttcccatttttatattttttctcttttccaaaaaaacccccccctttacactcttttaccccattaaaatagggctttgaatattttaaaaatgtccattcatacccaacaagggggtcccccccatatttccttttgtaataaaacaacccccccccccaatataaaccccatattcactttcttcctcgatatccttttttctaaaaaaattccatctcttccctttt

SEQ ID NO: 28141 - DNA, 550 bp, Glycine max
  Clone ID: PAT_MRT3847_125412C.1
ctctcctaaaagttcttttagataaaacttactcaaccagacccttatccttttttttctctgataagtgagaatgtgagatgaagtagaacttactggttaattgatatgtatgtagccaaatcgtttgaaatggcatacaacgtgtcctgtggctttatgttttttttctggtttccagcctcttccaaacttccagtactcaggttcatggtaccttacccctctgtgcaacaaagtagggcaagttagaagcaacaagtcaaagagctttaataattcaattcaataaaaacaaagaaaatcattttctcacttttgggataggacaggcccagatttcatgcatccaatgtatatccgtggttttgatcgatgtctaactagagtttgtcccagtgttgctgaaaccgaaagaatatgatactaagacaaaaagtacatactaaaacaacatcatgattacttactatagaaacataaaactcatgcttttttttacacttaggaatcgaagacagtgtcaggaggtttacaataaaactcatgc

SEQ ID NO: 28142 - DNA, 409 bp, Glycine max
  Clone ID: PAT_MRT3847_125413C.1
ctatctcgatcgaactgtccaaggtcctgtcacccgcaaatggcggggttggctctcacgtgggcctaggtttttaagtctggtagttgtagtgatggaatttgaattttatatgtgtatagatgatagagagaaaattcttcgtatcagcagctgtacaaggtcgacttctcagccttcccactcacgcactctgcaaaaatttttgccttataatacgtgtccattgaaaatccaggagttaaatttaaggcccaagttcgcggtataattaaatttgtgttattaattacaattgttgtgccgttaaagtttgtcaacagtgttgttcaggtattcatagcgttaattgtcacgtcgtgtgtgtcgtgtggaattgctcttatcgtgttagtcgtggtggccttga

SEQ ID NO: 28143 - DNA, 494 bp, Glycine max
  Clone ID: PAT_MRT3847_125414C.1
aagaacttcatgccaactatgtttgtatcttggctccttgtattttaatcaatggtttgatttgctttaagtaaattttgagttttcaattgtggtgctcgactttagccgtgcaatttagactatgtgtcgggatgttgacgttttcttttcgttctctttcttgtaggctcattgtgaatgccttgtcttgcagctgaagtgtgaaggtatcctactagcatttcaaaattatatattgaagctgggaacaagtatgatgattcctttaataattgttaatggcatgggaagaagtgatcgatgtgtgctgaatttctgctcgtgtaaaacaattaattcttgcttttgaaacacatttttttttcctgatatttactttgttactggtttggtttggttgctcgatcatatataaccagggtgataaggcatggtaatacaaactctcttcttgcagctgatattcacacacttctccaaacactttattg

SEQ ID NO: 28144 - DNA, 419 bp, Glycine max
  unsure (1)..(419): unsure at all n locations
  Clone ID: PAT_MRT3847_125415C.1
aaaagcggggaaaaaaaanaaaaaangnnngnttttaaaacccctttgggggggccccccnaaaaaatttttttaaaggggggnccccccntnnaaaaaaccccnggggggncccccgggggggtttttaaaaaaccccgggggttttnaaaaaaaaagggccccttttcccggggggggaaaaaatttttcccggggggccnttcccggaaagtggtgccctcnacnatgcntgttngcgggcatnagnnnnttttgnncgtnnngcctgntctnnnaacatntanaannngatgnntnatnaacntgncantntcaannggtgnnncncnnnngtgnagcngtgagntagcngcacntgaantgtntcgacagtactgnannagnannagncnagactnntgantantatagnanat

SEQ ID NO: 28145 - DNA, 262 bp, Glycine max
  unsure (1)..(262): unsure at all n locations
  Clone ID: PAT_MRT3847_125416C.1
gagcacattagttggcggccgcccgtccaaaaaacnncgggaaccattccaaaccnnnaccagcagcccacacaaaanaagagcagaaagggacaccccacaagcgcagacaacaaaanaacaggaagaagaagaagaaaaaaaaaagccagccacnagcagagacggagggaccgcaggaccacgngagaaccaaacnggagacaaggccgggggaggaaccaaccggagagagagccccagccgcagcccacccgggagc

SEQ ID NO: 28146 - DNA, 409 bp, Glycine max
  Clone ID: PAT_MRT3847_125417C.1
aatccatgcacgcgtcacagtctaactaggaatgcggcctccaccccgtacaagttggtgcactatgcggatataaaatggaaacatccaaaggcaccttcttaagacaatatctttgattacaaataaacccactcgaactggggaacactgataccatctacagattgttgcacttgaagtataaagaagttgatggaacttgcccttgggtggttgtggtacacatgctactctatttgccctccacaccaagaggacatttttatctgctggtgcccttccaaactcttcaaggtcaaatatttgtctttcctgggccggccatcgccagctattaaaagatatactgattcaccatgcactcgtccttctcttccaaaaagcatgggccatcattgtatatttt

SEQ ID NO: 28147 - DNA, 500 bp, Glycine max
  Clone ID: PAT_MRT3847_125418C.1
gtgcggcgctcgaggcacggcgggttctatctcgctgcctctgaagcttgcgtttcagatttccacgctgcataccttaagtcttctcgaattactaacgttacttcgcaagatggctaatgaaaagggtcagatcaacatctcgaggtgaatcgatcatgatggaccctgatgagcagcgcaaccaccatatgacgagctgaaatacacctcgtatttggagagagaagctccagggctatgccatatgacggcatgcacgtacggcctcgcaggggaaccaaaaaattatggtaacaaaatatgctggaaccctaatgtatcagagtcatcatcagagtggagttcaaactagctttgcgatggctacgtgtctttgagaagaaagtcttgatgaacagtaccattctgatgtattgctttccttgcaagacaatgcatgcttctgatcttctgtcagacaatgaaagcaaataggcccccaggcccgcgaccgctct

SEQ ID NO: 28148 - DNA, 286 bp, Glycine max
  unsure (1)..(286): unsure at all n locations
  Clone ID: PAT_MRT3847_125419C.1
ctaggggggcccccccctaaggggcatcccccccccccccccnncnnnnnnnnnnnnnannnnnnnnnnnnnnggggaacctccanatatcgctctcattatctgggtttcttcgctttgaacctggaattataaaaaaaaaggacgataaaaattggccaaataatgctagtaacagaagcctccgaaaactcaaaatatagataccacggcagtcctcaagatcccttttggaatcagaaacaaaagactcgctgttcgttgctgtttctcccacaatattaaa

SEQ ID NO: 28149 - DNA, 537 bp, Glycine max
  Clone ID: PAT_MRT3847_12541C.1
gaagaagcagatatctttataaattgcaaatcacttggaaactaactatgcattttaacatgcaatccattatattacaaaagaacatcacctaatctacataacaaatattggctgtacccacttcagacccttctttcatggtacccctcattcattcctttttcacagttccggccaaaccttccaattgattcccggacttaaaatataacgctaaggtataaaacttggaaaaagcaaaaggattgcagccattatggtcatcaccaaaaggaaaaaagaaagttacaggaaatgaagaaattgaacagttaaaaaatacaccttacaatcttacaacttgcttctactttacatgccaatgaacaaagcttttgtgattgcgagatcaaagatcagtttagttagtggggagcatgatcttcaaatgagcatgaggtctaaaatgagaaggttcatttattgatgaactcaccctcctggacctgtgatggggaaaaagcctgatggagaacaaggaacagtccccgggaa

SEQ ID NO: 28150 - DNA, 138 bp, Glycine max
  Clone ID: PAT_MRT3847_125420C.1
cggcccggtaatccccggcgaccacccacgcgctccgaggtattcgtgggcctagggtttcctgcctttcacaaactaccctcttgcgaacaactccaccaccgatttacagttacttcgccccaatcagatccacga

SEQ ID NO: 28151 - DNA, 257 bp, Glycine max
  Clone ID: PAT_MRT3847_125421C.1
gagagagacagttgtcgcttcgtgaactgaatggaatgaatgtgaacgggacctgtatgcttcaacgacttcacattgtcttcacctaacactgctttgactgcaatttggccatgtaattttacatcatatcacactacgggaacgaggcgcctttgaacctcgagtgattctgccagcaatgcacctatgaggttatcagcaccagaatcggaagatcaaaactgagcattaaaggctggtgaactatactcgac

SEQ ID NO: 28152 - DNA, 565 bp, Glycine max
  Clone ID: PAT_MRT3847_125422C.1
ctctgacatatcaaacaaagccaaggatgtgctgttcactgactaccacgtggaccagaggttgaccattaccacctactgacccactgcactagctatgacagcatcaagaaccaccaaaagtgaactgcttgcggctgatgtcaacacccaattggagaacaaaatcatcactactgatctcaatagtgacacggattctaataggttgacaactatcgctgataatgaacctgcatatggtctgaaggctattattaactgcaaagagcctgacgcaatgtctggataggtggaaatgacttacttgcattactatgctggaataagcaccagtgtatggttgacatgaaacgcactagtcaaattctctggagttataggaactaatggtcatgctcttggtgctgatctctatattgacatcagaagtgaggagtaaacaatatacattgctgcactgagctgcaccaaatatgacttgattgccttattgactattaatgagcaaggtgatgctatgaatgctgtgtagtacctatgtataaatccgttgaacaacagc

SEQ ID NO: 28153 - DNA, 484 bp, Glycine max
  Clone ID: PAT_MRT3847_125423C.1
acgaagcgctaagagaatgcctctttctatagggggaggagctggggcaaaaaatgctattctcatgaatatgccaaatgctgttctttcaatgaggagacatttagaaggagatctcgtcatggaagtctctaagatgacttctccctacatgaaatgtacagtctctttctacctagcatttggaaatttggttgatgacaccaacaattttgaagcttttccccacaagctggtgaagcttggagagatacaggaaaaagttgtattgaaattctcacaagaggaatttcttacagcgtgggcaaatcaagggcgacctgcaacaacccagtgggatgatgggcgcccatatttagatgctatggagcatgataagacattgtccacgataccaagagattgggccactggggggaaggtgacacccctaaaccataatgcgtgcaataacgacctcaacccggaaatgtcgggatcaagg

SEQ ID NO: 28154 - DNA, 247 bp, Glycine max
  Clone ID: PAT_MRT3847_125424C.1
ctattctttttttttttttttttttttttttttttttatttttttctacttcttgttttcgtttataattccgaacagggagttggagcagaaccggcgaacccaagactagaggcgaaacagctggacaaaaacagactctcacaagaccacgcaagaaacaagccaagagcttacaatggaaagaacaagaagccccgggagaaaacaaaccaaaaccaggggcgcaaaaaaaaggagccaaccc

SEQ ID NO: 28155 - DNA, 294 bp, Glycine max
  Clone ID: PAT_MRT3847_125425C.1
ttccgttgttagaagaccacagaaagggaaagtgcttgacgcaaaagcgatgaaacaacaaaagcgggggtttaaggtgtgacttgtatcatcattcatttcatttgtggtgggttgtacatgtgatttccattggcgccacccggtacccaccaactgatttacattacctctttacccttccctccttccctaatttatcacctaaaaaaccaaccaatcaaaaaaaatttcccttttttggggcgcgtgacccatattggcccttcccttgctcatttgaaattcatgctt

SEQ ID NO: 28156 - DNA, 444 bp, Glycine max
  Clone ID: PAT_MRT3847_125426C.1
gaacttgtatctctgcctctccccgccaccagcagctagcaggcttaaagtctggatcctgatcttttctagccctgccttgttgatcgtcgctgctccgacaatattggactcgtcgcatcatgaataatgtggttctggtacctgccaaatgatctaggcgtcccgtccttctcggcttgaaaaagaaaaaaaaaaggacaaaaatggaaaacgcaaatcaaaaaggataaaaactaatacgtaagatacataaaatagacctggataagaagcaaaagcaaaagtcattattgcatcaggggcacgtccgccgattagatcggtttccatcagtccggttcagactgagaaaactcttgaatatcagagcgaaaatgattgaatggtcaagggctgtcccgagcttaatgtactagctcgcgggatcgctcgcgtgcgaac

SEQ ID NO: 28157 - DNA, 305 bp, Glycine max
  Clone ID: PAT_MRT3847_125427C.1
aatccactctaccatggcacattccataatttttatcccattaatttgcctagaacaaatgaatacatcacacatccgaccaaactggtgcccggttcatgctaccttaaagcctaggcattccaccatataaagaaccatccaaggctagcttgaaagaaaaaagggccttgcatcaagcaccacccttatgagctggcttcttctttgctggaagtggtggcggaaaggggtccccttatggtttcctaggtggaccgcaataatgcagaggttaatagtggttgtggcggacacccggggcc

SEQ ID NO: 28158 - DNA, 405 bp, Glycine max
  unsure (1)..(405): unsure at all n locations
  Clone ID: PAT_MRT3847_125428C.1
aaacaacaattcatatataccacaccacacattcacaaaaaactcacgggcccaatttctacaaacatactttttcaccaacacacaaatactacacccttaccacatnacctacacaccaaaaacaaaaaaattaaagacaaactacacattacaaaacttttttccaaaaaacatacaacacacatttattctcaaaacacaaataacttctctccccaaaaacccaacaacccccaaacaaaattataccagacattccccttcttcccatcccctcctacccaaacatcaacttttaaaacacgctacccccaaccctcataaaccaatccccttacatcaattcaatttaacaaacacatcctaacaacactaacagcttttttaaccttaccctacttt

SEQ ID NO: 28159 - DNA, 251 bp, Glycine max
  Clone ID: PAT_MRT3847_125429C.1
ggtgaagtgtagtggtcactgacctatcgtggaagagttatgaagtataaaacttcaaatccttttgccgttagattctgagtctgagtctctgctgctatatatggcgctcacgcgtaattcttgtgttggggatgttgctgatggtgtgtcatgtcaatgtttcgtctgattgatcgattgaataagaaattctggaatatgcactccagatgcttgattcagagtcacatattgtcagagactggttt

SEQ ID NO: 28160 - DNA, 545 bp, Glycine max
  Clone ID: PAT_MRT3847_12542C.1
tacgacgaactatacggaaagcgcgcgcgcccgcaagcaccgatcctgtatagcgggcgcgctccacgcgttcggacaatcttgtgcatggaaaacatctatattcacaacagagtgagcatcaaggcttacgctaaagttatcgatgttgaaggccctaccggaaaagtagagcgagaatcacaccatgtgaacttgtacttccaccttattaccgacaagggctgcaaaccgaagctcacgaaagagtcttgattcggtactcttacaatattggtcgcttttcgctgccatacttaccatcgagaaaatttcggaactccttgttcttaacgaaacctttccggaatgagagagcacatcacttataaacactatcactgtagcattgataccagaccaattgacatttgaacttttaaaatctatacagccagacaaacgctaagacatgtgtacatgctctgagctttttctggtggaagatatgactgagctaaatagaattggtgcttgtatcgaagctaccttgaacttgaaaatga

SEQ ID NO: 28161 - DNA, 702 bp, Glycine max
  unsure (1)..(702): unsure at all n locations
  Clone ID: PAT_MRT3847_125430C.1
ccgatggctaatctctcactcttgttcttcggtctcctcctattctccgctgccgtagccaccgtcgaacgaatcgacgatgaagacaaccttctgatccgtcaagtggtgccggacgcggaggaccaccacctgctcaacgcggagcaccacttctccgccttcaagacaaagttcgccaagacctacgccacgcaggaggagcacgaccaccgcttccgtatcttcaagaacaacttgctccgcgccaagtcgcaccagaaattggacccctccgccgtccacggcgtcaccaggttctccgatctcactccgtctgagtttcgcggccagttcctcggcctgaagccgctccgccttccctccgacgctcagaaggctccgatccttccgaccagcgaccttcctaccgatttcgattggcgcgaccatggagctgttaccggcgtcaagaatcagggctcgtgcggatcgtgttggtcatttagcgccgttggagcatgtgattcgggttgtaacggtgggttgatgaccactgcatttgagtacacactcaaggctggtggactaatgcgagaagaggattatccctacactggaagagaccgtggcccctgcaaatttgacaagagcanaatcgctgcttccgtggctaatttcagtgtggttttccttgatgaagaacatattgctgcaaatctg

SEQ ID NO: 28162 - DNA, 1256 bp, Glycine max
  Clone ID: PAT_MRT3847_125431C.1
ggctaatccctcactcttgttcttcagtctcctcctattatccgccaccgtagccaccaccttctccgccttcaagacaaagttcggcaagacctacgccacgcaggaggagcacgaccaccgcttccgtatcttcaagaacaacttgctccgcgccaagtcacaccagaaattggatccctccgccgtccacggcgtcaccaggttctccgatctcactccggcggagtttcgccgccagttcctcggcctgaagccgctccgccttccctctgacgctcagaaggctccgatcctaccgaccaacgacctccctaccgatttcgattggcgcgaacatggagccgttactggagtaaaaaatcagggttcgtgcggatcgtgttggtcctttagcgccgttggagcgttggaaggtgctcattttctttctacaggtgagctcgtgagccttagcgagcaacaacttgtggattgcgatcatgagtgtgatccggaagagcgtggagcatgtgactcgggttgtaacggtgggttgatgaccactgcatttgagtacacactccaggctggtggactaatgcgagaaaaggattatccttacactggaagagaccgtggtccctgcaaatttgacaagagcaaagttgctgcttccgtagctaacttcagtgtggtttcccttgatgaagaacaaattgcagcaaatttggtccagaatggtcctcttgcagttggtatcaatgcagtttttatgcagacatatattggtggcgtctcatgcccatatatctgcggcaagcatttggatcacggggttcttttggtggggtatggttctggtgcttatgctccaattcgttttaaggaaaagccttactggatcataaagaattcatggggggagagctggggagaagagggatattacaagatctgcagaggtcgcaatgtatgtggggtggactcgatggtctcaactgtcgctgctatacatgtttctaacaattaaatataaggatggatgcctaaacgtggtaggggcaccagtatagtatgtatgtaaataatttgcacgatgtaatgttatgaaggaggaaactgctaagcacatgtttatgcttttattctgtaattctctatgctagctagtctagccacaaatcattacccactgttatagttattgcaagtaacctgaatgaaattaatttgagttctcacagttaaaaaaaaaaaaaaaaaaaaaaaaaaaa

SEQ ID NO: 28163 - DNA, 464 bp, Glycine max
  Clone ID: PAT_MRT3847_125432C.1
acggctgcgagaagacgacacaagggggcacctttctctttctccgatggctaatccctcactcttgttcttcagcctcctcctattatccgccaccgtagccgccgccgaacggatcgacgatgaagacgaccttctgatccgtcaagtggtgccggatgcggaggaccaccacctgctcaacgcggagcaccacttctccgccttcaagacaaagttcggcaagacctacgccacgcaggaggagcacgaccaccgcttccgtatcttcaagaacaacttgctccgcgccaagtcacaccagaaattggatccctccgatcctaccgaccaacgacctccctaccgatttcgattggcgcgaacatggaagccgtactggagtaaaaaatcagggttcgtgcggatcgtgttggtcctttagcgccgctggagcgttggaaggtgctcattttctttctaca

SEQ ID NO: 28164 - DNA, 722 bp, Glycine max
  Clone ID: PAT_MRT3847_125433C.1
gtatgctagaacttcgcatctcactgagaagtctgatgtgtacagttatggtatgtttttactcgagttgctaactggaaggaaagctgttgacaatgaatccaacctccaccatcttattttgtccaaggcagcaaccaatgctgtgatggaaacagttgatcccgacattactgccacatgcaaggacctaggagctgtaaaaaaggtttatcagcttgctctattatgcacaaagaggcagccagctgataggccaacaatgcacgaagtgacacgtgtactcggaagtctcgtgccatcaagcatcccaccaaagcaactagctgacctaccacctgcttcaaatccatctgccaaagtgccatgctacgtggatgagtatgcaaacctcaaaaccccacacttagtaaactgcccctcaatgagcacttcagatgctcaactcttcctcaagtttggagaagtaatctctcaaaacagtgagtgagtgagaggattttgaaatgaaaatcaatttcaagaatcatgtatattatttaaaaaccaaaaaagagaagcaaaaaaatggattaggggtaatagttaatgtaaatgtttataaaaagtttttagtactagttttttatggttggttcatttgaacaggaaagatatgtatcatcatcatcatcacaatttgaaaggtgaagtaaacccaattcttattcttgtttggtagc

SEQ ID NO: 28165 - DNA, 1441 bp, Glycine max
  Clone ID: PAT_MRT3847_125434C.1
ctcggaagcgtgcattaaatttcccgaaaggctaaaatatccattgcacctttctcttcctccgatggctaatctctcactcttgttcttcggtctcctcctattctccgctgccgtagccaccgtcgaacgaatcgacgatgaagacaaccttctgatccgtcaagtggtgccggacgcggaggaccaccacctgctcaacgcggagcaccacttctccgccttcaagacaaagttcgccaagacctacgccacgcaggaggagcacgaccaccgcttccgtatcttcaagaacaacttgctccgcgccaagtcgcaccagaaattggacccctccgccgtccacggcgtcaccaggttctccgatctcactccgtctgagtttcgcggccagttcctcggcctgaagccgctccgccttccctccgacgctcagaaggctccgatccttccgaccagcgaccttcctaccgatttcgattggcgcgaccatggagctgttaccggcgtcaagaatcagggctcgtgcggatcgtgttggtcatttagcgccgttggagctttggaaggtgcccattttctttctaccggtgggctcgtgagcctcagtgagcagcaacttgtggattgcgatcatgagtgtgatccggaagagcgtggagcatgtgattcgggttgtaacggtgggttgatgaccactgcatttgagtacacactcaaggctggtggactaatgcgagaagaggattatccctacactggaagagaccgtggcccctgcaaatttgacaagagcaaaatcgctgcttccgtggctaatttcagtgtggtttcccttgatgaagaacaaattgctgcaaatctggtcaagaatggtcctcttgcagttggtatcaatgcagtttttatgcagacatatattggtggcgtctcatgcccatacatctgcggcaagcatttggatcatggggttcttttggtgggctatggatctggtgcttatgctccaattcgttttaaggaaaagccttactggatcataaagaattcatggggggagagctggggagaagaaggatattacaagatctgcagaggtcgcaatgtatgtggggtggactcgatggtctcaactgtagctgctatacatgtttctaaccattaaatataaggatggatgcctaaacatggtaggggcaccagtatagtgtgtatgtaaataatttacatgatgtataatgttatggaggaggaaactgctaagcccatgtttatgcttttatgctgtaattctctatgctagctagtctagctacaaatattacccacggttatcgatagttattgcaagtaacctgaataaaattaatttgtgttcccacaattaaaaaaaaaaaaaaaagaagagaaaacaaaagaaaaaaaaaaagggggggggccc

SEQ ID NO: 28166 - DNA, 4060 bp, Glycine max
  unsure (1)..(4060): unsure at all n locations
  Clone ID: PAT_MRT3847_125435C.1
taggctgccatgctgagaattactgtgggtgcccttctgactcgtcttatggtattggtggcagcttgccgacctcacagcccctatccttttcctgtaggatcatttgataaaccaatttatttttcctctcctaacctagtcctcttgcatcttcttgtgttagggagtgatgtttgtggcagaagaacgatgtgattgcacagccaaagctgtgaacttgttctgttactactttgtaattgtgatcaaaggctagagggtatgcagagtgcacagaagaatactagtctcaaacaaaactcacctcactagttactactacccttttaatctcaagccatagttgagtcaagtggtgcagtgtcactaagcataacacccttttttggttcttgttctgtggtttcttgtgctttgaacaatagcttttggaaagagcttgatgatggtggttgttgagtggtttcatggttaaagaggtgtcaagtttaaggttctgcagttgcagctatggcatttcgatttggagtccttattcttgctttgctaatttgtttgagtgtcaattctgtggaatctgatgatggagcaacgttgttagagataaagaagtcattcagggatgtggataatgttctctatgattggactgattcaccatcatcagattattgtgcctggagagggatagcatgtgataatgtcaccttcaatgttgttgcactcaatctttcagggttgaatcttgatggtgaaatttcacctgcaatagggaaactcgacagtttggctggaaggaaagctgttgacaatgaatccaacctccaccatcttatttggtccaaggcagcaaccaatgctgtgatggaaacagttgatcccgacattactgccacaggcaaggacctatgagctgtctaagttgattatcagcttgctttattatgcacaaaaagggattttgaagatcggccaactgattggccaagtgaccaccgttttgtctcaaattcctgatttgaagattctagacctggctcaaaataatcttagcggagaaataccaagtcttatatccaaagacgaagtcttgcagtatctgtacgtgaacctcaacactttgcacttagtaaccagcccctcaattgtgccttcaaactggcaactcttcctcttgtttggagaagcaatctctcaaaacagtgagtgagtgagaggattttgaattgaaaatcattctcaatcttggatttatcctacaacaaactaactgaggagataccattcaatattggattcttgcaagtagcaactttgtccttgcaaggcaataaactctctggacatattccaccggtgatcggtctcatgcaagcacttgctgtcctagacttgagctgtaacatgttaagtggatcgattcctcctatcttgggcaatttgacttacacagaaaaattgtacttgcatggaaacaagctgactggcttcatccccccagagcttggaaatatgtcaaagcttcactatttggaactgaatgataaccatttaagtggacatatcccacctgagcttggaaagcttactgatctgtttgacttaaatgttgcaaacaacaatctcaaggggccaattcctagtaatcttagctcatgtaaaaatctcaacagcctcaatgtgcatggcaacaagttgaatggatcaattcccccttctttgcagagtttggagagcatgacctctttgaatctttcttccaacaatcttcagggcgcaattccaatagaactgtcgcggattggcaatttggatacattggatatttcaaacaataacttagttggttccatcccttcttcccttggtgacttggaacatcttctgaagttgaatctaagcagaaacaatttaacaggaattattccagcagaatttggaaatcttagaagtgttatggaaattgatctttcaaataatcaactctctggcttgattcctgatgaacttagtcagcttcaaaacatgatatccttgagacttgaaaataacaaattgactggcgatgtggcatcactttcaaattgcattagtctctctctacttaatgtgtcctataacaaactatttggtgttatcccaacgagtaacaactttaccaggtttccccctgacagtttcattggaaaccctggtctttgtggtaattggctgaatttgccgtgtcatggtgctcgcccttcagagcgagttacattatctaaggctgccattcttggaattactcttggtgcccttgtgattcttcttatggtattgctgcgagaagacgacagaaggggtccctctccttttcctgatggatcatttgacaaaccagttaatttctcccccccaaagctagtgattcttcatatgaatatggcactacatgtgtatgaagatatcatgaggatgactgaaaacctgagtgagaagtatataattggatatggagcatcaagtacagtttataaatgtgttcttaagaattgcaagccggtggctatcaagaggatctattctcactatccccaatgtattaaagaatttgaaactgaacttgagacggttggcagcatcaagcaccggaatctggtcagtctccaaggttattccttgtccccatatgggcatctcctgttttatgactacatggaaaatggcagtctatgggatcttcttcatggacctaccaagaagaaaaagcttgactgggagctgcgtctaaaaatagcacttggagcagcacaagggcttgcttatctacaccatgattgctgtcctagaatcatccacagagatgtgaaatcatctaacattctattggatgcagactttgagcctcatctcactgattttggcattgccaaaagtctctgcccctcaaagtcccatacttctacttacataatgggcacaattggctatatagaccctgagtatgctagaacttcacgtctcactgagaagtctgatgtgtacagttacggtattgttttacttgagttgctaactggaaggaaagctgttgacaatgaatccaacctccaccatctgattttgtccaaggcagcaaccaatgcagtgatggaaacagttgatccagacattactgccacatgcaaggacctaggagctgtaaaaaaggtttatcagcttgctctattatgcacaaagaggcagccagctgataggccgacaatgcacgaagtgacacgtgtactcggaagccttgtgctgtcaaacaccccaccaaagcaactagctgcactaccacctgcttcaaatccatctgccaaagtgccatgctacgtggatgagtatgcaaacctcaagactccacacttggtgaactgcccctcaatgagcacctcagatgctcaactcttcctcaagtttggagaagtaatctctcaaaacagtgagtgaaagagtgagcggggattttgaaatgaaaatcaagtccaagaatcatgtatattatttaaaaaccaaaaaagagaagcgaaaaaatggatgaggggtaatagttaatgaaaatgtttataaaaaagttttaggactagttttttttttttagtgttggttgatttgaacaaaaagaaagatattatgtatcatcatcatcacaatttgaaaggtgaagtaaatccaattcttgtacttgtttggtggtagcacacaagggtttgcagtagcaaaagttaaggttttggggccaatgttgcagggtggggtagtaaggtcttaaatgttagtaggagggaagcaaatactattgcataatgtgtgaacatcaataatgccctgaatttggttggctggctttggatcagttatctgtctgaatgctggcggtattaagaaaaaaaaaaagggtatccattacctcttttactacctgatgccatttgctcagtaaagtgctatgaaattatgtcatgaaattttgggtcattttggcctcacactttccgctncgccgccgttggctgcttttttaaaaaaaaaaaaa

SEQ ID NO: 28167 - DNA, 949 bp, Glycine max
  unsure (1)..(949): unsure at all n locations
  Clone ID: PAT_MRT3847_125436C.1
tgggaagcgtgcattaaattttccgagaggccaaaatatccattgcacctttctctttctccgatggctaatccctcactcttgttcttcagtctcctcctattatccgccaccgtagccgccgccgaacggatcgacgatgaagacgaccttctgatccgtcaagtggtgccggatgcggaggaccaccacctgctcaacgcggagcaccacttctccgccttcaagacaaagttcggcaagacctacgccacgcaggaggagcacgaccaccgcttccgtatcttcaagaacaacttgctccgcgccaagtcacaccagaaattggatccctccgccgtccacggcgtcaccaggttctccgatctcactccggcggagtttcgccgccagttcctcggcctgaagccgctccgccttccctctgacgctcagaaggctccgatcctaccgaccaacgacctccctaccgatttcgattggcgcgaacatggagccgttactggagtaaaaaatcagggttcgtgcggatcgtgttggtcctttagcgccgttggagcgttggaaggtgctcattttctttctacaggtgagctcgtgagccttagcgagcaaacaacttgtggattgcgatcatgagtgtgatccggaagagcgtggagcatgtgactcgggttgtaacggtgggttgatgaccactgcatttgagtacacactccaggctggtggactcgatggtctcaactgtcgctgctatacatgtttctaacaattaaatataaggatggatgcctaaacgtggtaggggcaccagtatagtatgtatgtaaataatttgcacgatgtaatgttatgaaggaggaaactgctaagcacatgtttatgctnttattctgtaattctctatgctagctagtctagccacaaatcattacccactgttatagtt

SEQ ID NO: 28168 - DNA, 183 bp, Glycine max
  Clone ID: PAT_MRT3847_125437C.1
gacagattgtctcgttctgaacactgatctatatgccagatatacaatcacgctgcaaggtaagaccgcgttatctgactcttctgagattctggcaacatgtgatgatagagatggaaacactgtcgcatccacaacacgctgtacgaaatacagcatgactgtcaacttatgagctctaga

SEQ ID NO: 28169 - DNA, 550 bp, Glycine max
  Clone ID: PAT_MRT3847_125438C.1
aattcggctcgaggaataataaatttctgagcagaagcatagtgcagcggtggaagcagggttgatcctgattagtattgctgcatcccaattcacaatcctttgattcgaatcgaaggactttgaaacgaaacaagaagaatgcattactgggttcgagcttcttcttctgatttcgccggaacccatccccaacgtcgcagtggtcattccgctgttaacatcgggaaatccaaggttgtcgtgttcggaggactcgtcgataagaagtttctcagcgatatagctgtctatgatattgaggccaaacaatggtttcagcctgagtgcactggaagtggttcagatgggcatgtgggtcctagctctcgggctttccatgttgccgttgccattgattgtcatatgttcatttttggtggtcgccttgggagtcaaaggttgggggacttttgggttttggatactgatatatggcaatggtctgaactaactggcttcggtgacttgccttcaccacgagattttgctgcagcttcagcagttggaa

SEQ ID NO: 28170 - DNA, 749 bp, Glycine max
  Clone ID: PAT_MRT3847_125439C.1
cggctcgacccacgacgtaaccggacgcgtggaaaaaaataatggcaaggaaggtgggtttgaattttatagggtgctccatcgttgcaatggttttcataattggtgtggctgaagcaacagattatatcgttggtgaaggcttcggatggagcgttccctccaatgagagcttttatacagactgggctagcaccaagagattcttcgttggtgacaatctcattttcaacatcagcggagagcattcggtgggaattagaacagaggctacttattatgagaattgcaacaccagcttattaactggtttcacgttcataggcgtcaatgggagtaattcgatgtttcgacataatattattcctccaactgggcctcgctatttcctctgcaccgttggaaatcactgtgaaagaggccagaagtttagtatcagcgttgagtctcatcctgattccgctgctcctactacactgtcattcagaatcttatctgcatttctctctagcttggctgtgtatttcttcactgttactagttagttactttgtcgtgtaactctacgaggattttgcattcttgttcctagcaattctttgaacatattcactatagatattataggattgctgggttgtttgtttcaataaatgttgtactgctacttacaacatactattgtaactttaaatttaataaagacgttacttcaattaatattgaaaaaaaaaaaaaaaaaaaaaaaa

SEQ ID NO: 28171 - DNA, 265 bp, Glycine max
  unsure (1)..(265): unsure at all n locations
  Clone ID: PAT_MRT3847_12543C.1
gtctaaaagttcatctctccctttctctcacacataccagccatgagcctgttcantataggcagaaacgggagaacattcctccctaaaaaaaatactccttctggaagtaagggagctcaacttataaaacatactcacgccacgttgggtagtggaaatatgatggaagctgaaatgcttcctcctggggagaatttatatgcatggctagcagataacactcttgattggttaaaccaggactatcatatttatggtcccc

SEQ ID NO: 28172 - DNA, 348 bp, Glycine max
  Clone ID: PAT_MRT3847_125440C.1
aggcatgggaatggctcatcgcccgagtctctgcatgtggactatagcatattgcataccctagcgcaccagagacattaaagacagagtagacatcaatatacagtcagttatggcaggatgatatgcctatggaaagaaggacggctgaatcaaatcttgagaaattcgctgcaactgttgaatgagctcaatcgaaggctgaaggcatggcagaagttagactgactgacatatggtgcataagaggctgccagatggaagactgcgggggccggctcataacattgctggatcttaaagacacgtgatcaactttctcatatacaaatcgggtgtgtgttggct

SEQ ID NO: 28173 - DNA, 509 bp, Glycine max
  unsure (1)..(509): unsure at all n locations
  Clone ID: PAT_MRT3847_125441C.1
gatttggacgggttttaaattgtctttgtgtaaaggacaaggttcatgaagcagttggtatcatccaccttatgttacaaaagggtatcgtgccagagactgtaaatacaatttttgaagctgataaaaaggttgtagcggcacctaagattcttgtagaagatttgttgaaaaagggccatatagcttattacacttatgaactactatatgatggtattagagataaaaagatacttaaaaaaagactcccaactgtgaattctcttcatcgaggggccagttcgtcagctgttgattagaagataatgtctttggaaagtgatcattcatgaccatctgctcagttctaacttccaaagatgtttgaaggttccagtagatacctgttatataatgctgactttcatggtttttctcccagattgcatgtcatgctcagaaattntggtgcaggacgaattatgcaagttgcaatgcttacctaccacacttgagtcttcgtgcca

SEQ ID NO: 28174 - DNA, 242 bp, Glycine max
  Clone ID: PAT_MRT3847_125442C.1
aggaccgttttctgaattccctgttcgtcctacgcgaccttttttataccccaaacggcacaggaggaaaggggggctttttttgcaagttttttcagttcttccacggcgaagaaaaatagcaagcctcaagctactgcaatgcatgcgggagctattgaaattatcattgatagatccgacaggcccgactgcaacatagatggtgcacagcctttgggcgatactatcaatacccaaac

SEQ ID NO: 28175 - DNA, 119 bp, Glycine max
  Clone ID: PAT_MRT3847_125443C.1
atgccaaccatcataccatagtatctaaatcataaaacctcagccatgaatacacatacccctctgaaaacggagaccaatagtgctggacgatgaaatttcttaagccacaaacactt

SEQ ID NO: 28176 - DNA, 391 bp, Glycine max
  Clone ID: PAT_MRT3847_125444C.1
ctcaaagtctccacattatattatagagcaataataataataataatatgggtaacagcggaaggtgttgtttggcttgcattcttccgtgtggagccctagacttgatccgcatagtgcacttgaacgggtacgtggaagaaatcacgcgtccaatcacggctggggaggttctgaaggcaaatccaaaccatgtcttgagcaaacctagctcccaaggcgtggttcgccggattctgatcctcgcaccggagaccgagctcaagagaggaggcatatacttcttgatcccggcggcatcgttaccggcggagaaaaagaaaagacacatgaaacatgtgaaacacgtgagtggtaaccacggtgggtagtgatagtagtaataagaatg

SEQ ID NO: 28177 - DNA, 800 bp, Glycine max
  Clone ID: PAT_MRT3847_125445C.1
agagatcgttcttgggttcaaaagggacgaaagtatggtgtttggggactgggtgaaacgcgcacgcgtggaagcaatcaattggattctcaaaacaagagcaacattgggttttcgcttcgaaacggcctatttgtcagtcacatacttcgatcgatttctttccagacgttccattgatagtgaaaagagttgggcaattcggttgctgtcaattgcatgcctctctctggctgcaaagatggaggaatgcaatgtgccagggctatcagagttcaaattggatgattattcctttgagggaaaagtgattcagcgagtggagcttttggtactcagcacgttggagtgggaaatgggtatcataactccctttgattttctttcctatttcatcacaaagttctgcaaagaatccccgccaagtcctattttttacaagaccatgcaactcatcttcaccacaatgaaagcattatttgtccccttgtgcagaggtcaatttaatggatcacaaaccatcagttattgctgtggcagctactttggtggcaatggatcaacaattaacgagagacgcggtggagttgaagatgagttcaattccacaacataggcttctagaatctaaagatgtatttgagtactacaatctaattcaaagattatacgaggagaataccaaaagcgacacccatacgccaattgagatgacagagagctctcgagttacttcttctgctgcaatgacaaagagaagacgactcacattcagtgatgatgaaggaagtagtcatggg

SEQ ID NO: 28178 - DNA, 234 bp, Glycine max
  Clone ID: PAT_MRT3847_125446C.1
gattacatctgacatataacaatctgaagcggtgggcaacgaaaacgtggtgtatgcatcaaactgctctcctactatgttgtgccttaaacatctcatacacagcttccgctctagatgatcccagctctcgatcacgtacgtgcgactttttaaagcggttatacatataattactttcaatacactggcaccactttttacaactaagagactgcccaaaccatgacgaaa

SEQ ID NO: 28179 - DNA, 274 bp, Glycine max
  Clone ID: PAT_MRT3847_125447C.1
acggctgcgagagactacagaaggggatagcaatgagtggactggcaacctgtacttctttctttgacaggcattgctggtcctaggtctggttgggtaaaaaagctggggcatagcttctattgctggcttgtctgccctgtctcacttataattgaggacttttgcggcgatatgtcgatcaaaaagtcactccattttgacatgcctatctttgaaaaacgagtggagagcttttcccctatacggagatagcttcctgattagattagga

SEQ ID NO: 28180 - DNA, 192 bp, Glycine max
  unsure (1)..(192): unsure at all n locations
  Clone ID: PAT_MRT3847_125448C.1
aagcaccatacaccgtttcaatagatttccgactatttctagggtttccctgctatcttcctcaattcgaacgcttagnctttcaacacaacatataatatggatatnantngnnaagngtatnngagagtatngatttngttgtatgaaagaggattggtnngttgtgaaggaggaaaatgtattnaagag

SEQ ID NO: 28181 - DNA, 681 bp, Glycine max
  Clone ID: PAT_MRT3847_125449C.1
ccacgcgtccggataatattgtcatcactaaagaggtgattcattctatgaagctgaagaaaggaaagaaagggtggatgactatcaaaattgaccttgagaagacttatgatagattgagctgggacttcatcaaggatactttccaagaggtagaataactctttccaaagctgttttgagctcaattcctatgtatgctatgcaaactgttatgttgcctggatctatttgtgacaaggtggatcaactctgtagaagttttttatagggggatacaaccgatgaaaggagtgatcattgggtctgttgggaaggaatttgttcaccaaaggagattggaggtttgggattacgacaggctcgtcatgttaatgatgtctttacgatgaaagtggcttgggaactttgtaccaaaaatgatgctttgtgggtacaagttattagagccaagttaattgggggagttgggggggttccctgttgtgaataaagctagaaatgactctaatctgtggtcagtaatcaaatctgttagggataaatttgtaactgggtgtgaaggaaaggtggaagatgatgagttaatttggagagctagtaataaaggggtgttagatatcccatcagcttacaaaatgattgccaatttggatggtagacagagtattcctatcttta

SEQ ID NO: 28182 - DNA, 271 bp, Glycine max
  Clone ID: PAT_MRT3847_12544C.1
ccttggcaatattttttttaatgatgcagcggattcacaatgatccatttagcctggaagggaacgagaataataaacattctgataaacatgaatgcactagtgtacgggggaaggggccatcacccacaactcattactttgtggatgttaatggcccggtgaccgactggagagtgcaagttgccatccaatgatgcacgccgtacctgtgcgactgcgaaaacttgatacgcaagataaatgatggcttgagtctttagacctgggc

SEQ ID NO: 28183 - DNA, 210 bp, Glycine max
  Clone ID: PAT_MRT3847_125450C.1
atggcggttcatggcggaaagccgccgttcgtgacagatgcgtcgctgccggagctcgtcgccgccgcttgtgccggtgcgtcgctgccggaggtcgtcgcggctgcgtgcgcgtgcggctgcgggtgtcgcggctgggtgcgcgtgtggggtgcgagagggacgcggctgggtgcgggagggacgccatttttcgccaccccgccataa

SEQ ID NO: 28184 - DNA, 170 bp, Glycine max
  unsure (1)..(170): unsure at all n locations
  Clone ID: PAT_MRT3847_125451C.1
tttttgaaaaaaaaaataattattgagctagtactcaatgttactagtgaatcatgagtttctggggtctaaacaaacaaccacacttntncttgagaattcactatgtcgagccaaacaccaaactgttgttatataaataacaatattgggaacactcgatccgtatt

SEQ ID NO: 28185 - DNA, 211 bp, Glycine max
  Clone ID: PAT_MRT3847_125452C.1
acatatcttaacaaagacccttacgggttaaactattaccctcgaagcgtagagctccgacaccattgacattgtgaaagcaaaaatccactacaaggaaagaatcccatcgtaccatgagaggctaattcatgttggtaaacagtttgaggatggaatgacccttgatgactacaacatagagatcgtaaaaactttgcactccgtgtta

SEQ ID NO: 28186 - DNA, 245 bp, Glycine max
  Clone ID: PAT_MRT3847_125453C.1
tacggctgcgagaagacgacagaagggaatggacatttggatactgcacaatagttctttttttgccctgaaattagtgctagctacagaaattgtgatattgtccgagccactcatttgtggatattgtctagtggtatatccgacaaaggaactattattacggtacgcaacacgctcagaatacattaatttaacacatgtttttttaatatatttttaagtgtaaggtaaaatttatggat

SEQ ID NO: 28187 - DNA, 441 bp, Glycine max
  Clone ID: PAT_MRT3847_125454C.1
ccgacttcaggttggtgttggctctttttttatgctttttatttaccaccatttaaaaattcaatagctgttggctactgagtgtaaatccctgtatctcaaatagttgttattcatgctttcggctgctcctcattgctttccttgtaagtgttataattttttttttttgctcagcaaaaataggtaattagattatatgcaaagtaccagaggtactgaaaatactaacaatagagatatacaccaaagttgacttccttgtaagtgttataatagtgatatatagtatgtgaagtgatggtccataagtattagataatagaactggtggttaagattgttgacttctgtgatttagagtgatcttgatcaggggctaatatataagagagactatgtgaagattatttaatgttttgtttatgccagttgtttgct

SEQ ID NO: 28188 - DNA, 471 bp, Glycine max
  Clone ID: PAT_MRT3847_125455C.1
agttcatgttctctaccaaaacatataacaaaagttgcagactctcaatcgggtggaaagtggaaacggattcacgtgggtgatgatagtgttaggaagtcccacgctcaatctttgaggtgcagcttatatatttgttggataacttcacttaatgtcaattggttttaagatgaaatctaacatgctatcagagtctagagcctgtcttagttttctccaccatgtcggtggttcgcctatattggcagcgcatctgtggaagggggatgttaggaagtcccacatcgcctgcctcaaaatgaaatagatcgtacaagcaatttattttggtagagggtgtccccactagctagtttaagttgtggcaatatataataccatcagaatctaaccagaagtatatattaaaaaaaagaagattctatgtttgaaatttgaatactaataattggtttatgttaaactttg

SEQ ID NO: 28189 - DNA, 193 bp, Glycine max
  Clone ID: PAT_MRT3847_125456C.1
accggtctggaatgacccactcgaccgaccacacctccgcatgcttcattataactataaaatactaacactgagatcaacattaaggtgaaagagtaatacataaactcagctatccaaaataatgacacatgaccacctaaacgctatatcaatccatatcctctacagactaactaaaagattccttaac

SEQ ID NO: 28190 - DNA, 498 bp, Glycine max
  Clone ID: PAT_MRT3847_125457C.1
tttgtttttaactttgtatattttacattgtttcttttccacattttgaaataaaataccgggaaaaaagttccggtattatatgaaactctaacgtaactattatgcacactaaaatgattacttttgtattgggtcaaaactaccctgaagtaccaacccttaaaataagactcaaatgcgcccattgtacgcaattcacccggcgacccgaaaattttggctaccacgagggttctcttcgtcgaaggattggcgcattttaaaggcctcccacaaaacctgggggtcttaacccccgacacccatggcagcgaaaaaagggtgtccatactcaggaaccccccttacgtgggggggaaggccaatttcttccacttgggagccggaaaagtttgccccaaacgaaaaaaagttccccacggggggcacttggtccattcaagaagggaaattgtgtaccccgcacctttccaagatcaatcttcttctgttttt

SEQ ID NO: 28191 - DNA, 1701 bp, Glycine max
  Clone ID: PAT_MRT3847_125458C.1
gccgtcccaggcggccgcaaaccgctccctcacaattccaaacaccgcgtgcgctgcccacatctccgttcgcatctcctccttgaccagctcgaagtttctcgtgtagtccagtgttgctttgtgagaagtcgttcttgcttgaagtggcttttcattcacaagctctttgagactttcttggagaagagatgtaggagttggactaaggtttcttccaattttcaattgggcacagccacaatcttattctacttaaccttcctcaccttttcggatacctaaggcgaagtatagctaaaaaatgggagggacacaagtggagagagaagagaaggtgtctttggaactcagcgaagaaattcttcagagtatggaagtgggaatgtccttcaaagactataacggtagaattagttcgttggattttcacagggcatccagttatctagtgaccgctagtgatgatgaatccattcgtctgtatgatgttactggtggaacatgtttgaagacaattaatagcaagaagtatggagttgacctggtttgcttcacatctcatcctacaactgtcatttactcttcaaaaaatggttgggatgaatctttgcggcttctatcgttgcatgataacaagtatttgagatatttcaaaggtcaccatgacagggttgtgtctctaagcttatgctctcgaaaagactgctttatatctggatctctagatcgaactgttttactgtgggatcaaagggctgagaagtgccagggacttttacatgtacaaggaagacctgctatatcatatgatgatccagggcttgtctttgcaattgcctttggaggatacataagaatgtttgatgcccgcaagtatgaaaagggtccctttgagatattttctgttgggggagatatttctgatgcaaatgttgtgaaatttagtaatgatgggagactaatgcttttaacaacggcagatgggcatattcatgtgcttgacacatttcgtggcacacttttatccacatataatgtcacacctgtctcatgcaactccacattagaagcttctttcagccctgagggaatgttcataatatctggttctggagaaggcagcatctacgcatggagtgttcgaagtggcaaagaagttgcaagttggaggagtgcaacttctgatactggacctcctgtaataaagtgggctcctggaagtcttatgtttgctacaggatcatctgagttgtcattctgggttcctgatttgtctaagttgggatcctatgttggaagaaagtagaaacaaatcaaacaatgcatgataaaactattgtttgcctattaacccactgaaaggtaattttttttattaatactacacaaatttaactgtgccgaatggcgtcgtgtgatccatgtagccgacctcacctagtgggataaaactttgttgttgttgcactacacaaagtgacagattttgccatgtttttgtaaatattcttcaccgaagagcaatggatatttcaatgatcctcctaatctgtacaagttgaaatatctaaatctgtatatcttccttctcccaatgtacttgctgtagatgttcatttggttataattggttcatatactcctccggatcattagttacagcgccaaaggcactagtttgctgtttgatgtgatcat

SEQ ID NO: 28192 - DNA, 323 bp, Glycine max
  Clone ID: PAT_MRT3847_125459C.1
atctattctttttgtggttggtagaattattcaatccttctttttttttcaaaattcgtactttttaaaacacagaaccacatgagagctgagacgtccgaaacaagcccttgcgacaaaaatccatgaacagtgacttttcccaccacaccagcttcttggtttggctaacaaaagaaaccgtttgttaccttagcgtgcggagcaccatagtgggtaacaccggcacattgggaaggggttcaaccctcatggggaacttccctggatgcgcccctgtaggaagaacggacatcgcgaacacacccctgaaaaggaaacct

SEQ ID NO: 28193 - DNA, 304 bp, Glycine max
  Clone ID: PAT_MRT3847_12545C.1
cctgaatacattatttcatttcttaccatcaatggcttactctgttgagcttgacagccttattatgtatgcctataaaccccaatacctcactctcccactttcaatccaacctttctccttcactacataatcttactttatgaaacaccagaaaataccctctagaatccactctggtgctaccatcacagccacttatatcatgctcaaccccgtccggaaccactgcctaacctaaaggcattaacattaaatcgagtcgcacctaaacgattaatggttacatgactgtaaccaattt

SEQ ID NO: 28194 - DNA, 299 bp, Glycine max
  Clone ID: PAT_MRT3847_125460C.1
aaggcctttctttcaagcttccccccgaagtgttaagaggatgcctgtttctttagaaagaggagcgagtgcacagaatgctcttctaatcaatatgccaaatgctggtctctcaatgtggagatattctgttggaaatctcaaacttcgaagtctctaagatgacttcttcctacattacaaggacagtccctaacttcattgcttttggaaatttagctaatgccaccatcactctataggctcttacccaccaactggtgcagtttgtagagactcacataaaaaccaaatccaaa

SEQ ID NO: 28195 - DNA, 561 bp, Glycine max
  Clone ID: PAT_MRT3847_125461C.1
catcttctgcagaacaaagaagtaaagtttgaagattttactgatgccgagtttggtgaaaaggcagcaaacctattgccaggctgttgtgtggtaattatgtgtatagggaaaacagttgttgcagagtctctccaagtggatgagtcaacgatagccattggatgctggaagggtagggcgagattgtcagtgatggttactgcaatggactgccaagaactactggaaaggcttttaatacgttttgacactgaaaagggctcctctgggcatttggacaattcctctaatgatgtggaagaagttcagcctgtgcaagagttgaacaggaaaaatgatgacgatgatgtgaaagctactgagttaaagtgactacttaacagatattctttaccctgttgtaagttctaacagatatttgtgctatttgtcatttatagaaatggtgattttgcccttcacctatgaaacgatagtgaaaaaattgcttgtttttgttaaccccgtcattattttcatagacagatgctggtccatatttatagttttggttttctt

SEQ ID NO: 28196 - DNA, 2843 bp, Glycine max
  Clone ID: PAT_MRT3847_125462C.1
tgctacttccgagcgagcgagatttgccaaaaccctaccaaaagcctaacggcataactcgccggcgaagcagaatcagaagcaatcagcgacgacaacaatgggtggtggggggagaggaggcagatcccgaactcagagaaagcacttccggcagagcagagataacgtgtggaagcgttccaaatcggatcccaatccttcttccaacgaaaacaatcccccgtggactcccttcgccactgagaacgccgctttcgatttctactacaaagagcaggggatagtggacccgcaacactgggaccaattcgtcgcagttctcagaactccattgcccgcaaccttcagaatcaactctagtagccagttttccgacgaccttcgttctcaattggagaatgacttcctgcattctcttcgcgacgaggttgttgaaggaggtgagacggaggctattcggccgttgctgtggtaccctgggaacttcgcttggcattctaatttttctcggatgcagctcaggaagaaccaaacgcttgagaggttccatgaattcttaaaactagaaaatgagattggaaatatcacaagacaggaagctgtcagtatggttcctcccctcttcttggatgtgcattcagatcattttgtgcttgatatgtgtgctgcaccaggttcaaaaacattccaattgcttgagattatacaccaatcatctaaaacaggatcactacctgatggaatggttatagcaaatgatctcgatgtccaaagatgtaatcttctcatccaccaaacaaaaagaatgtgcacagccaacctaattgttacaaatcacgaagctcagcacttcccaggatgccgtttaaacaggaattatgaaaggatggagttagataacgatattggccaactgttatttgatcgtgttctgtgtgatgtcccatgcagtggagatggtacccttcgtaaggcacctgatctctggaggaaatggaacacagggatgggacatggccttcacagcctacaagttttaattgctatgcgaggtttatctctacttaaaattggtggaagaatggtgtactcaacatgctcaatgaatcctatttagaatgaagctgtggttgctgaggttttgcggaggtgtggagggtctgtcaaacttgttgatgtttctagtgagctttcacaacttattcgtcagccaggtctcaagagatggaagatatatgacaagggcacttggttggtctcttataaagatgttcctaagtatcgtagaagtgtaattctttccagtatgtttccttctggcagaggccatcatgatcttgttgatagtagttgtagtgttgatccagagggcattactaatggtattaatggaaatgctggagatggtgttcaagcagttgagaatcctgtgatgtccgagtctggtgcggaagtttgcgatttccctctagagcgttgcatgaggatagtgcctcatgatcagaacactggagccttcttcattgctgtactgcaaaaagtttctcctctgccagcaattacagaacaaacaaaaataaaaaatgatgagcaatatgtagaacccgcaaaccagagtcttaatgatgcacaagtaccacatattacttcatcagaaagtgcacacgaagaagtcttcaaagcagtgtctgaggaaaatgtagatgacgctgaacccaacactgaagatttggaagttggtcctgttacatgtgaagaacagaattccaaggaaactcaagaacctgataatgtacaaaacacagcaaagagggttccaggcaaaagaaagctacaaattcaaggcaaatggaggggtgttgaccctgttgtctttttcaaagatgaaacaattattaatagtataagggatttctatggaattgatgagcgttttccattcaatggtcaccttgttacaagaaacagtgatacaaatcatgtgaaaagaatttattatatctccaagtcagtcaaggatgttcttgagttgaacttcaaagttgggcagcaacttaaaataacatcaattggcctgaagatgtttgaaagacaaacagcgcgagaaggtagctctgcatcatgtgctttccggatatcatccgaaggattgccccttattctcccatacataaccaaacagattctgcatgcatctcctgcagacttcaagcatattctgcagaacaaagaagtaaaatttgaagattttaatgatgctgagtttggtgaaaaggcagcaaacctattgccaggctgttgtgtggtaattctgcatatagggaacacacttgctgcagagtctctccaagtggatgagtcaacgatagccattggatgctggaagggtagggcgagattgtcagtgatggttactgcaatggactgccaagaactacttgaaaggcttttaatacggtttgacactgaaaagggttcctctgggcatgcagacaaatcctctaatgatgtgcaagagttgaacagtataaatgagttgaagaatataaatgatgacgtgaaagttactgtgagttaaaagtgaactatttaacagatattctttactctgttgtaagattcagatatttatgctatttgtcatttacagaaatggtgattttgtcccccattattttgcttgtttttgttaaacgatagtgaaaaaactcgtcattattttcatacacaggcgctggcccatatttgtattaatattattctatagttttggtttcataaattgcttctgggaaaaaaaccccaaaaaaaaaaaaaaaaaaaaaaccacaaaaacccag

SEQ ID NO: 28197 - DNA, 1124 bp, Glycine max
  Clone ID: PAT_MRT3847_125463C.1
ccacgccgtccgcaacacacgtgccacccgtccgcccaaaaccactaaaaaagtttggttctatggagacaagaacaggaactctttccataacagtttgttctcttgttatgttttcttttgtttcccttgtaaagggtagcctctctttcaacttctatgcagcttcatgtccatcagcagagtctatcataagaaacatagtcagctcatcctcttctactgatcctactattcctggaaagcttcttcgcttggttttccatgattgctttgtggagggatgtgatgcttctttgatgctacaagggaacaatacagaacaaagtgatccaggaaataggtctgttggaggatttacagttatagattcagcaaaaaggatccttgagaaattctgccctggaactgtttcttgtgcagacataatagctctagccgctagagatgctgttgaaataggcacgtgagaacaggctggtggaccaaggactatgattcctacaggtaggagagacgggatggtttcagttgcttcaaatgtcagacctaacattgtggacaccagtttttcaatggatgagatggttaaactctttgcttctaaaggactgtccttacttgatcttgtcatcctttcaggagctcataccatagggacagcacattgcagctcattcagggatcgttttcaagaagattcaaagggaaagcttaggctcattgacaaaacccttaacagtgactatgctaatgagctaataaaacagtgtccagcaggtgtccaaccatctgtaccagtgaccaatgatcctgaaacatctatggcctttgacaacatgtactaccaaaatcttctggcccacaaagggctattccaatcagattctgttttgataagcaatgatagcccaaggaagttagtggtggattttgcaaatgatcaagagcttttttttgaaaattgggatcagtctttcttgaagctcactagtgttggagtaaaaactggtgataagggtgaaattcgaatttcttgtgcatcgactaatgcataaggaaaaaaatatggtgtcatcctaagtaacaataatgtttctaaatgattttatttgtcgtgttct

SEQ ID NO: 28198 - DNA, 1324 bp, Glycine max
  unsure (1)..(1324): unsure at all n locations
  Clone ID: PAT_MRT3847_125464C.1
gagcgacgacaccacctcgagggctttatcttttctctatagctccgtccaaacatgactctccgcaaccaccaagagctcttggttgctcttgcaattctatattttcttgccacctcactcccttcagtttcagctcatggcccatatgcatgggatggggaggccacatataaattcactacttaccaccctggccaaaactacaaaggtttatccaatgtcaaaaactacttccaccatctcggctacatccccaatgcaccacacttcgacgacaacttcgatgacaccctcgtatctgccatcaaaacctaccaaaagaattacaacctcaacgtcaccggcaagttcgacatcaacactcttaaacaaatcatgacaccccggtgtggcgtccccgacataataatcaacacaaacaaaaccacatcgtttggcatgatctcggactataccttcttcaaagacatgccgcggtggcaagctggaaccacacaactcacctacgctttctccccggagccaagacttgatgacactttcaaaagcgcgattgcaagggccttcagcaagtggaccccagtggtgaacatcgcgttccaggagacgacgtcgtatgaaacagccaacattaagattcttttcgcgagtaagaaccacggtgatccgtatccttttgatggtccaggtgggatattgggccatgcattcgctcccactgatgggaggtgccactttgacgccgacgaatattgggtggcgtctggcgatgtcaccaaatcgccggtgacaagtgcgtttgaccttgaatctgtggcagtgcacgagatcgggcacttgctcggattaggccactcgtcggacctaagagccatcatgtatccttctataccacctcgaactaggaaggtgaatctagcgcaagatgatatagacgggattcgaaagctctatggtatcaacccctaattattatagctaggtgttgtttgtactagaactagagttttatttcggtaatttgcattaaaggattttgaaagttatcgaggtgaaattattctaattcaagaacaacaaaaatagcatgtaagatattgtattttagttttctcttaattaagaataaaccagctgatactaggtgatgcatatatgataatgaataaatgtgacaaatttaccttaaaataaaaaatatatataatgttttagcatttacattaaaaaaggcgggcctgccgactaagtgagcgtcgtcgacaccgggaaattaatgccgttcgcaganctngactcggatcgtanccaananactccc

SEQ ID NO: 28199 - DNA, 581 bp, Glycine max
  Clone ID: PAT_MRT3847_125465C.1
caaaactaaaaacccaactttttttttaagtttttcccaccttgtttttaccccggtggaaagaaacaaagaaaagctgctttgcaacaaagtaaatctaattttacaggacgggaaactttttataaagtaaaataaaagaaagaaaaaagaaaaagggcaaagagaaggataaccccgaccaaaacccaaaagatataagctttttaggcaaaacccctaaaacccaaaaaaccctaggagtaaagcctgttaggagctaacccctgtaaacaaaacccaaggaaaagggatgggggctagcattttatgaagaaactccgcccagccaatctaaataaacaaatctttattttcactaggcaaccaatttttattttaaaactgcaagaaaagaggcaaaaaaaataaaatcaggcggacccaagtttttgataaaatacttttaaaaaccaatatttgccactgaaagggataggaccgcctccttcaaacacagtggagcttaccaaccattaaaaacaaccccatgggctacaatcttgctctaaggaacaactggtttagcacccttgggggca

SEQ ID NO: 28200 - DNA, 402 bp, Glycine max
  Clone ID: PAT_MRT3847_125466C.1
cccaggtggtccatatcggtatgctatggtgcatgataggggagtgtctacaataccaggtgattttgtcattggtgttaagtcggcaaccataaacaatatgtgtgcatatgggctcaatcctggggttgcaggttctggtcgagagggcaccatacctcatgtcattccacaggctactgtcaggaatcgaatggcaacagctagaacactactgaattatgatcctagcaagcagagctatggtgcaatagctattgacctcttcggcggaggaatggtagtggacaaaactggagattggatcacacttatacaaaattctccagttagtaacttgctgagagctgctgcttggaagaagggctgtttaatggataagattgtgatgccagggaatgc

SEQ ID NO: 28201 - DNA, 547 bp, Glycine max
  Clone ID: PAT_MRT3847_125467C.1
ggaaacatgtgaattctgtttgtatttgacccaggaggggttgatgatattttggggctgctgcagtggagggattcagctttcaaggtattgttcggacaagatccacccttgttgaagaggaaaaccattctttcaaaggtggaagaagaggtcaacagattgactcagcagtgggatgagctgttagattatttaaagcagcatttgttgaaagccggggacagaatgagaaagcaagataataagtatagaagaagtgaggagtatgctgtgggagattggggttttctcaatctgcagcccaataagatgtgctctctagctagaaaacctaatcaaaagctaagtcctctttttttattgccctttcaggttttgcaaagaataggtcaggtggcctatgagctggatttacaggacaatagggggattcccccagtttctgtgtcatcgtgtgtacctcctcaagaaggcagtcagcacaccacagtttgttcaaacttttccctggccttggctgatgatgtggggttccaggttcaac

SEQ ID NO: 28202 - DNA, 123 bp, Glycine max
  Clone ID: PAT_MRT3847_125468C.1
tactaaactcggattcggctcgaggaccgtaggtttatccagatcgaaagtgaatgtatgacttatttactgttgtacgtacttgcaaggatttattttgcttgtataataccggggtggact

SEQ ID NO: 28203 - DNA, 408 bp, Glycine max
  Clone ID: PAT_MRT3847_125469C.1
ctcgagccgaatcggctcgagtacggctgcgagaagacgacagaagggccactatgggaacaagtgatcaaacactccctttcttcactcagttctttcagtttgaggctagttatgatagcttcactacttttcagtatgtgaccttctaaactctatttttctatatacgcttttcaaaacatgagtgttatgttagaagtcttaatcaatttttttatttgaaaatattagtgcggtagaatgttagtttctgttatcagagatgatcaaatgaacctacgattatttttttctttaaccattcaatccactttatatttgctaaatgtcttaatcattgaaatgagaaacctaattaatgcttaacaaaatgcaggtttttcgttattacaatggctctagtgg

SEQ ID NO: 28204 - DNA, 489 bp, Glycine max
  unsure (1)..(489): unsure at all n locations
  Clone ID: PAT_MRT3847_12546C.1
attcccgggtcgaccccgcgtccgctgaaacacaaactgaaaaaaaaaacaaacaataccataacatgggcttcttccacccatcaccgcctccttcctaacatcacccccttcatctctcttcaacaaatcatcatccccttccttccatgccacccctactctccgccccctcgcgccacgcgccttcatgtgccgctcagcgccgccgtacgacttcggatcggtccgggtcgatccgaatagaaaggcgattgtggcgcgcgagaagacccgcagggacatggatcgacatggggaacccacgccgacaccgacgtnggcatcggtggggcggggctccgggggggctctcgggcgccctacgaggctcttcacaaaaacccccccatcaacatacggcatttggtgaggagagccggtcagcccccggggggggggggccctgggctcgggcggcgcaacctctttcttccgccatggggaggg

SEQ ID NO: 28205 - DNA, 1038 bp, Glycine max
  Clone ID: PAT_MRT3847_125470C.1
ctgcaggtcgactcccagtgttatttgattcagccaacacatacatatgtaaacctgagggtatatcatattggggcattgtgttagaaacttgcatagcaacatctaacttttcctatataagttactcatcaggtggttcatgaagagtttataatagttgaaggtttgatgacaacagtacatgcaacaacaggtctcttttccaaaattgctaattgtagtctctagtttcatttactcatgcggtcaaaccatccctttatgtttcacatgtggcattggtaacatccaattcttttttttttctcagcaacacaaaagactgtagatggtccttctatgaaggattggcgaggaggaagaggggcagctcaaaatataattccaagttcaactggtgctgcgaaggtacaagatggatggacacagattttatgctttctattttcagtactggtatttgtgattaggtctgttttatgaatcacaggctgttgggaaagttcttccagagctaaatggaaaactcactgggatggcattccgtgttccgactcacaatgtttctgtggtggacttgacttgccggcttaagaagaatgcatcctatgaagatgttaaagcagcaataaagtatgtctattgctttttgtttttttgctccaccatcattgctgtgattgttctgtaaccttttgcttgatttctatgactttgctactgaaaaatatgaaggtatgcctcagagggaccactgaaaggaatccttgggtacacagacgaggatgttgtctctaatgactttgttggtgattcaaggtacgttatgttcttctattacctttaacggaaagactttgctgaattacttttctggttgaaaagtgagacaccatagaaactgacatacccagtttggttgacacatttactcctgtttgaaacatttctaatttgaacataagaaaactgaaccttcatttctctttccctagctaagttttgctcatttggatgtattatttgtaagtatta

SEQ ID NO: 28206 - DNA, 394 bp, Glycine max
  Clone ID: PAT_MRT3847_125471C.1
gctagatgtatattttacataatggggagcataaacactttccctattggatgtttctctaatgtaaagccacaaactcattgtgacatagactacggctacattggagatcgattacagatgtgttacactatggaggaccatgccgaaagctcaattgtactaagctgtacaggttaacacttaatcctttttattgtgacagatgggacacacataagaacaaaatattgataatatttttaaggacaaaagacaaaaagaatcttctgattagccagttataaatgcgttcccttgttgatagcaaggataatattggacacttagagcacggaataacatcttattacttacttgtacatccctgacccatatgggttgagaatgaaat

SEQ ID NO: 28207 - DNA, 504 bp, Glycine max
  Clone ID: PAT_MRT3847_125472C.1
ctcccccccaaggtgaatagcaattgcatctgcaaacaaagttgcatagggcttccaactggtctcgaagcatgaatagcattcccataggcctccccctgttctaatcctatttcaccaaatgatgtctcaactcctcttcctatttataggcagtactggtctgctagcataagcccatccttaatggggactatctaacctaattaccaacataactaactaatgggtatttatcaatacagtttcaggccaattccctttctttctattgtaaccccataaatttctttgactatctaacctaactaattactaacgtaactaacttataggtatttatcatgaacattcttagttgtaaagtttacaagccactcataaaatatgtgcctttctgtatagaccgcttgtttgtaggtatacatagtttccatggattttggaggctctaaagtctaaatcctaaaatataattgtttcttcctttttgtgatcaaaaaa

SEQ ID NO: 28208 - DNA, 253 bp, Glycine max
  Clone ID: PAT_MRT3847_125473C.1
cacgcgtccgctaacacatactgtcacgctctttcactcttctggattcatggctctagcactttttcacgacattctcaaatcttccaaacgcagaaaatctcccaaagggtttcccacaaagaacacccacatgctttagcctgaccacaagaacaatttctcatgcttctaaaggagtctcatctttctgtgaaccactttcttcagatagaccattgtgggtccctcgtagcttacctcctgagaggct

SEQ ID NO: 28209 - DNA, 386 bp, Glycine max
  Clone ID: PAT_MRT3847_125474C.1
ccccgcgtccgtccgggtgtgcgaacaggtgcgaggggaccagatgcggggacacgactgattgattcggatggtatattacgagagaagggcgcggaatgcaatgatgacgacatgactggtacgaggtgagggaggacaacggactgatacgggtgggagagaaccaccgccggggggatgtgagggataacattcagggaatcacgaagcccgcgattcggtgtagtggatccacgtttaggtgcgcaggctttcaacggtctaatttttgtatagagtcacctagatctaattatctggctggagatctacattggcgacgactgggactatcctgaggacgctagcttatgaccttgctgctatggacgtttttacgctgt

SEQ ID NO: 28210 - DNA, 381 bp, Glycine max
  Clone ID: PAT_MRT3847_125475C.1
tcggttctgagtgggcaaatcaaacttaatggcgtttgtgtttacttattgacaatcccaaacagtgtacaggaatggatattctcttgggaattggttaagatttggaaattggtgtaaattctcttatgccagctttttctgttccacaggctactggcagatcttttgtaaatgcggaattctttgcatgatatggaatttgagtgttctttcggttgtacagggggtaagttaaataaaggaaattaggaatgaccctgttgatgagcatgctctgcctatcatacaatatccagacgtctgttaattgtcagaatgatgtgggaagcgtgtgttcttttatagtatatagactgacagtcaattacctttagaagc

SEQ ID NO: 28211 - DNA, 110 bp, Glycine max
  Clone ID: PAT_MRT3847_125476C.1
tctgcgaaaggtactcaccctgtaggggcgctttaagcgcgttggcagtgcattttagctcctaaatcaacccattctgtggcaagttgacaataacatgctcttttcat

SEQ ID NO: 28212 - DNA, 365 bp, Glycine max
  Clone ID: PAT_MRT3847_125477C.1
tctgggcgttctgcctcacctgccggctcttttacacgtcactcaccgaatacaatcatggggagcactctaagggtataggtatactacctcggttgatccagcctgaagcgctaatgcacatcgcttagggagtccctgagattctgtctcccgcgagcccgctcacactggagggctgcttcttaacaaatagtccactatacagacctgtgcaacggcatgaacatgtaggtacgaagatgcaccctccatagttatcgtgacttagttctagtggagtgagctgttgtcatcacctgtaacactgatcagtttcttgtctaatccgaggactactcacgatattgcatcactgctttgca

SEQ ID NO: 28213 - DNA, 763 bp, Glycine max
  Clone ID: PAT_MRT3847_125478C.1
ctctcatttcggctcgatttccggtttctctctcgctctttccgttttgacttaccatggcggaagaattatcaatagcgattccgcaatcgcaagcaagcaccacgaagaaacgcgcttcaaagaacgaaaagctgtgcctcgaggactaccttcacctcgttcactctcgccaaacgcttcacctcaccataaatcaactcaatcaggtcatccgcattcacggcttcaagaaaatccaccacgctcctaagaaagtgctggtgcaagcggtggagtcgctggaactggtggatctgccgcggtcaacggtgagcgagagcgtatcggcgttcgcggcggtggtgctggaggatgtggttgcggatctcggtgagctcagctggcaggagtgctgcgtgatctccgtcgagaagatcagcttctccgacggccagagcgtgttccctgctgcttgctccgatcagagcctccgcgtcgtgaaccactcgctgtcgcaggcccagaaagagaacaggatcgacgaaacccgtaacctaatccctgaagcttttaggaaagacctgaaaccaacgaaaatggtgccgaagcggaagaggagcaacgttcgcgactatgttgcctctactttggattccgcttctctcgcttcgtgctgaatgaatgaacgaccttcggttacttctctctctgtatagtttaaagaaatttaaagtttccaatgcattaacttgtaaggatattgaaatttgaaagtcataaa

SEQ ID NO: 28214 - DNA, 236 bp, Glycine max
  Clone ID: PAT_MRT3847_125479C.1
aaacatttaacaccagctcagccagaaaaacatgccaaaaatgtggtattaatatacagaacagaactattatgttacacatgtatctaagaataaaattaaagaagtaagtaaatgtgtgtatgttttagttttagatggtaagttgagggcgtataatattctcgctataagtatagagaagaagatatagccactttattatctccccggtatagaggcacatgaaggaaggg

SEQ ID NO: 28215 - DNA, 178 bp, Glycine max
  Clone ID: PAT_MRT3847_12547C.1
atcaattcacagtaactaagattatgtttggtttcacgttcaaatgccttcaacttgagtttaatggtggtcaaacttaatttttcctttgacagtgatgtttggtattatgttgaagacgtgattctgtggtttatatctaagtttcaaagaatctacatagatatggtttctacgt

SEQ ID NO: 28216 - DNA, 489 bp, Glycine max
  Clone ID: PAT_MRT3847_125480C.1
gagaatgaacatttacaaaactgattctccaaacgtaaaaaaacatttagttttagctactatcacattgaaatggatgcatgctccatatcaagttccaatcgggaaatctggaacaaataacatgaaaaaaaagtaggcttgaaccagtatttgaaatcatattgagtgcaacacggtgatgcaaaaaattgtcacaaatagctccatcagcttggccataagacttggtgtcgaatttacgatagcatatgatttagatgcgcatgaccatgtaggaaatatacgagctcatgagcttacattagaattgctgcataacggatctataaaacatggaagattttttttcacagcgcttaagcacatgacagattcaattttctgaatcaatattcatgaggatgtggattctagtagccactaatctcatgcatgtaacgacctttatcttaacgcgccttggcctcttatgggtccttctattcc

SEQ ID NO: 28217 - DNA, 336 bp, Glycine max
  Clone ID: PAT_MRT3847_125481C.1
ttttgttttttttttttttttattttgttggttgggggtttttttttacaaacattttcaacattcttttttaaaaaaaaactttaattaacttgcacgggaaaaaaacaagaaacggggggaaaaaagcgcatacaacaaagtgaaaagtgtgtttaaaaaatcccccaagaaatatagtgaggtacctgatcgaggggcgcgaaaattgtagcatggggacctcacaataaataacgcgcatccaaaaccaaagattaaaaccaacctaagaacaagggggtgggggggggaaataaacaaaagggggcttaaaaaaaaaaccgaaggacaggg

SEQ ID NO: 28218 - DNA, 356 bp, Glycine max
  Clone ID: PAT_MRT3847_125482C.1
ggattctgatcctgctgcacatacaccacaatcccatgcaacctagggtgctaagaatcagggacaccacatcctgatgcttctacttctgcgagctcttgctccagttgccgtgtcgctgaatccattcgaactttatgggagtcatgatactatgacaagtcgtactcaaatctccatatacaatgccacatgctgaccgatctgtccagaaagacgctgacctatatacatctcatgctacatcgtgatcaatattcacacgtacctatcggcatctatgattatcaccataccatattcagccgattgatctcggagttgatcactgctgatattaacatgactagtgaaat

SEQ ID NO: 28219 - DNA, 497 bp, Glycine max
  Clone ID: PAT_MRT3847_125483C.1
cttaagaaatacgatggagataacttagctacgatggagataacttagcttagcagcataatacacattaagtcattaatgcagagtcaattgcctaaattgatactaccttcttggaggtacctacgacttcattgtacaaacagatctagaactagaacgatacatttacaggggtgtagctggaagcctggaaattggactgttgaacataaataatgcagttacttgcgtcctcgcctccttggtctcctcaggactcaggagccatcaatcagaagtctcaactattttggtaacacgataagttcatcaccacgtgccgctttgtcatctgcatgaccgtctgaactagcaacttctgtatcttcccgcaaccaatcttgcgcacataccaatccctgcactgttgaagggtccatggtactgagatactcatttaatgtccgagcatcactgtccaatgggatgatagatacagggacagctaaaatatc

SEQ ID NO: 28220 - DNA, 751 bp, Glycine max
  Clone ID: PAT_MRT3847_125484C.1
gaaagcactaaactcttaaatagctcacattttgacccttctgaaaatacataatagtgatttgttacatgcaactccatttagatgcacagtttacttttggaaacctgggccagataatcaaagcagggctaaacaaggcagctggtggtttcatgtaagtcagaaacacatctaacagatgttaacgtagcagagctgcttgctagcttcagtgcaggtggacattgatgtcgttattttctgtagctgttgatccgtgatttctggatgatcagggagctctaatcactgaagtaatggaaggagatgcccgcagcaagcactgcaacagctagtgctgcgatcacacctatgttttgctgaattttcactcctatggttttttttggttgttctggttgttcttcacttgtgttggtcagtgaagcctcactattcacagaggaagtcatgcaagctgtgtttacttcctctgcaatttccaagtcttctatttgaatctcatgatctaacatctctgaaaaatggtctctgatttcttcagctgattcatcaccaaacttatagtcacataacattacagtagatccaggaaggggaacaaaaactctctgaggaagttcataattttttttttctggaatttcattcagaagcaggtcctcaaagagtatttcacagcgatcagcaactgtgttaaaatatctctcttactgcctgcacagcatctttaccttgggtctgttgc

SEQ ID NO: 28221 - DNA, 158 bp, Glycine max
  Clone ID: PAT_MRT3847_125485C.1
atcacactctcaaagacgcgacaaatttgttagcacttgacacccaagttactactggaggggatgttcccattgccgtctcgagtatgtcagttatcatcgtcgactctacttcatacgcatcctctatgaaggccgtatccatcctgccacccaag

SEQ ID NO: 28222 - DNA, 251 bp, Glycine max
  Clone ID: PAT_MRT3847_125486C.1
accacgcgtacgaccacacgtcctttttgagaagacaacacaaggggggaccgcgctgaattgaaattcaagtgactccgcttcattttacttaccaatggcggcagatgcgactcgactcatgaatgctctgtactattctagcattaaagtataccctcatccttcaatcaacatcaaattgcctctccactggaccatcaacaatatcctcttctaacaacctctcttacttcaaccatctttttctt

SEQ ID NO: 28223 - DNA, 2324 bp, Glycine max
  Clone ID: PAT_MRT3847_125487C.1
acggcgtccggctaaacttaaatccttgcaaaggatagtgttagctgataacaatctcaccggttcgattccggaggagcttgctactttaccagcgcttactcaattgaatgttgccaataatcagctttatgggaaggtgccgagttttaggaaaaatgtagttgtgagtacaaatggcaacactgatatagggaaggataagagtagtttatccccgcagggtccggtgtctccaatggctcccaatgcgaagggagatagtggcgggggttcaggaaatggtggcaaaaagtcttcttcccgtgtgggagtaattgtgttttccgtgattggggctgtgtttgtggtttcaatgattggtttcttggttttctgcttgtttaggatgaagcaaaagaagctgagcagggtccagagcccaaatgcgctagttattcatcctaggcattctggatcggataatgagagtgtgaagataacagttgccggttcaagtgtcagcgttggtgctgccagtgaaacgcgaaccgtgccaggcagtgaggctagtgatattcaaatggttgaagcaggaaatatggtcatttccatacaagttctgaagaatgtcactgacaatttcagtgagaagaatgttctgggacaaggaggttttggaacggtttatagaggtgaactccatgatggtacaagaattgcggtgaaaagaatggagtgtggggcaatagctgggaagggtgcgacagaattcaagtccgaaattgctgttttgactaaagttcgccaccggcatcttgtttcccttcttggttactgcttggatgggaatgagaagcttcttgtgtacgagtacatgcctcagggaacattgagtaagcatctttttaactggctggaggaaggactagaaccactggagtggaatagaagattgacaattgccttagatgtggcaaggggtgttgagtacctccatagcttggcccatcaaagcttcatacatagggatttaaagccttcaaacattctccttggagatgatatgagagcaaaggtttcagattttggtcttgtccgtcttgctccagaaggaaaagcctctatagaaacaagaattgcaggaacttttggatatttggcgccagattatgcagttactggccgtgtgacaactaaagttgatgtgttcagctttggggtcatattgatggagctgataacaggaagaaaagcacttgatgaaacccaacccgaggatagcatgcaccttgtaacatggttccgcagaatgtccataaacaaggactcattccgcaaggccattgactccacaattgagctcaacgaggaaacgcttgctagtattcacacagtagcagagttagccggccactgcggtgcaggggagccatatcaaaggcctgacatgggtcatgctgtcaacgtgctttcttctcttgtggaactctggaaaccatctgatcagaattctgaagatatatatggaattgaccttgacatgtccctaccacaagcacttaagaagtggcaagcttacgaaggtagaagtcaaatggagtcatctgcttcctcttcgcttcttccaagcttggataacacacagacaagtatacctactcgcccttacggatttgctgattctttcacatcagcagatggtaggtgaccatgattggttgtaaataattccaaggtgtttctttagtgtgcatgttcattctccagtccttgcttctttctggcttttcttttgtgaacttgtttttatctttttttcatggtgtagttctccacacctcctccatgattaatttcacaccatctttagcacttgttgttaaggacttttgctgacaaactgggaaagagattctcagctgaggatgtatttttcatcaactcacattcgtggtttcccccttttgagttaattttgagatgtgtaaatcaaatatcactattgaacttccagttagtagcttaagcttgtagtgtgaatagtttgttttaatttatattacacttgtcgaaccaattttggtttctgaatgcttcttgctggcttttctatttgaagctgtttatcatttttcatgttgtagtctcttccacggttaatcttgtacttcttcagtgtctgttttcagccttacgccgccaaatttagaatagaatattgttagcagaatattcatttttcatcttaggctcatgttttaatccttaagttaatgttaagagatgtaaataaaatgtcacggttaattcttttacaccacaccccatttttttgttttgtc

SEQ ID NO: 28224 - DNA, 525 bp, Glycine max
  Clone ID: PAT_MRT3847_125488C.1
acttaacaaccatatgtgtaccctcatgaaaacaaaaagctgtcaaaatgcgtccaaatacattcaacgaaccaccatatccatacacagcacagagttttttgcaacttcacattgcataattgagacaaaagaaggcggaggacatatatacagcacgcaaggcaggcgtaacaaagcagataggtaagcattcatatacagaaatgatatataggacaatcatcaacacgacggagcgacgccgcatgcagccagagggtccgcatcagagcgttccgcgaaccatgctgtgaatgctggactagatcaggcatacgcttttctcgatgctgaacgaatggccttctcaaactgtgggttgtagctcttctccgctgtaccttagcactctagcctccctatccggggccgagaactgcgccgtcaccgacaccggtgccactggggtgtaactggagttcgatacctccgacatcgtgttaccggccggtacaacggcaaattatatcgaccacggagaag

SEQ ID NO: 28225 - DNA, 527 bp, Glycine max
  Clone ID: PAT_MRT3847_125489C.1
cttgtatgatagtgacaatcaacacctcaaaagctcaatgaggactgagcatgaagtattagatgatgctcagaagtcaacttcaatggatgttcatgaaggtgttaaaactattgcaaagatgataaagtggttgctcacaagcttccatgttacaataacaaatataattgttgcatttgatccatccttagataatgaagaaaataaaacacattgtcgtcattccttagttcttcagatttctgaaatacaatgtggaactagtctgtctgaagatgccaattcaaatgttgatgtccttggtataagccggctaacaaactttgtaaaatttcgtggagcagttattgagcttctcaaaatagataatgaagatgtatactttcaacatgaatcaggagcaggatgtggtgaacctgttttggggtcaaatatagcaacatgtccaatcatgactgggaaccaaggtggatttagtggaaatattaaattaagtattcctttgaaaaatggttctttggacg

SEQ ID NO: 28226 - DNA, 1752 bp, Glycine max
  Clone ID: PAT_MRT3847_12548C.1
atggtgagtgttgaagagattcgtaaggcgcaacgtgcagaaggccctgccactgtcatggctattggcaccgccactcctcccaactgcgtggatcagagtacctatcctgactattatttccgcatcaccaacagcgagcacatgaccgagctcaaagaaaaattcaaacgcatgtgtgataagtcgatgattaagaagcgatacatgtacttaaacgaagagatcctgaaggagaatcccagtgtttgtgcatatatggcaccttcgttggatgcaaggcaagacatggtggttatggaggtaccaaagttgggaaaagaggctgcaactaaggcaatcaaggaatggggtcaacccaagtccaagattacccatctcatcttttgcaccactagtggtgtcgacatgcctggctgctttgccggtggcacggtgcttcgtttggccaaagacctcgctgaaaacaacaagggtgctcgcgtgcttgtcgtttgttctgagatcaccgcagtcacattccgcggcccaactgacacccatcttgatagccttgtgggtcaagccttgtttggagatgctaggatggtgagtgttgaagagattcgtaaggcgcaacgtgcagaaggccctgccactgtcatggctattggcaccgccactcctcccaactgcgtggatcagagtacctatcctgactattatttccgcatcaccaacagcgagcacatgaccgagctcaaagaaaaattcaagcgcatgtgtgataagtcgatgattaagaagcgatacatgtacttaaacgaagagatcctgaaagagaatccgagtgtttgtgcttacatggcaccttcgttggatgcaaggcaagacatggtggttgtggaggtaccaaagttgggaaaagaggctgcaactaaggcaatcaaggaatggggtcaacccaagtccaagattacccatctcatcttttgcaccactagtggtgtcgacatgcctggtgctgattatcagctcactaaactattaggccttcgcccctccgtcaagcgttacatgatgtaccaacaaggctgctttgccggtggcacggtgcttcgtttggccaaagacctcgctgaaaacaacaagggtgctcgcgtgcttgtcgtttgttctgagatcaccgcagtcacatttcgcggcccaactgacacccatcttgatagccttgtgggtcaagccttgtttggagatggtgcagccgctgtcattgttggatcagaccccttaccagttgaaaagcctttgtttcagcttgtctggactgcccagacaatccttccagacagtgaaggggctattgatggacaccttcgcgaaggtggtctcactttccatctcctcaaggatgttcctggactcatctccaagaatattgagaaggccgtggttgaagccttccaacccttgggaatctccgattacaattctatcttctggattgcacaccctggtggacccgcaattttggaccaagttgaggctaagttaggcctgaagcctgaaaaaatggaagctactagacatgtgctcagcgagtatggtaacatgtcaagtgcatgcgtgctattcatcttggatcaaatgaggaagaaatcaatagaaaatggacttggcacaaccggtgaaggtcttgactggggtgtgctatttggtttcggccctggactcaccgttgagactgttgtgctccgcagtgtcactctctga

SEQ ID NO: 28227 - DNA, 217 bp, Glycine max
  Clone ID: PAT_MRT3847_125490C.1
cgccatcaaacaaatgcagaaaaagagtaatagtaataagaagccaaaaccccaaacagaaaagaaaagaaaaagaaacctaaggggggagacaagactagtaagcgccaaacgacaggccatggctactaagaggccggctgagcagaacatagtaagggggggggccccagaacgctgacaggcagaaagcctgcatagcaaaagccaaacggaa

SEQ ID NO: 28228 - DNA, 982 bp, Glycine max
  Clone ID: PAT_MRT3847_125491C.1
gacacacactgaaacgaggcttttcagtttttactgcgtttccgttggcttcgttatgccactgagagctcagattatgactaaggataattatttattggattagacattcacaatttgtgtcaaactggactgatttcccattatcactactggccaagaatgagcttgctttcaagaataaggcattatttacccaatggtttatgtagacaacctcttcatccaacagtagtgcggcttaacgctagtaacttaaatgtattttcaagacattttggtcaacctgcgaggaaagaggaggaggaggaggatgtagaaggaagtggaaattaatcaaagaagtctcccagctgattttgatcctgctacatttgatcccaatgatcatcgaggccctccatcagagagagttttcaggcttgttgatgaggtcgcttctcttacggtagctgaagctgcagaattgggtctcactctgatgaagaaaatgggagtgaaggagatgcctaatgtgggatttatgaaagcaggagctggaaacctggctggaatggcagcgaaagcaccaacagcagcaaaggaggagcaaaagccagaaaaaactgtgtttgaattgaaactcgagtcctacgaagcggcttccaaaattaaaatcatcaaggaggtccggggctttactgatttaggtttgaaggaggcaaaggatttagtggaaaaaacacctgctgttataaagaaaggtgtttcaaaggaagaaggggagcagataatagagaaattgaaagctcttggtgcaaaagttgttatggaatgaagtgatgtatgttgtttcttccagctttcaatattttagttgtctgaaattttgaaaatttcagattgctggccaaggatactgcaaattttgctagtgctgtcactgtgtgttaattttttagcataaactggaatttaattttaaaaaaaaaaaaaacattat

SEQ ID NO: 28229 - DNA, 161 bp, Glycine max
  Clone ID: PAT_MRT3847_125492C.1
ataggaggaaaggggagggtagccttccttgttttgaccgccggacaataggaatactaacaagctaattattacactatgtactttacatgtggggccctgttaaacaaacactttcattaacgaacatatcaaagatgatagtcgtaggcaaatactac

SEQ ID NO: 28230 - DNA, 361 bp, Glycine max
  unsure (1)..(361): unsure at all n locations
  Clone ID: PAT_MRT3847_125493C.1
atcgcgagcgccgaccaaacaccaaagaagggggggcatttttaagagcggggacaccagaaaacacccccgccngcacacgaaagaaagcgagagcccaagacgaacaccacgacacaggggccagccaggaagcaagaaaacgcccgggccgggcgccacaaaggaaacaccaaagcaagaagaagaaaccaaaaaggagacaccaagggaaaaaaaacagaaaggaacacaaaaaagccagaggggggcgccgacacaaagggaaaaaaaccacgggagaggagaagaccacagaaagccccaaaaaagggggcccaaacaacaaaagaagggccacccccccaaaagcncgagaagg

SEQ ID NO: 28231 - DNA, 738 bp, Glycine max
  unsure (1)..(738): unsure at all n locations
  Clone ID: PAT_MRT3847_125494C.1
ccacgcgtccgcgcacgcgttagtatggtaattgatgaacagcttcaatataatgcaattcaagtatgttgtgagacacttgcgtatgcgcaactcacgttgtctgtgtacgaataattattataggagtaagagacgaagcacgaacagctactctccatcctctgtcaaattcaaagaccctgacattgttacatggaacaaagccatttcttcccacatgcgcaacggccactgcgactccgctctccgtgtcttcaactccatgcctcgccggagctctgtctcctacaacgccatgatatctgggtacttgaggaacgccaagttctccctcgcaagggacctgtttgataaaatgcctgagagggacttgttttcctggaatgttatgctcactggatatgtcaggaaccgcaggctcggcgaggcccacaagttgtttgatctaatgcccaaaaaggatgttgtttcctggaatgccatgttgtctgggtatgcccagaatgggtttgttgatgaggcaagggaggttttcaataagatgcctcataggaattccatctcctggaatgggctgcttgcagcttatgttcataatgggagactcaaggaggcacgtcgcttgtttgagtcccaatcaaactgggaattgatttcttggaattgtttgatgggcgggtatgtgaagagaaacatgttgggntgatgctaggcagctttttgaccgaatgcctg

SEQ ID NO: 28232 - DNA, 2205 bp, Glycine max
  Clone ID: PAT_MRT3847_125495C.1
atgtctatcaactctgactctgatcacgaggagacccctcctccttttatcgaccccagccagcaaccttctagcccatttcacatccatcccagtgaaagtcgtacctctattattgttaccccaccacttacagggaacaactaccaatcatggtctagatccattcggatggccttgatatccaaaaacaaaatgagcttcctcactggaacaatttccatgccgactagcactgaccctctatttcctcgttgggagcgttgcaatacgcttcttatgtcttggttgattcactctgtttctccctttatcgcccagagcatcattttcttcgaaaatgctgctgccatctggattgatcttcgcaaaaggttctctcaaggcgatttgttgtgtgttgccaagttacaagaagagatttactctctcaagcaaggttctgcttctgtcatcgactactacactactctcaaatctttgtgggaggaattagacaatttccgtcctttgactccttgcacttgctcagtcaaagattttcattatcaggatttcattatccgatttctcaaaggactcgatgagcgcttcaccatggtccgatcaaagattctacttcttgatcccctaccttctgccaacaagtcagggggaggcaaatcgaactttttcaattgcaaatatgaccactgtggtcgccttggccacaccagcgatgtctgctatcagaaacaaggaaataccattcctaaatgtgaacattgcacgcgatacggtcacaccatggatatatgctacaccaaatttggatatccacctggccactcaaaatacccgggccgacctcgccttcccaacaagactggagcttctgaaggtggcgccgctggggccacggaccatatcgcttgttgcttgcattactttcacacttattctaaaataataccaataaaaattaatctacccaatggacaatttgttgaagcccacattactggaacaatttatttttcatcaagttttgccattcatgatgtcttgtatgttcctggtttttcttttaatcttttgtccatctctaaattacttttcaatcttaactactccataatcttctccaatatgtcttgtaaaatacaggaaatgaacacgttgaagatgattggttcagctaaattaaagaaagggttgtatcacttggaaatcggagatagaggatcaccctcacactcaccttccatcatcaacaatgcaaacatcaaccataccaatgactctactctttggcattttagattaggacatttatctggaaatcgtcttaacattttacatcaagaataccctttcatttctagcaatttcaatgaaatttgtgatgttttccatttagcaaaacaaagaaagttaccctattctcttagtactaaacgtagttttaaaatttttgaattaattcatatggacatttggggtcttttttccaaacattttattcacggtcacaaatattttttagctatccttgatgactacagtccttacacttgggtggttttgttaaaaacaaaagttgaagttaaaacacatatagaaaattttgttgctttggttgaaaaccaatttgaaacaaccatcaagtgcatacgctctaataatggaccggaatttttgctaagaaattttttttcttcaaaaggcatacttcatcaaacacgttgcgtttacacaccacaacaaaatgggagagttgaacgcaaacatcaacacattcttaatgttgctaggaccctcatgtttcaatccaaaattcctgataatctctggtcttatgctgttaaacatgttatcttcttaattaatcgcattccttctcctgtcattttaaacaagacaccttttgagcttttgtataaacaaaaacttgatttttctatgctcaaggtttttggttgtttatgttttgcttcaaaacacactccacaacacaaatttgatgctagatctcgaaagggagcctttttgggttacgaaaatggaacaaaagggtatgttgttcttgatacaagcaacaaagaaatatttatttccagaaatgttctatttcatgaaatgcaatttccttttctcaaagacagcccacacaatataactataagcccacaaatagataccctaactgcaccattcatgctataa

SEQ ID NO: 28233 - DNA, 127 bp, Glycine max
  unsure (1)..(127): unsure at all n locations
  Clone ID: PAT_MRT3847_125496C.1
annccttnnttatgctcaanatagtctatatcctggngttgctgctgaanantangggnaganagctgctgangtcccaagcngtaanatatatggagaaattgctatgccanctgcacagatctac

SEQ ID NO: 28234 - DNA, 2437 bp, Glycine max
  Clone ID: PAT_MRT3847_125497C.1
ttaaacaagagttaagtttcaaggtgcgctgcgtgtcagagaaccatgcatcaaccttctagcccatttcacatccatcccagtgaaagtcgtacctctattattgttaccccaccacttacagggaacaactaccaatcatggtctagatccattcggatggccttgatatccaaaaacaaaatgagcttcctcactggaacaatttccatgccgactagcactgaccctctatttcctcgttgggagcgttgcaatacgcttcttatgtcttggttgattcactctgtttctccctttatcgcccagagcatcattttcttcgaaaatgctgctgccatctggattgatcttcgcaaaaggttctctcaaggcgatttgttgtgtgttgccaagttacaagaagagatttactctctcaagcaaggttctgcttctgtcatcgactactacactactctcaaatctttgtgggaggaattagacaatttccgtcctttgactccttgcacttgctcagtcaaagattttcattatcaggatttcattatccgatttctcaaaggactcgatgagcgcttcaccatggtccgatcaaagattctacttcttgatcccctaccttctgccaacaaggttttctccatgattatttagcatgaatgacaacatttcaccaatatctcaccgtcgctcaatgttaacccttttgccaacgtcatctatagtagaagccacaccagcgatgtctgctatcagaaacaaggaaataccattcctaaatgtgaacattgcacgcgatacggtcacaccatggatatatgctacaccaaatttggatatccacctggccactcaaaatacccgggccgacctcgccttcccaacaagactggagcttctgaaggtggcgccgctggtggtgccgctgtcaacaatactacaagagaaggaaaccgaaccctacatggagaagaaaataaggatggaagactcaagttggtggtgcgaatacaagtgacgtacccattagagcaaaccttattcaccacagcccaaactctgtttctgatctgtgtggtacctcatttattttttctatcaacaccacccacacacttaacacaattaacacaccctggatatagattcaggggccacggaccatatcgcttgttgcttgcattactttcacacttattctaaaataataccaataaaaattaatctacccaatggacaatttgttgaagcccacattactggaacaatttatttttcatcaagttttgccattcatgatgtcttgtatgttcctggtttttcttttaatcttttgtccatctctaaattacttttcaatcttaactactccataatcttctccaatatgtcttgtaaaatacaggaaatgaacacgttgaagatgattggttcagctaaattaaagaaagggttgtatcacttggaaatcggagatagaaatgcaaacatcaaccataccaatgactctactctttggcattttagattaggacatttatctggaaatcgtcttaacattttacatcaagaataccctttcatttctagcaatttcaatgaaatttgtgatgttttccatttagcaaaacaaagaaagttaccctattctcttagtactaaacgtagttttaaaatttttgaattaattcatatggacatttggggtcttttttccaaacattttattcacggtcacaaatattttttagctatccttgatgactacagtccttacacttgggtggttttgttaaaaacaaaagttgaagttaaaacacatatagaaaattttgttgctttggttgaaaaccaatttgaaacaaccatcaagtgcatacgctctaataatggaccggaatttttgctaagaaattttttttcttcaaaaggcatacttcatcaaacacgttgcgtttacacaccacaacaaaatgggagagttgaacgcaaacatcaacacattcttaatgttgctaggaccctcatgtttcaatccaaaattcctgataatctctggtcttatgctgttaaacatgttatcttcttaattaatcgcattccttctcctgtcattttaaacaagacaccttttgagcttttgtataaacaaaaacttgatttttctatgctcaaggtttttggttgtttatgttttgcttcaaaacacactccacaacacaaatttgatgctagatctcgaaagggagcctttttgggttacgaaaatggaacaaaagggtatgttgttcttgatacaagcaacaaagaaatatttatttccagaaatgttctatttcatgaaatgcaatttccttttctcaaagacagcccacacataagtaaaatcaaaagatttactaaaagacgaaaattatattttagttttagttat

SEQ ID NO: 28235 - DNA, 417 bp, Glycine max
  unsure (1)..(417): unsure at all n locations
  Clone ID: PAT_MRT3847_125498C.1
gatgtgatgaaatgtcgtccgctgtaatagagggaattcataaaccaagaaatcacaaccaagccaaaatagtcacccaagctataaaggaagactcgcgggagggcagctcgccttaagttgagcgttgcgctatgnanaggttgtaagactcgtgcatgtacctcacccttgacgtaaccacgagaaaaataattgattcataagtacaaaaagtactgcacgggctgtccnnnnnccccccatcatanatatatgcatatcgatgtcgnnnnntataaacaaagttgttcctcctgtccctaaaatnnnnnatcattggtggttcgataaggncggctgggcacatcatccnnncccggccgtctgcagtggacgntaaacaagctggggcaccaccagctggcggaactacaa

SEQ ID NO: 28236 - DNA, 2056 bp, Glycine max
  Clone ID: PAT_MRT3847_125499C.1
ggtcggctgtgcagggaccacgggtgcgggctctcaatgccatgtcattttgctccagcaagtgccattttattttgccctacctcctcgattctagggtttcaacaatggcgctgttccttctctacgaatccgcttcgggctacagcctgttcgaggttcacggcgtcgatgaaatcggccagaacaccgaagcggttcggaactccgtttcggacctcaacaggttcggcaaagtcgttaagcttcgctccttcaaccctttcacttccgctctcgatgctctcaaacagtgcaacgccgtctccgaaggcatattaactgatgagctgaggactgtcttggagaccaacttgcctaaagtgaaggaaggtaagaagtccaagttcagtttaggtgtgtccgatcctaagattggttcccagatatctgaagtgactaagattccttgccaaagtaatgagtttgtgagtgaacttcttcgtggtgtgcgattccattttgatacgtttgttggtgatctcaagtctggagatttggaaaaggcacaacttggtctgggacatagttacagcagggcaaaggtgaagtttaatgttaaccgtgtagacaacatggttattcaagctatcttccttcttgatacacttgacaaggatattaattcattctccatgagagtcagagagtggtattcttggcattttcctgagctggtgaaaattgtaaatgataattatctgtatgccaaagttgcaaaatttattgaggataaggcaaagttggctgaagacacgattccaggcttaactgacatagttggagatgaagataaagcaaaggagattgtggaagctgccaaagcctccatgggacaggatttgtccccagtggacttaatcaatgtccatcaatttgcacagagggtaatggacctatctgagtacagaaagaacttatatgattacctggttgctaaaatgaatgatattgcaccaaatttggccactttaattggtgaagttgttggtgctcgtttgatttcccatgctggtagcctcacaaatttggcaaagtgcccctcttcaactcttcaaattcttggtgcggagaaggctttgttcagggcattaaaaacaagaggaaacactcccaaatatggtttgatattccactcttcttttattggtcgggcatctgccaaaaataagggcagaatggctcgatatcttgcaaacaaatgctcaattgcatcacggattgactgctttgctgaaaggggtactactgtttttggggagaaactgcgtgagcaagttgaggaacgacttgacttttatgacaagggagttgcccctcgcaagaacatagatgtcatgcaggctgctattgaaagtgctgaaaacaaagatacagagatggaaacagaagcacctgccgaagtttcaggcaagaaaaccaaaaagaagaaacaaaaagctgctgctgctgaaggtgatgacatggctgtagatacaaatggtgatgctgtggaggatcataaatcagagaagaagaaaaagaaagaaaagaggaaattggaacaggagatggaggtcgacgatcaggctgaagatgatggtgctaatggggtcacaagtgaacaagaaggaacagtgaaaaagaagaagaataaaaaggatagtaacggagaagctttggaggctggtggagagtctaagaagaagaaaaagaaatcaaaaaagaaggatacggagtaaactatgatgtattgcagctttaactgttgaaatcgaattttttatgttatagttttggacaatgttaaatttgctttgtactttaccagttgctgcaccagtataaactttatgttgacttgtcatttggcatacaaattttgtcctagcaattttccgcataatttcagaaaaaaaaaagtctattgcataatgtttttaatatactatctattttcttaactgtttcgttcatccctctgcgacaatttaagcaattgaaaaaaaagttttattaataaagggaatatttattg

SEQ ID NO: 28237 - DNA, 246 bp, Glycine max
  Clone ID: PAT_MRT3847_12549C.1
atttaacaggcctattatcgtatacttgaatgcctaataatggtttaggaatgccttgacaaaacttgcatgatacgtttcttacaggagatgacattgtgtcgcaacagtggatagcacgagaatattgcactgtctctgctaagagtccgctacacattgtggccaggagcgcgctcttgccgatcctactgatctgaacacatgggatgggcaaatagctataactgagataggatctacgga

SEQ ID NO: 28238 - DNA, 203 bp, Glycine max
  Clone ID: PAT_MRT3847_1254C.1
cccaccctttcgataacttaattaaacgtcttttcttcggtggacccactaatctttagggcggtcttcctctctagcggagccaaccttacaaacgcgagtatccaaacttataactcatatatcgagtgacattaattcggattcacagcccgcgattttacaacgtatgtacttttaaaaccgtagcattaccgagctta

SEQ ID NO: 28239 - DNA, 667 bp, Glycine max
  Clone ID: PAT_MRT3847_125500C.1
cacgcgtccggcaaagttggctgaagacacgattccaggcttaactgacatagttggagatgaagataaagcaaaggagattgtggaagctgccaaagcctccatgggtagaattctcatctttttgggtttaacttttgcttcattctcagtctgaatcttctttctcttgacgttttcaggacaggatttgtccccagtggacttaatcaatgtccatcaatttgcacagagggtaatggacctatctgagtacagaaagaacttatatgattacctggttgctaaaatgaatgatattgcaccaaatttggccactttaattggtgaagttgttggtgctcgtttgattttccatgctggtagcctcacaaatttggcaaagtgcccctcttcaactcttcaaattcttggtgcggagaaggctttgttcagggcattaaaaacaagaggaaacactcccaaatatggtttgatattccactctttttttattggtcgggcatctgccaaaaaatagggcagaatggctcgatatcttgcaaacaaatgctcaattgcatcacggattgactgctttgctgaaggggtactactgtgtttggggagaaactgcgtgagcaaagtgaagaacgacttgacttttatggacaagggagttgccccc

SEQ ID NO: 28240 - DNA, 353 bp, Glycine max
  Clone ID: PAT_MRT3847_125501C.1
gggttccgggggggggtaccgagtaggccgctgcaaatgccattttattttgctctacctcctcacttctagggttcgcagcttgtctctcaaacaatggcgctgttccttctctacgaatccgcttcgggctacaccctgttcgaggttcacggcctcgacgaaatcggccagaacaccgaagcggttcggaactccgtttcggacctcaacaggttcggcaaagtcgttaagcttcgctccttcaaccctttcacttccgctctcgatgctctcaaacagtgcaacgccgtctctgaaggcatattaactgatgagctgaggactgttttggagactaacttgcctaaagt

SEQ ID NO: 28241 - DNA, 237 bp, Glycine max
  Clone ID: PAT_MRT3847_125502C.1
cgtacggatgccttcttcccatggtgagtgagaacagcttctgaagctgaatctacgcagctctaattgaacaggtattcttccaacagaatttggggatcttagatgtgttacggaaattggtctttcacataatcaactcgctggcgtgagtcctgatagacttaggcagctgcaaaccgtgagatccttgagacttgaggataacaaattgactggcgatgtggcatcactttc

SEQ ID NO: 28242 - DNA, 237 bp, Glycine max
  Clone ID: PAT_MRT3847_125503C.1
aattccagctttttacccggggatcctctagagtcgacctgcagagcaaggatgaaactcatgtttcatcgagttgaccctgaagcggtaagtttgcaatatggttttccagtaacatagtatcatctcggtcttgctcttaattctttggaattaggcggtggtaatattttcctccaacttaaaagaaaatttctggatttcatgaagaaaaccttaaattgggtcacgttgaaa

SEQ ID NO: 28243 - DNA, 1018 bp, Glycine max
  Clone ID: PAT_MRT3847_125504C.1
gccggaaaaccggtcgacccagcgtccgaatttttcaaataaatagtaagacatctgtgctgcgaaaaacattgcctatattaatgaggaaagaaagagtgagcgtataattctcacaaaaaacatatactccagagtttagtcatagatcaataatattttgagagggcttatgaaatattaatatcataatacgagaggagaatgataacagggatagatgattgaagaagagaaaaagtagtatataaatagggatggtattagaaatgaatgtcttgtaaaatttagctgtttttagtgagagaggaagacgaggttgtggcttgcgattcatttattcaccaaaataaaataaaacgcattaattcctttatctaatttgcctcaatcagttcagacctgcaacattttggcttttcaactcctttatctgatttgcttattaatagttttggtcttcttgccctgaggacaatgtcaaaaaaattatgattaacgcaattttgtaaatttaaatgaaaaattttctccttttagttccttgattaatgccctaagggcactagtcaacatttgcctaatacttttaattccaaaagtttgaaatcgtatattcacagcatagatgagtttgatggaaacagaaagctcagaagggagtgcaggccttctagagcctcctgatcccgatgttcttgaaattgatcccactaatcgctaaattaggttacaaggcgtttgatgaaatcaatggacttgaagttgcatggagccaagttcagattgatgatgtattaccgacaccaggtggcttagagaggctttactcaggtgcgtctattgaagtcactgaagcacgacagcatagtaactttctacaattcctggattgttgacaagcacagaactcttaacttgattactgagttgttcacctcagggagcctcagaaagtgtgttcactatcccttttaaatgtttttcatttccatctcagagctgtatggacggggta

SEQ ID NO: 28244 - DNA, 307 bp, Glycine max
  Clone ID: PAT_MRT3847_125505C.1
gtccaggtgacgagtatggacgtgaaacaccgacaatacgaaccctgtatgctgctaggcacctatgaccaccaactgtgtggggtacaggatgacattaataacacatgataccaccaatgcctacggtaactgtagacaattctatggggtacgagggcactaataaacatatgaactactggggttatgatgacccatactatgactacggtatgataacccaagacactggaccgtgttccggacctgagccggactcgggctcttgacacacgaaccacgtcaaggaccgcgcgttgagctg

SEQ ID NO: 28245 - DNA, 257 bp, Glycine max
  unsure (1)..(257): unsure at all n locations
  Clone ID: PAT_MRT3847_125506C.1
aaaacaagtagttgagaactaagaagaaggaaatggcttcctcaatgatctcctccccagctgttaccaccgtcaaccgtgccggtgccggcatggttgctccattcaccggcctcaaatccatggctggcttccccacgaggcagancaacaatgacattnccttcnatgctaagcaaaggtgggagagtaacattgnntgcnagtggtggcaacaactggcagaagganntnccggattntttctaantggcaag

SEQ ID NO: 28246 - DNA, 442 bp, Glycine max
  unsure (1)..(442): unsure at all n locations
  Clone ID: PAT_MRT3847_125507C.1
nggnnagatgaagannctnatnaannggttaaaaggannnggaagagnaaaatntnnagaaggtntnanggaaanaaanggnaantgaatngantnaananngngaaagtaaacgtnctnccacntacnaantngacnannagnangnatnncncattgnaantggagagtaagagcaaaaagtgngaanantnnannaacantanagaangtnnnggaannggatanngantnnnccncnatnanccantgatnatatnnntgganaatgatanggancatgtaggannnctnangtagtgnttgngnnaggnntagtgagaanangtngaggggggtnaaatncagnangtgagaacnngagagatnnncntgggnaanagttngnaganagaggaagaaaaaggtnacnaaacaataggtgaggaagnacnggaagngn

SEQ ID NO: 28247 - DNA, 635 bp, Glycine max
  Clone ID: PAT_MRT3847_125508C.1
caggcaatccattctatattccgagggactgcgaccaaattgtctcaactattatcatcaactgaattcagaaatttggctctaagcaggatgggacagtgatctgaaaaatttatgtccaagatgaactgggtgcatcttggtcatttattaagccattcgtgggaaacaaagaatttgtctaatttactcttggcagccccgtttggtctgaatcacgagaattttctccccacacttggtatctcttctacttctatgtcagctatccagtcattgaattcactgatagtattgacatcccctcccctctgagacacacccactctttcagatggatgtttgatgctgttgaagtctcctagtaaacaccacagtctagcaggactaacatttttcagctgcctgacggagtcccataaagcacgcttactctagatgtcacatggagcatatatatttactataaagactctcttattctcctgaatccacattccttccaaaaggctgaaacatcttccattaaccctccgttccactttaaaagcttgttcattccataggcacagtaatcctccagctgtatttattacaggctggtatttcccaactaacttccggcggacgcgtgg

SEQ ID NO: 28248 - DNA, 378 bp, Glycine max
  Clone ID: PAT_MRT3847_125509C.1
cgctctactccttgtttgaggagtctctcagcggccttgccacaatccgcgccttcaactggcagaaagcgctgaacgacagaaactacgaactcctggatcgctcgcagcggcccttctacctcttgtttgctgtccagcgttggctcactcttgttctggatctggtcgtcgctgccattgccgtactgctgatggtgctagtggttacgctccgcggtaccatggctgccggcggtgtcggccttgcgctgctcaacgtgatccagttcagccagaatatcaagctgcttgtgactttctggacaacgctggaaacgcacatcgggtcggtctcccgtatcatgagcttcacagaaacggccgtgcctgaagatc

SEQ ID NO: 28249 - DNA, 1526 bp, Glycine max
  Clone ID: PAT_MRT3847_12550C.1
tttttttttttttttttttttttttaatgaagatgaaattggacaaaagctattcactttgcaactgtatatatagatcaattatgtgttaagcttaattgcatttatgacatgacatgacatgttcttatttacttgtataaaaaaagaagcatatgagaaagacgggaaaaaaagcaaaaggagaaagaatacatttttcaaacagacgtgtcagacataagaaaggatatgattagactgtgacactgcgaagcacaacagtctcaacagtgagtccagggccaaaaccaaatagcacaccccattcaagcccttcaccagtggtgccaagtccattttctattgacttcttcctcatttgatccaagatgaacaacacgcatgcacttgacatgttaccatactcgctgagcacatgtctagtagcttccattttttcaggtttcaagcctaacttagcctcaacttggtccaatattgctggtccaccagggtgtgcaatccaaaagatagagttgtaatcatcaattcccaagggttggaaggcttcaaccaaggccttttggatgttcttcgagatgagtccaggaacatccttgaggagatggaaagtgagtcctacttcgcgaaggtggccatcaatagccccttcactgtctggaaggattgtttgtgcagtccacacaagctcaaacaaaggcttttcagcaggcaaagggtctgatccaacaatgacagcagctgcaccatctccaaacaaggcttgcccaacaaggctatcaagatgggtgtcactcgggccgcgaaatgtgactgctgtgatctctgaacacacgacgagcacacgagcacccgtgttgttttcggccaagtctttcgccagacgaagcaccgtgccaccagcaaagcagccttgttggtacatcatgtaacgcttgacggagggacgaagtcctagcagttttgtgagctgataatcagcaccaggcatgtccacaccactagtggtgcagaagatgagatgagtaatcttggacttgggttgaccccattccttgattgcctttgttgcagcctcttttcccaactttggtacctccacaaccaccatgtcttgccttgcatccaatgaaggtgccatataggcacaaacactcggattctccttcaggatctcttcatttaagtacatgtatcgtttcttaatcattgacttatcacacatgcgcttgaacttttctttgagctcggtcatgtggtcactgttggtgatgcggaaataatagtcaggataggtactctgatccacgcagttgggaggagtggccgtgccaatagccatcacggtggcagggccttctgcacgttgtgccttacgaatctcttcaacactcaccattttcctaattttcaatctctaccaacaactaagcttttttgaaccaaagaattaatgaaactcaagtagtagtagctacgaaagaaaggctatgatatgaatgatggggatatatcgatactat

SEQ ID NO: 28250 - DNA, 188 bp, Glycine max
  Clone ID: PAT_MRT3847_125510C.1
gaacacttctattgttagacttcggcagataaacttttgttttttagtcttgtaattcaagcagcgtgaaatggttggtccacttctattggttggactcgggtgacttctcttttctttttactttttttactgccgatgcgtcaaaggctattgaaacactggcgtgggcaagtgttgtatttttg

SEQ ID NO: 28251 - DNA, 437 bp, Glycine max
  Clone ID: PAT_MRT3847_125511C.1
ccagcagaacattaattaatgttttgttacaacaacaacctttataatggatgttgttcaagaacgcacctagccatgttttattgagcaagtcccaccaaagaacgtatcatggcggaataggacgtttgttttatgtagcagggcaccagaaccattttttttacatatttttctcaaaaaaaaaaaatccacccggtgggaatttaaaaaaccactaccggaccgtggaaagccaaaactgctaaggcgttcgttggtaaaagagactttactagggtttcacaggtaacgtttctctttttagaggctccaagtccagataattaattggggcggttggttcctcaccgggttaggaggcttgcactgccaaaaaagtttgaaaggccccggaacagcctaaaatggttttccgtcacagaaaccctgaataa

SEQ ID NO: 28252 - DNA, 1497 bp, Glycine max
  Clone ID: PAT_MRT3847_125512C.1
cgcgtccggcttgttggtttgcaatggatgctttccttgtataacaacaaattaaatggaattttggcagatgagatgggtcttggcaaaactgtacaggttatggcattaattgcatacttgatggagtttaaaggaaactatggcccacatcttataatagtcccaaatgctgttatggttaactggaagagtgagttgcatacttggttaccatctgtgtcatgcattttttatgctggagggaaggattaccggtcaaaattatattcacaagagattatggctatgaaatttaatgtcctggtgactacttatgagttcatcatgtatgaccgggcaaggctttcaaaaattgattggaagtatatcataattgatgaagcacagagaatgaaggatagagattcagttctagctcgtgatcttgatagatatcgttgtcaaagacgcctgcttctgacaggaacgcctttgcagaatgatttgaaggaactgtggtcgcttttaaatttacttcttccagaggtttttgacaataagaaagcctttaacgattggttctcaaagccatttcaaaaggaaggtcccactcaaaatacagaggatgattggcttgagactgagaaaaaagttatcattatccaccgtcttcatcagattcttgagcctttcatgctcaggcgtcgtgttgaagatgttgagggttcactaccaccaaaggtctctatagttttacgatgtaagatgtcagctgtccagagtgccatttatgactgggtcaaatcaactggtacccttcgtcttgatcctgagggtgagaacagtaagattcaaaagaatcctcattaccaggcaaaagagtacaagactttaaataacagatgtatggagctacgtaaaacttgcaatcatccatctctgaattacccattacttggtgaattatctacaaattcaattgtaaaatcttgtgggaaattgtggatcctggataggatccttataaagcttcaaagaactggtcatcgggttttgctgtttagtaccatgacaaaacttctagacctcttggaagactacctgagacttcgccaaaatgtaaactaattaatggatgcaatgcctaatttggatgacaatgcacaccaataataaaaaataatagccctgtaccttcaaggagcatcgccttgccatccaaactacatggatctccaaagtcaagccgtctgaattgcatttctgtgccttcacaagatgctggtgaccactccaaagaaagcagggaaggaaaacctatcaatccaagtggatcttcatcacatggtactaagatgactgaaattatccagagaaggtgcaaaaatgttttttgcaagctccaaaagagaattgacaaggaaggccatgaaattgtgcctttgttaatggaattgcggaagaggattgaaaaatctggatctggaaacatctctgtagatctcgcaaagattg

SEQ ID NO: 28253 - DNA, 1009 bp, Glycine max
  Clone ID: PAT_MRT3847_125513C.1
gcggctccgagaggtcgtcggcagggaagtccctatccaccatatgcaatgatagcagtcccgtatttatgaaaggcccatcaactattgcacatttgtactctgatggcaaggcaagcgcttctcctctttgtgttctggctatgcttcttggcaagagttagatcggacgaggattgcgtgtacacggtgtacgttcggacgggttcgatcatcaagggaggcaccgattcagtaattggtctgaagctatacgacaagtccggctacggcatatacatcaccaacctcgaggcatggggcgggttaatggatccgggtcacaactactacgagcggggcaacctcgacatattcagtggtagaggcccttgcttggaagcacccgtttgcgaggccaacctaacttctgacgggtcggggccccatcacggctggtacgttaattacgtcgaggtcaccaccactggggtccacgcgccttgttctcagcagcagttcacctttgagcagtggctcgccaccgatacgtcgccgtatcagctctgggctgtcaggaacaactgtccaaacaacttgggcccggcccagctcaccgatgttgccatccctcgggctgggcctgctttctctattctggaatccaccgtccgcgtctaggttatgttggttgctctacttgagtgtcggtagtgttgttgggaaacatatgttttttgggacataatacttttggtgaggtttgtacttgcgtcctccttaagcttgttctgtctcgctagaacagaattgtttactgggctcatgagtctagactctagaagttccaatttatatatttatcctttattattgaataaaggaggatgcggtttggacttttttgtgttggtgttatgtttaagtaaatgataggtgcataatgtgttgtgtgaccacaagcatcttataaaaaaagaaaaaaatgattatactttttatttgaaattaaaaaaaaaaaaaaataatt

SEQ ID NO: 28254 - DNA, 2210 bp, Glycine max
  Clone ID: PAT_MRT3847_125514C.1
gaagacgacagaaggggatctccattccttccaatggcttcaatctctcacttcagaacctccgcgaattccttcctctcccaatacgaacctctctctctgcttctcgctcctctcctctctctcctcttcgctcacgctctccgctccttcttccacctcctctcccagaacggactcaaagccacgctcctagggtttctcattaactccctcaaattggtccctggcgtgaagggatacatagatgccgaaaaacaaaaggttgtggataagttgcaatctgatggtaaatctaaaagagaaggttggaaaactgagttgccaagcacaggattagggacatctgtccttgagaaaatgagagaggagaaaataaatgatgcggtttggcaaggcaaatgctctggtacatctacattggaggaagtgaatctgatggacatttttctctgataaatgaggcatgttcaatgtttgctcataccaatcccctgcatttggatgttttcaagagtgttgcacgctttgaggcagaagtggttgcaatgacagcagcacttcttggaagtaaggaaaagagttctggacgacaaatatgtggcaacatgacgtcaggcgggactgaaagtatattattagctgtcaagtcatctcgtgactatatgaaatctaagaaaggaattacaagacctgaaatgattattcccgagtctgggcactcggcatatgacaaggctgcacagtattttaatatcaaactatggcgtgtaccagttaacaagaatttccaagctgatgtgaaagcgatccgacgtcatattaacaaaaataccatcttgattgttggatctgctccagggtttcctcatggagtaattgaccccattgaaataatttggcaatttcttccgtaggaacttggtcatctggcatcaagctttggtatttgtttccatgtggacctttgccttggtggctttgtattaccatttgctcgtgagcttgggtaccacattccaccttttgatttttctgttaaaggggtttcttcaatatcagtggatgtacataaatacggtttagctcccaaaggaactagtgtagttctttacagaaaccatgaaatcagaaagcatcaatttgttgctgttaccgagtggtctggtgggctgtatgtatctccaaccatagctggaagcaggcctggaagtcttattgccggtgcatgggcagcgatgatatctctagggaaagaaggttacttgaaaaatacaaaagaaattatggaagggtcaagaagaatacagcaaggcatagaggagattgctgagttgtttattgttggaaaacccgacatgacgatagtggcttttggatccgatgttctggatatattcgaagtcaatgatgttatgtcatccaaagggtggcatttgaatgcattacagcgacccaacagcatccatatctgtgtgacactgcaacatgtgccaattgttgaagactttctcaatgatttgaaggaatctgtgaaaactgtgaaagcaaatccaggtccaataagtggaggcctagcacctatatatggcgccgcagggaagatgccagatagaggcatggtccaggaattgctggtagattatatggacggtacctgctaatggcgttcgacatttctaccagacttttctggcgacatgtactgtagtggacctttacttgataatattccattttatagtgcattctttcatattggggagaaaactgaagactaataataaggccttgtttgtttgtgtgtgtgccattgtacgtttaagaggccacgttgttttagattcacatctgagcattattatcatggatgggtggggggggagttcgttgctatttcacaatcttgctcttgacattgaggacagtaatatttctgaaacccccataaccaaaaataatgcacatgtgattgattgtacaaaaacaaaatgtacgtgtgattgataatcatcataaatataagggtgaaaatcagggttacagaccagtgtaatgcttatccatcagtccacaataagagctgggcatggataggaacatttttgtcgtgatgataaaaaaatttggagggaatcttactttgttctccttgatgagtaattgataggaacagtatttttgtcgtgatgataaaaaaatttggaggg

SEQ ID NO: 28255 - DNA, 268 bp, Glycine max
  unsure (1)..(268): unsure at all n locations
  Clone ID: PAT_MRT3847_125515C.1
atnnntataatttttcagttcatcgccttacacattcaattggtgtgaaagcagtgattgttgtagctagctaaatattattcatgacaatatgtacaaacacataaatttatgtcaatgtcacaagatccagttacgttggttgatctgtaatgtactttgcaatgagcgtcgcaaggatcgttctttatgtcacaataatcattacgcaatgttaaataatcacaatgtacatattcaggtaccacagccatgtgcacttgatttc

SEQ ID NO: 28256 - DNA, 437 bp, Glycine max
  unsure (1)..(437): unsure at all n locations
  Clone ID: PAT_MRT3847_125516C.1
ccccgcaggcacccggnnccggaaacgaccgacgcgacccacatttccggataggaaaggagaacaaggaaagacgcnggagggagangcagacaggaaccgcacggagcgcgcgggcagaagncggccgcaagggggggcaaaaaccacagagggcaggacgaacacaagaacacggcaggagccaanaagggagacagaaaaagnaaagccaagggaccaaaacccngcaacaaaagccaaagaccaagagaaaaccaggacaggcgaaacncgacaccgagcagcaanaaacacaccgaacaaagcgcaacaaaaaacgagagaactcgaagctaggcancggcgaacggaggccgnancagagaacgcacaacagaaggagcgcagacgaacagaaggcgacagcggcgaaaagggacgcagggcgggagaca

SEQ ID NO: 28257 - DNA, 767 bp, Glycine max
  Clone ID: PAT_MRT3847_125517C.1
atttatattaaccacttgtgaccaagtccggaattccctgtccgacccacgcgtccgatttattgaaaaagaaattcatgtgcgtattgctttcaacttgaagtagctagaaagaaagagccacataattcacaattcatagatagagaggctatggctggtcttcaaagatctgcagtgtccttcaggaggcagggttcatcaggcttcgtttgggacgataggttcttacaagaggaattgaacaaagtcaaggaagatcacaacaacaacaacaaccacgaccacgacaacgatgacggcggtgaaattaaagagcttcaagttcaaacaacgccgcccctccagagaatccgctccaacggcggagcacgcggctaccgcactggaaaagtttcgccggcgattgagccaccgtctcccaggctctctgcatgtggcttctgcgccgcctttggaaaagcaggggacaacaagcatcgaccaaggtagagagacgaagagagaatattccggccaggtttctactccttgatgtaatgttttacttttagctttgtaggtaggcccggattagttgaattcatgctaagaacataatcatcaggacttgtctatttctcttttctttttggtgttcaaattgtcttatatcaatagtaattagctggtaaagatgttttcttctggttcggttcagtagaattaattgttgtttgtgggaaaggggtattgagtataagttgatctttatacaaaaaaaaaaa

SEQ ID NO: 28258 - DNA, 518 bp, Glycine max
  Clone ID: PAT_MRT3847_125518C.1
gaagatttacttgaagtagatagaaagaggctatggctggtcttcaaagatctgcagtgtccttcaggaggcagggttcatcaggcttcgtttgggacgataggttcttatcagaggaattgaacaaagtcaaagaagatcagaacaacaacaacgatggcggccccgagattaaagagcttcatcaagttcaaacaacgccgccaccggagagaacccgctccaacggcggagcacggggttaccgcaccggaaaagtttcgccggcaattgagccaccgtctcccaggctctctgcatgcggcttctgcgccgcctttgggaaagcaggggacaacaagccccaacggactacacccgccaaacatcgaccaaggtagacggtggttcaggtgacggagacagaatattccggccaggtttctatgtaatgtttacttctaggtttgtaggtaggcccggatgagttgaattcatgttacgaacataatcatgaccacctctctatttctctctat

SEQ ID NO: 28259 - DNA, 819 bp, Glycine max
  unsure (1)..(819): unsure at all n locations
  Clone ID: PAT_MRT3847_125519C.1
gcgaaaactgccgctccttcggcgggcggagagacacccctggtctttgcttctttcctctttccagcctcgtctttgttgactttccctaattgtgcatgcgggtatgcagggatttgtggcgcaagtggaggcacctttgctttcccaggttcaggtcgctcacggttttcgaggccagatgtctgtagggtattacccatcggacttccgtttgatcttgggatgtcgggtaacagcgcgcgatgggtattatcggtgttgtcccttccgtctccggggaggctctgcattccttcgtcgtcggggttgtttggctggcaaaagaaagggtgacctgccggcaccgaatcaaactcagcgtcggtatcgaggtcatcggagtgtatgtcctccgacaactccattgccatgcgaaatcgattagcgcgcgttcttgcatcagctgaagcttcttcaatgatagacaccatgtggatctcccctccaatcgttacttgcactgtgtggtgaaaaaacgggctccatggagttctgttgagaactcgtgccctgtctagtcttctgaaatcctcgacatcatcgtcaacttcgacaagctccccaaccgcaactactatcttccatatactccctatgtcccacacctctaggggaattccccagcactgagcccatatcactctgtaacctggccttgtcctctggttccacttttctaacgagtggaacggagatgtgccatgctgngcttcatctttgattatttcctctgctttggagtctgaaagtccaagaaagagtatcgtcgcctatata

SEQ ID NO: 28260 - DNA, 814 bp, Glycine max
  Clone ID: PAT_MRT3847_12551C.1
ggaggacaaaattttgaaagttggagaagagctatggagagaaactttgccattacatggtggctcttgcttttatcaattacagggtctaaaaccccacacgtggtatgaagtgaagatatcatatccagcttctatacctgctagcttttccatacaactgaagagaaacaagtcagatgtggtgctgaacaataacaggagattgctcaacactgaaaagctaatttttaagaccaatagcaatcaggatgaattcctgttagtattagtaactgtggagccagaggggtttcctgcaaaactgcatgtagcagagaggcaatttattatcttcaatatagtatgtgatgaactattattaggcataccccacaaagcttggtgggtagtggcactggctttactctgtctaggaattgctttcatcgtgccttcttttcttccattgcatttgctaccaaagaaccaagtcttgaggacagatgattatgtttctaaaatttcttgataagcctccaagaagacatatttttttaaggcaaatgttagttgttaattgttagttttatgaacctccaagaagataaagtgattgtataattgtttgtctcaaatgcggtgaggcatgcttgcatatgacgttggctttgtcaatagaattttggaagctaccatgtggctgctaattttccaagttttctaatagcatgtttggttttgcgtttcggatgtgattttcaggaaccaatagcttctacattccatatgtgattctttcgtctttaatgagtttccaaacacgcattaattc

SEQ ID NO: 28261 - DNA, 430 bp, Glycine max
  Clone ID: PAT_MRT3847_125520C.1
ttaaactaaaaattgtctctgatttgaaaaaatgtccaatgacctataaaaagaaatgcagttttgaagaaagaaaaaaaacagtacattcacaatgtaagagtatattccaaaaaattacaactagattttacctgaacaataacattatcaacgtcccaaaatataaatagtacatttcacaatgtaaacatatttgctgaagcaattatataccatgaacatacgaatctgctttgttccatccttgtcctgaacggaaatgacaatctttgctctttcagaatgctctgtacttttctcatctacaccaaccacagaagactgcaacgaattattaatttccaattttgatgactcttaacatcttttacaattcttttgctgattcagcaaaccaggcaagttcctgcttctttaatctcaattt

SEQ ID NO: 28262 - DNA, 534 bp, Glycine max
  unsure (1)..(534): unsure at all n locations
  Clone ID: PAT_MRT3847_125521C.1
tgcaggccctttttagcagcagaagggangagcnaaagttgagaactgaggtactcaaatcaaactccaaaaccctatccctcagttgatggccatcaagaacaacaccagttaccgcgaattcacctccatcaacaaatgccaaacatagcacaccttttctcacttcaaccaaggaattgtgggcacatatgccataactcactttcctaaatcgaccatccatggcaagcttgatatctggcacagcctttccatccttgatggtattggcatcgaagcactctccaaaagggtgcacggatttcaccctctttatgtttttggccggtgctgcctccacgaaatctctaacaaagggcttgtagatggaatggtgcaacacagtgtaaggactcatggtgctaataacactgcccccgtttccatttcattgcggaacaaaaaagaagcccaaacttaacaggtttggcggtgatagtgatagaagtgacatgaatggagtattcggggctagaaaagccaccgaatcca

SEQ ID NO: 28263 - DNA, 228 bp, Glycine max
  Clone ID: PAT_MRT3847_125522C.1
tcgagtatatggacgaagaacaacagagtgggccaggtccttaaatccaagcctaaaggcagaagataggaaaatggaactattgactataaatgccttctcttgagagacctaactatctcactggtaaaactgattaacctgagtatggtgaaaaactcaccctttatagctataattacattcaagatggagatttgaactcctcttgtaatttgatccctcaca

SEQ ID NO: 28264 - DNA, 283 bp, Glycine max
  unsure (1)..(283): unsure at all n locations
  Clone ID: PAT_MRT3847_125523C.1
aattccctggtcgttttacgcgtccgcaataatcaccgaagtaggttaggaatcacnagangggttttaaccgactctagtctgctcttaaccagaaggtttgctaatgagaaagaaaatcccttgttgtgggcttctacataccatgcaggggagtgtttggaccctgtggctgtttcattagcaaaggcctagaatggatgcaaaaacgccttgctggtgtggcacatttagttcccaagggagatcttgcttgctggtgtcaatctcttgcaatttttgg

SEQ ID NO: 28265 - DNA, 407 bp, Glycine max
  Clone ID: PAT_MRT3847_125524C.1
tacggctgcgaggacgacagaagggctatttgagatttcatgcctaaattgaaaatcaaacctcttggttccttttgtggttataccaacaactttgagttacatgcacttaaatgtcttttatatatgtttcaatattatctgtccatctaattttattagatcgcattttttcttcgtactataatttttagagtaaggatagaggaagagttttgcactttctacggaaacaaatgacatttatcattttcaagtcttccaagaactcaaaaatagattcacattaattaatcttttgtgggctcttcaaagtaaggatgtttgactatttcatctacgaattttcctctcaaaaagtgtgggagtgcatgatattccaaggtctatcctttcattagttgatg

SEQ ID NO: 28266 - DNA, 653 bp, Glycine max
  Clone ID: PAT_MRT3847_125525C.1
aggatatatggctccagaggttctggatggaaaaccttacaacaggagatgtgatgtctatagctttggcatttgcttgtgggaaatttattgctgtgatatgccttatccagatctaagctttgctgacgtgtcatctgcagttgttcgccagaatttacgaccagatattccgagatgttgtccaagcgccttggcaaatatcatgcggaaatgctgggatgcaaatccaaacaagcgtccagaaatggaagaggtggtgaggatgctggaagcacttgatactagcaaaggtggtggtatgatacctgaagatcagagttcaggttgcttttgttttgccccaacccgtggtccctaatccgtgaacccaacataacatcattttgttgcgtgttcaagagattatatcaagcactgcaactggcaattgatattttatggttttgccagttcacagctcaatttcctttccttatggccagaatattgtgaaaacaaaggaagggaattgtattttattttttaaatttttggctaaaggagcgatttcattgcttcttacatattgtatctagtactgaaaactggtttcttttgagcatgaaaatgggttattaattaatctctaatcagagttaattcttaccaca

SEQ ID NO: 28267 - DNA, 2669 bp, Glycine max
  Clone ID: PAT_MRT3847_125526C.1
gaaaacaactcaaacaaacaaggtaatccatgtagttgcctcccgttcttcctcctattttgaaacattctctccttctctctcctccaccacattttagggaacacccacgcttctttctgcgaccctcatagctgttttttatttttggggttgtttatttgctggtttcgttttgtttttttgtggctttacccttcaaaatcgctcctttaccaaaaatttgagcgatgaattgttgggatcaggttcctgttggcatctcagagttggtgatgacaacctccgcaatgctcattgcatcaaaaggaaagtcaatttcgtagacatgatataatgtagagaagaaggcacgctcttttgagggtgctccgtgctcctatcagtttcaatatttattaaatttcaaatttttttttgctaattagaattttcttgctgcttatataattgttttaacatcgttggggttgtacaaaaaattggttttggaatttgaagttgtgagtgctgaagatggattcggaaggcgagggtgttaggacaccaaagatgggagtggaagcagaaggggctctgaattcaaagatgaaaggtgctggaaacgtgagcagtaaggatatgattttcagagctgataagattgatctcaagagtttggatgcacagctggaaaagcacttgagcagggtttggtcgaggagcattgagactaaacggcctagagaagagtgggagattgatttggccaaattggatctgcgatatgttgtggctcatggggcatatggtactgtatacaggggtacatatgatacccaagacgttgcagtgaaagtgttggactggggtgaggatggtgtagctactgctgctgaaactgctgctttgcgggcatcttttaggcaggaggttgctgtctggcaaaaacttgaccatccaaatgtgacaaaatttgttggagcttcaatgggtacttcaaatcttaagattccgccaaaaaaccctatgaatgccgatgaagagtcccttccttctagggcatgctgtgttattgttgagtttgtctctggtgggacactaaagcaatatttgtttaaaagtaggaggaggaaacttgcttataagattgtgattcagctggctttggaccttgctagggggtatgtcccatttttaacatctctacaattaccaactgcatatcttctactaatataaataatttgttttccccaatatgtgcagtcttaattatctacattcaaagaagattgttcaccgagacgttaagacagagaatatgttactagatactagtcggaatctaaaaatagctgattttggagttgctcgggttgaagctatgaatccaagtgacatgactggtgaaactggaaccctaggatatatggctccagaggtaagtgtttccatgggatcgcctccctattctattagtcctttattatttcaaatacaacttgcaacctttcaagttactttggtataatgggaatacaaaggtttggacctgtgacctcataaaaattatgtaaacccctcagcactagcccaattctagtggcttatggtgctatttctattactatttgtgtgcatacattcagggttgttctgaaacagtcacttccagttattaactttaatcttaagatcacgccacatgtaggttctggatggaaaaccttacaacaggagatgtgatgtctatagctttggcatttgcttgtgggaaatttattgctgtgatatgccttatccagatctaagctttgctgacgtgtcatctgcagttgttcgccaggtcagttcacgcgacaaactattcatatatggaaacacacttccatatcatgtttgcctatatgttgcccatgatacatacatgaattttgtgttcttgcacagaatttacgaccagatattccgagatgttgtccaagcgccttggcaaatatcatgcggaaatgctgggatgcaaatccaaacaagcgtccagaaatggaagaggtggtgaggatgctggaagcacttgatactagcaaaggtggtggtatgatacctgaagatcagagttcaggttgcttttgttttgccccaacccgtggtccctaatccgtgaacccaacataacatcattttgttgcgtgttcaagagattatatcaagcactgcaactggcaattgatattttatggttttgccagttcacagctcaatttcctttccttatggccagaatattgtgaaaacaaaggaagggaattgtattttattttttaaatttttggctaaaggagcgatttcattgcttcttacatattgtatctagtactgaaaactggtttcttttgagcatgaaaatgggttattaattataatctctaatcaaagtttccccactactactcgtgcctggctggctacctggagtactgagtttactttggttctttatccctgtttcggtggggaactcaatctggcaatttctgttttctctgagggactatgtgtattctgattgggagaggtctaagattttctaagaacttttagtccaatttttttttagagaaacacattccctaagtgtttggtagaggtctaattaaattaacctttttcattttttttccctacac

SEQ ID NO: 28268 - DNA, 334 bp, Glycine max
  Clone ID: PAT_MRT3847_125527C.1
cccttttgttgtttttcctctagacaacgagcattggacacaatgaacacttataagtatgtatgagcattttattaatgttttgcctacagtatacactgacttgagtgaacatactatccagtcaaaccatttctctgtgacagaacacttcatgacttgagacttgtatcatctgcattcccttcccagtgttttctttttctataacctctctccaattaatgttacttttacataataaaatgtctcattcttacatttttttactaatttttgatccatatttttaagtattttaaccgtttctttaatactaaattcattcatctat

SEQ ID NO: 28269 - DNA, 129 bp, Glycine max
  Clone ID: PAT_MRT3847_125528C.1
gctaggcagtcgtaacgtttgcttaagatgagaaagagcaccacttggtcagtctcttaaacgtccgaagagtgcggcgatcgagtccggtcctaggacgcgggagagggcttagcagcagggcgaaca

SEQ ID NO: 28270 - DNA, 414 bp, Glycine max
  Clone ID: PAT_MRT3847_125529C.1
accatgctgattagccaccggtgactagcttcgtgtccgctagaaggcaccttttgaagacgcagaaacgtgtgaagctagaagctctcagacctcggagactgaaggttccccttgagacacaaacggaggactctgatgttgatccgaatgtctctgatgcataacctgcttgtgatgaaattggcattgatattttaattgaaatctatgccaatgaagaggatacagaaccaactgccaccgagagtgtttcttcactgttgtggtttcaaaaattcggcgctgtcttgcattccatgagtgctatggaaaatcaaaattttggtggcaattccttgtgatgcccgcttaaaagactggcaaggaggaccttatctattaaagacacttgactctgtacaacctcctact

SEQ ID NO: 28271 - DNA, 1757 bp, Glycine max
  Clone ID: PAT_MRT3847_12552C.1
ggatagatcaattatgtataagcttaatagcattaataacacgacttgttcttatttactggtatacaaaaagaagcatttgatgaaatcagggggaaaattcaaaagacaaagaatacatttttcaaactgaacagcaaagaatacataagaaaagagaaagatttgctgtcttaagaaaatactattactgattagacactgactcaattactgattagacagtgacactgcggagcacaacagtctcaacggtgagtccagggccgaaaccaaatagcacaccccagtcaaggccttcaccggttgtgccaagtccattttctattgatttcttcctcatttgatccaagatgaatagcacacatgcacttgacatgttaccatactcgctgagcacatgtctagtagcttccattttttcaggcttcaagcctaacttagcctcaacttggtccaaaattgcgggtccaccagggtgtgcaatccagaagatagaattgtaatcggagattcccaagggttggaaggcttcaaccaaggccttctcaatattcttagagatgagtccaggaacatccttgaggagatggaaagtgagtccaacttcgcgaaggtggccatcaatagccccttcactgtctggaaggattgtttgggcagtccagataagctgaaacaaaggcttttcaactggtaaggggtctgatccaacaatgacagcggctgcaccatctccaaacaaggcttgacccacaaggctatcaagatgggtgtcagttgggccgcggaatgtgactgcggtgatctcagaacaaacgacaagcacgcgagcacccttgttgttttcagcgaggtctttggccaaacgaagcaccgtgccaccggcaaagcagccttgttggtacatcatgtaacgcttgacggagggacgaaggcctaatagtttagtgagctgataatcagcaccaggcatgtcgacaccactagtggtgcaaaagatgagatgggtaatcttggacttgggttgaccccattccttgattgccttagttgcagcctcttttcccaactttggtacctccacaaccaccatgtcttgccttgcatccaacgaaggtgccatatatgcacaaacactgggattctccttcaggatctcttcgtttaagtacatgtatagcttcttaatcatcgacttatcacacatgcgcttgaacttttctttgagctcagtcatgtgctcactgttggtgatgcggaaataatagtcaggataagtactctgatcgacgcagtttggaggagtggcagtgccgatggccatgacggtggcagggccttctgcacgttgtgccttacggattgcttcaacactcaccattgttataattttatgaatcaactaatgaagctagcttgcaccaaagaatgaaactaattagtaattaaggagtagctagctacgaaagcatatatcacctgctttccgtgtgaaggaaggagatcacgttattattggtcaatgcaggccactttctaagactgtgaggttcaatgtgttgaaagtgatcccagctggatcttctagcggtgcaaagaaggcttttactggaatgtgagctttgatttccagtttttattgaagataaatgttaccttattaattattatatctgatttcttttctggatgataacaaatatgaaaaccttgtcaattttggattttctttgaggtttaaaaaaaaaaaaaaa

SEQ ID NO: 28272 - DNA, 1091 bp, Glycine max
  Clone ID: PAT_MRT3847_125530C.1
ctcaaaaactatatatacgtggaagcagataaagaagcccatgtcagagaggcttgcaaaggtctgcgcaatatatttggccaaaaaataacacttgttccaatcagagaaatgactgatgttttgtctgttgaaagcaaagctattgatcttgctagagatacttgggtcagaatgaaaatcgggacatataaaggggaccttgccaaagtagtggatgttgataacgtgcggcagagggttactgtcaaattaattccaaggatagacttacaggctcttgcaaacaaattggaaggtagagaagttgtgaaaaagaaggcttttgttcctcctcctcgttttatgaatgttgatgaagcaagggaactgcatatccgtgtggagcatagacgcgatgcctatggggaacgatttgatgcaattggaggcatgatgttcaaagatggattcttatacaaaactgtatcgataaaatccattagtgctcagaacatcaaacctacttttgatgagcttgaaaaatttcgtaaaccaggcgaaagtggagatggtgacgtagctagtctgtcaactttgtttgcaaacaggaagaaaggccattttatgaacggctcgagtgttattgttgttaagggtgatttaaagaacttgaaggggaaggtagagaaagttgatgaagataatgttcatataagaccagaaatggaggatcttccaaaaactattgctgtaaatgaaaaggaactttgtaaatattttgaacctggaaaccacgttaaggtagtttctggtgctcaagagggggctacaggcatggttgtgaaggtcgagcagcatgtgttgatcttaatatctgatacaacaaaagagcatatccgtgtctttgcagatgatgttgtagaaagttcagaagtaaccactggagttacaagaattggggactatgaacttcgtgatcttgtattgctagataataatagctttggtgtgataatacgtgttgaaagtgaggcatttcaggttcttaaggggattcctgacagacctgaagttgtgcttgttaaattaagagagatcaaatgtaagat

SEQ ID NO: 28273 - DNA, 4369 bp, Glycine max
  Clone ID: PAT_MRT3847_125531C.1
gttggtaactcgtgtgtgtgttgatgttaccataaatctgttgttgtaggctttgcacgcatagcattagcagcaacgccaccaccaacactcacatcaagaaaacctagggtttgggtttgcggcatgagtcgccgtggcatggacgacgacgatgaggaggagtacgaggaggaggacgagcaggtcgccgacttcgacgacgaggaggaggaggacaaccaccgaggacgcgggggtggtggcggcaggaagaggagaagatctggattcattgacgacgacgccgaagaggtcgatgaggacgaggacgaggaggacgacgatgacgaggatttcgatggacggggtggtggtggcggtcggaggcgccagtacaagaaggtttccgcttctaatttcttcgacgaagaggccgtggtggatagtgatgaggaagaggaagaagaggagggagaagacgacttcatcgttgaaggtggagcggatctgccagaagaagatgatgggagaaagatgcgtagtagccgtatgctgccacaccaccaagaggatcatgaagatcttgaagctatggccagaagcatccaggaacgatatggaaggcgcctaacagattatgatgaagaaacaacagacgtagagcaacaagcccttttgccatctgtgagagatccaaagctgtggatggtcaaatgtgcaattggtcgtgagagggaaacagctgtttgcctcatgcaaaagtacatagataaggggtctgaattgcaaatcagatcagctattgctctcgatcatctcaaaaactatatatacgtggaagcaggtgtgagataaagaagcccatgtcagagaggcttgcaaaggtctacgcaatatatttgccgaaaaaataacacttgttccaatcagagaaatgactgatgttttgtctgttgaataaaaagaaatagatgtgcaggataggtttaagaatacggtgtcgtcaaaggatgttgtgcggatcattgctggtttcgtgcaaaggaaagcagggtcctgtggagcacatatatagaggaattcttgttcatctttgatcgccatcatcttgaacatgcaggctttatatgtgctaaggcccaatcatgtgtagctgtgggaggttcacgctccagtggtgacagaaatggggatgcctactcaagatttgccagtcttagaagtccaacggctgcgagaagacgacagaaggggttttctcgaggagggccaatggattctggagggagacataggggtggaaggggccatgatagtttggctgggacaaccgttaaagtacgccaaggtccctataaaggttaccgtgggcgtgttatagatgttaaaggcacaacagttcgtgttgagttggaatcccaaatgaaggttgtgacagttgaccggaaccatatatctgacaatgtggctgtaaccccatatcgtgatacatctcgctatggaatgggaagtgaaacaccaatgcatccttctcgaactcccttacatccatatatgactccaatgagagatcctggagcaacacctattcatgatggaatgagaacacctatgcgtgacccagcatggaatccttatactccaatgagtcctccaggggataactgggaagatggaaatccaggctcttgggcagccagtccacagtatcagcctggaagccctccttcacggccatatgaagccccaactcctggtgctggttgggctagcactcctggtggaaattatagtgaagctggaacaccgcgggacagttctgcctatgccaatgctccaagcccatatttaccatcaacacctggtggacagcctatgacaccgagttcagcatcttatcttcctggcacccctggaggacagcctatgactccaggcacaggtggtatggacatgatgtctccagttttaggtggggaaaacgaagggccttggtttatcccagatatattggtcaacgtacacagggctggagaggaatctgttggagttataagagaggttctcccggatggctcttacagggtagctcttggatctagtggcaatggtgaagcgattacagcccttcctaatgaaatggaggctgtggtaccaagaaaatcagacaaaataaagattatgggtggggcattgcgtggtgccaccggcaaattgattggtgtagatggtactgatggaattgtaaaggtagatgacacattggatgtgaagattttagacttagttattttggcaaaattagctcaaccatgatataagctttatgtagagaaattactttaatgccatatcttttcttgtgtcaactgttgctagcggttttgcctctctgtctttctttttataaaacgctccctgcacacctttgtcctccctggtggccgggccccacggctggttcttatttgctgctaccacatacccccatatccgtttgttttccttacattagggtaacccatcagaagtaactactggagttacaagaattggggactatgaacttcgcgatcttgtattgctagataataatagctttggtgtgataatacgtgtagaaagtgaggcatttcaggttcttaaggggattcctgacagacctgaagttgtgcttattaaattaagagagatcaaatgcaagatagataagaaaataagtgtgcaggataggtttaagaatacagtatcgtcaaaggatgttgtgcggatcgttgatggtccctgcaaaggaaaacaaggtcctgtggagcacatatataggggaatcttgttcatctttgatcgccatcatcttgaacacgcaggctttatatgtgctaaggcccaatcgtgtgtagttgtgggaggttcacgctccagtggtgaaagaaatggtgatgcctactcaagatttgccagtcttagaagtccaagtcgtattccaccgtccccgaggaggttttctcgaggagggccaatggattctggagggagacataggggtggaaggggccatgatagtttggctgggacaaccgttaaagtacgccaaggtccctataaaggttaccgtgggcgtgttatagatgttaaaggcacaacagttcgtgttgagttggaatcccaaatgaaggttgtgacagttgaccggaaccatatatctgacaatgtggctgtaaccccatatcgtgatacatctcgctatggaatgggaagtgaaacaccaatgcatccttctcgaactcccttacatccatatatgactccaatgagagatcctggagcaacacctattcatgatggaatgagaacacctatgcatagccgagcatggaatccttatactccaatgagtcctccaagggataactgggaagatggaaatccaggctcttggggagccagtccacagtatcagcctggaagccctccttcacggccatatgaagccccaactcctggtgctggttgggctagcactcccggtggaaattatagtgaagctggaacaccgcgggacagttctgcctatgccaatgctccaagcccatatttaccatcaacacctggtggacagcctatgacaccaagttcagcatcttatcttcctggcacccctggaggacagcctatgactccaggcacaggtggtatggacatgatgtctccagttttaggtggggaaaacgaagggccatggtttatcccagatatattggtcaacgtacacagggctggagaggaatctattggagttataagagaggctctcccggatggctcttacagggtaggtcttggatcaagtggtaatggtgaaacgattacagcccttcctaatgaaatggaggctgtggtaccaagaaaatcagacaaaataaagattatgggtggggcattgcgtggtgcaaccggcaagttgattggtgtagatggtacggatggaattgtaaaggtagatgacacattggatgtgaagattttagacttagttattttggcaaaattggctcaaccatgatataaaaagcttatgtagagaaattactttaatgccatatcttttctcgtgtcaactgttgctaggggttttgtctgtctataattcgctccctgcacctttgtccgcccaagtgacaagttccaactgcagataaacatttgcttctaacaaataccactataaattatcgttttccttacattagggtaaccggtaagaatagggatggaatcttgagaattgttgttatcttcacaaatatggaactgagcatgggtactttttcaaatgtggatatgaagatgagcaatgtagtattctctattcattatcaaaaaaaaa

SEQ ID NO: 28274 - DNA, 1960 bp, Glycine max
  Clone ID: PAT_MRT3847_125532C.1
gcattcgttcctagccccgaaaacagcattgcaactgctctcaactgtgtggtttggaagtatactcttgcaccataaacaaaattaagcataaaaaatcgttcttgacttcttcttaacttccatcgtccatggcggtttcggggttgagaagcggtggtttgcctctcttccaccatcaccaccaccaccaccaccttcgcttccttcaatcccctccttcctttgccaagctcagttttcttggctccaagtcgtcgaagaaggggttcacagtcttctcccgctatgcgcaagcgcgtgaccttttctcctcgcgtagattccaagatagcatggagaagctgccgaacctggtggaggacattgtgcagacatccttaaacactggtccaaggggtgtcctgaggttggctcaaggtgttcaggccttccttggggttggtcaggagtggttaactgatgtctctaagtcagcaaattcatttgctgggttaccgactgaactgcagcttggtttactctcccccttttatttgaggaggttgtttgagcgcatgggtgcaacctatatcaaattgggtcagttcatagcatcagcgccaacgctgtttccacctgagtatgtacaagaattccaaaattgttttgatagagctcctcctgttccttttgaggaaattgaatctatattgcgcaaggaattaggaaagccattagaaagtgtttatgaatacattgacccaacacccattgcttctgcgtctatagcacaggttcatggagcaaggctaaaaggctctagggaggatgtggttataaaggtcttaaaacccggaatagaggacatattagtggcagatcttaattttgtttatgttgttgctaggatattggagttcttgagtcctgaaataagccgaacatcactggttggtattgtcaaagatatacgtgagtctatgcttgaagaagttgacttttacaaggaggctgcaaatattgaggcttttaggagatatttagaaacaatgggacttactgggaatgcaacagctccaaaagtgtatcgatactgcagtacaatgaaagttttaactatgcaaagactatatggagttcctcttactgacctagactccataagttcattagtttctaatccagaaaccagccttataactgctctcaatgtgtggtttggaagtttgcttgcatgtgaatcttttcatgcagatgtacatgcaggaaatctgtggcttctacgtgatggccgtattgggtttcttgacttcggaattgttggtcgtatatcccctaaaacatgggctgctatggaagtcttcttaggatcaattgccattgaagattatgactcaatggcatcttccttaattgaaatgggtgctacaaaccaggatgttgatgctaaggcctttgcaagagatttggaaaaagtattctcatcaattaaggaattggacactgaaatagttgtagcaactacaactggaacagccacaaatgcaactgctgttgctgctaatatagttgttgatgagaggcagatgaatgcactctttcttgatgtggttcgggttagtgaatcatatggattgaagtttcctagagaatttgctcttctcctgaaacagctcttgtactttgaccggtacacacggttgctggctcccaacttgaacatgcttcaggatcagaggatttccattgcttccaatagcagaagcagggtatagagacaatttttaaggagttggtacacaaaatctagatgtaccccatcttagttcaaaatattttatttgtatgattactttggtatataaataaaataatccatagttgtcatgtgagagccaagctcatttggttgggacatttctttgcaagttctcgggatggaattcaacatccttaatagaatattccttcactatta

SEQ ID NO: 28275 - DNA, 290 bp, Glycine max
  unsure (1)..(290): unsure at all n locations
  Clone ID: PAT_MRT3847_125533C.1
gtttttttaaaaaaatattctttgaaaataattattgtaccaaaaataaaacttcgctaaaggggcatactactgaaagtttaccccaattnatagtgtggttaagcnaaaaaaccgtggtccattagcnatgagtaaaantgaaaatnccgtgttaggtggccagagtggtatnggnttangagncaaaccggtnngctatcgcngggncnnttttcgtttgcaaccantcggaaattccccggngcccctccnatttttccggattctacatnaaccaccaggatggc

SEQ ID NO: 28276 - DNA, 299 bp, Glycine max
  unsure (1)..(299): unsure at all n locations
  Clone ID: PAT_MRT3847_125534C.1
ggataaaaaaacatatgcgggtatgcactcatggtttgcactgaatccagtcacccctgccatagttgaaataaaaagcattcaccaatttgactggttgactagagagaatgtcccagtgcttgaagccgtagaaaatcaaaatgggattaggaattactaccatgggaatcatattgcagganccaatctcagtgacaccagtccacgtaaatttgcatctaaattgcaggccagaagtccaaaatacatatctttactcaaccatctccgcatatacttaccagagcttttcccaa

SEQ ID NO: 28277 - DNA, 601 bp, Glycine max
  Clone ID: PAT_MRT3847_125535C.1
aagctcgtgaaccagtgggaactattttcttctgtatatctagtgtagtgttacatagttgcattgtagactgttcatatttaaacagttgaaaatatatacacgttcccgggggagagttacatacagtatgcacagcttttacattgtaatgtgagacaaaggatgaaacaggagagttattgtgactctctggagattaagctaaaataccaggagcgtaacttcaaaataacctcagttaatgcttttcgttttgtcaattttttgtcctcgaaagggatgatcatccttaatttcacttgcagcagtagtgaatgtgtttaacttcgcacattcccaactgctgtatcactgaaataagcagtgatcgccttcaatttattatttaaataaactttctcaacctctagtgaccatgatggacaggatgacagaattgactcttcttggtgggagcaattgatatttcgaagcaatctcctttctccggaagaacagtgttttgcaacattgtggtctaagcatcgtccacaagtcataagcatcagccttcacataataaagtagtagcccttgacataatcagggtcccccccca

SEQ ID NO: 28278 - DNA, 433 bp, Glycine max
  Clone ID: PAT_MRT3847_125536C.1
tacggcgacgacagaaggggtgttgttactgttagtaggttagtttccatggattcgttggatgctatatcttctcctcattcttattcagtcacggccggtatctctgcttaatttcacatcacccattaattacttttttctttgatttcacccttgggtatttggtcaatttttcattattatcaaattatttgctgactaatatgagaggaaccattaattggtatatttattttgcaagtgtatatgtacgtgtgtcacccattcgaatttctcacaattttctgctcacgttttacgagaattcacacttttcaaactggattttcaaaaacaatttagttccatcaagacagcctatttaaatatttaaccataccatattataatattaattttagtaaacgcattgactaggaagcacaagttg

SEQ ID NO: 28279 - DNA, 325 bp, Glycine max
  Clone ID: PAT_MRT3847_125537C.1
gatataattgtccctcatcctcaatccctattttttccttggcgagagacgctcgatccttttcctgctactcactatcattgagtgttatttttccagtctccccggtatcattatgtggaatctttacctctttattaaacttttttgcgaacccctcttccccctttcttttatcttgactactctcaacaactatttagcttccaatagatgcttcttcatgtgtagggtggagggatttatcttcattttcaccttgaagaatttgtccttggtctctccacataagaaaaaaagacatgatcctgtttcttcctctgtt

SEQ ID NO: 28280 - DNA, 133 bp, Glycine max
  Clone ID: PAT_MRT3847_125538C.1
ctctgactaccctccacttggtcgcttcgttgtcagggatatgcgtcagactgttgctgtgggagtcattatgaacgtggagaataaggatcctactgtagccaaggtcaccagggctgaccataggaagaag

SEQ ID NO: 28281 - DNA, 485 bp, Glycine max
  Clone ID: PAT_MRT3847_125539C.1
acgaggaaagttgaagatgtggcgtgttctagctgcagtgacaagaaaccttcagagcacaagaaagagttccaaggtggcagatgagagcatgtttgaatcaggaaacggtgtagagctatttggacatgagaggggaagaagatcacaacatggttgggggcttgtgtgtagcattcttcaagcccccatatcaatactctcatgtgtttctcaccctcaggttaataataatggctctgatgggatttgggtaactactggggaattctcatcacaggtgtctgaaatgaaccatctcatggtaagtgatagcatgagatatgcaattttgatgtagggaatacttgtgaatgccaattgtgttgctcttggtttctaaggacaacaacatcacataactcctcttctcttgtcctcatttttctttctcttctctgtttacagtttggatcatatatatgtaatacactaggtgattgaat

SEQ ID NO: 28282 - DNA, 1475 bp, Glycine max
  Clone ID: PAT_MRT3847_12553C.1
atatagataacttgtgtgtaagcttaattgaaaaaatagtataacaagttgttatttactagtatacaaacagaagcatttgcagggcaggggaaaaaaaatcgaaacacaatacgttttttcaaaccggccagccaagaatacatatgaaaaaagaaagatttgttctcttgctcaatatatatgatcagagagtgacactgcggagcacaacagtctcaacggtgagtccagggccgaaaccaaatagcacaccccagtcaagaccttcaccggttgtgccaagtccattttctattgatttcttcctcatttgatccaagatgaatagcacgcatgcacttgacatgttaccatactcgctgagcacatgtctagtagcttccattttttcaggcttcaggcctaacttagcctcaacttggtccaaaattgcgggtccaccagggtgtgcaatccagaagatagaattgtaatcggagattcccaagggttggaaggcttcaaccaaggccttctcaatattcttggagatgagtccaggaacatccttgaggagatggaaagtgagaccaacttcgcgaaggtgtccatcaatagccccttcactgtctggaaggattgtctgggcagtccagacaagctgaaacaaaggcttttcaactggtaaggggtctgatccaacaatgacagcggctgcaccatctccaaacaaggcttgacccacaaggctatcaagatgggtgtcagttgggccgcgaaatgtgactgcggtgatctcagaacaaacgacaagcacgcgagcacccttgttgttttcagcgaggtctttggccaaacgaagcaccgtgccaccggcaaagcagccttgttggtacatcatgtaacgcttgacggaggggcgaaggcctaatagtttagtgagctgataatcagcaccaggcatgtcgacaccactagtggtgcaaaagatgagatgggtaatcttggacttgggttgaccccattccttgattgccttagttgcagcctcttttcccaactttggtacctccacaacaaccatgtcttgccttgcatccaacgaaggtgccatataggcaccaacactcggattctctttcaggatttcttcgtttaagtacatgtatcgcttcttaatcatcgacttatcacaaatgcgcttgaacttttctttgagctcggtcatgtgctcgctgttggtgatgcggaaataatagtcaggataggtactctgatccacgcagttgggaggagtggcggtgccaatagccatcacggtggcagggccttccgcacgttgtgccttacgaatctcttcaacactcaccattttcctaattttcaatctctgcaaccaattaattaagcttctttgaacccaattaaagaatgaaagtgataaagtagtgtagtagctatgaaagaaaaggctatgatatgatgatggagat

SEQ ID NO: 28283 - DNA, 408 bp, Glycine max
  Clone ID: PAT_MRT3847_125540C.1
ccttttcgtccgcctttttctctctacccttcattctctctctacctccacactctcagaagacaacagaagtaggtgaaaagcaaagaaccctttcttctcttgagattttccacatcaccaccggagacaaccactgttgcttgctcatcgcacctaatctgcctcaaaatgtgcgaaaaaatcgccaaggaagtgacggaaaattgaaaccccagtaggggaaggtcttgcctttgttgtggcttatgtgaggatacaatcaagttgggattttcgaaccctaggcgctgaaagcttgaggtttttcagtcagatctcagcgattttggtgctgtggcttttggggttggaactcactcgtggatctctctgatgggtttacttaatagggaactgggattgggt

SEQ ID NO: 28284 - DNA, 465 bp, Glycine max
  Clone ID: PAT_MRT3847_125541C.1
gggaaaggggaacgggcaaaattaaataaaaaccgggcccaaaattttttttaaatcccccaaaaaacagttccaaaattaacttctgggaatgggactaaaattccccccaaccccggttttttttttcaaaaaccaaaaaatcccctggaacaaaaaaagttttgttaaacctgcaataaacctcttgtaaaaatttggaaaattgggtccaaattacccaagttgaccatccccataaaaacttttttttataaataatcggaatcttttattgggcccggtttttaaacacataaaaacccttttcagggggaacagttgtttgcagctaaatttgaattccatcaagccccctttggaatttatttttggagcgggcataaataattttgctcccaaccctaaatttttgggggcccaaccaatgaaaaaaattttgtttttttggcaattttttttggg

SEQ ID NO: 28285 - DNA, 257 bp, Glycine max
  unsure (1)..(257): unsure at all n locations
  Clone ID: PAT_MRT3847_125542C.1
cnataacnncgtacgtcatctnggaaccancgcccagcatgtgttggtcatcgcactcactgttagagtnagagttngngtnagngttggatggagtcgttaacgtncgtgaagcataagcaacaacacaacatgaattnangaggaacnagttggnggacnttccggagganacagancnncncncctattggtattgatactaatccagcagagcttgangaagcgggccncncntggaaacagattggnatact

SEQ ID NO: 28286 - DNA, 436 bp, Glycine max
  Clone ID: PAT_MRT3847_125543C.1
aaaacaatgcttaaatgcccaatgcaaaaaaagatcaatcagtggcaaaacccatgtaattaccgacccattttacagactggaacctaaaacctatgtaattaccgacccatattagttttcaaccaaaaaaacttttacccggggaaaacccaaaccaatcccactaaataattccaattttaaagttgtaagggggagtccaaatgtaaacccagaaaaaaacccctaaaaatgtttagccctaccctttagctttctccctacgggcctactttttttttgcctaagggataaacagattccaacaacccacagatgccaccctacagctaatccttggtgacacaatcggggttacagtcaacgtggatttaattctccaggaaacctaaagagaacaatggtcatgaatcaccaccagccttaccgaatg

SEQ ID NO: 28287 - DNA, 382 bp, Glycine max
  Clone ID: PAT_MRT3847_125544C.1
ccaaggctcgcgtaattgagatcgaagccggaaacaaatttattgacattaagcagtttttcttgttcaactttttcaaaagcattttgttttcttaatattatagggatgtttaaatatatacacacattttgatttattttatactatagtagttatttatccttcgaatccttaggcaaagtagatactttgcagattggacataatttcctcaaagatataccattttttaatgcagtttacatggttgtcatgcccatatgttttaagtgtttcaacatctttcatgtttttgtactctttcagacatattacacatttttccttctttgtgactttgtttatatgaacaatattttgtttattgttaaaaattttt

SEQ ID NO: 28288 - DNA, 446 bp, Glycine max
  Clone ID: PAT_MRT3847_125545C.1
ggctcgagcacaaagcttgattgtggttttgagattacacttctctgatcttttctctccaaaatcaagatcaaaatctgtagaacccttttcctccttagattctctctctctcttaatttctaattatatctgacttttatcctctcacatccacaaatgtttttctcaaagaatgttcgtagattcttcaaattcagaggccaggttttttgcccatgtcttctatactgtcttttcaatttctgataacctattcaccctcatcaaactctcttcatcatcatccacaagaattttcaaccaaaacactcattagtcttttggctcaacactcaacaattttctttggtgtgaccttattgcgggacaacacacaataatcattgttcttctttaataataatccatacaacaaacacagtttcctttgtctcactacaaaa

SEQ ID NO: 28289 - DNA, 1290 bp, Glycine max
  Clone ID: PAT_MRT3847_125546C.1
cgtaaacacattattatttctttcttgttttgcctattacctttggtttctctctgctatagtatgttttttttttgtcagatttcgattattctctaagtccaagaattcagttcaataacccttcatcattcaaagctacttaactcatttcacagttcacacaccatcctaacccaaccaaacgaaccttttttctttcccataatttaatatttgaaatatactaagcagcacagcacagtaactgtttcttgctcactgggtttccgcaatctacatgcattcaaattgctactagcctctgccaatgacctcgtgcatttaacaccctaaacttaaaaagctggttaatttaagggtagtaatagtactaatagtagtgtagtaaatttaagcctctgccaaatgagttaaaagaagctgcttgcaattatgaaactttacctgagtgagtggtaaagccgcaagaactgccccataaggtggctctattctgctgtttttaccttttttccctcgtttcagaagaaaaacgagataagcacgctgctttaatttggaaggagttacaaggaaccttcccttatttgctgcccctttaagctcttctttctcaattataaatccgcaagagaaaccaaaccctttcatcacattgctcaacttttactacatattaacttgattagaaaaaaagatgttacctcaaaagcaagctgaagaagccatgatgtcaagcctcacccaaacgatggagcgtgaggagggagaggaagtgaaaggggagacctcaaattttagctttaaaaatgctctctggcatggtggttctgcctatgatgcttggttcagctgtgcctcaaatcaggttgctcaggttctgttgactctgccttactcattctctcagctgggaatgctttcaggcatcatattccaagtgttctatggcttgcttgggagttatactgcttatttaattagcattctgtacattgagtacagaagccggaaagagaaagagaatgtcagcttcaaaaaccatgtcatccagtggtttgaagtgttggaaggcttgctgggtccatactggaaagctattggattggccttcaactgcactttctctctttggatctgtcatccagctcatagcttgtgcaaggtctcaatttcctcttataatcaaatgggacaagaggacttggacctacatatttggagcttgctgtgccaccacagtgttcatcccatcattccacaactacaggatatggtcctttcttg

SEQ ID NO: 28290 - DNA, 2728 bp, Glycine max
  Clone ID: PAT_MRT3847_125547C.1
tatttggctcgagaacacattattatttctttcttgttttgcctattacctttggtttctctctgctatagtatgtttttttcttgtcagatttcgattattctctaagtccaagaattcagttcaataacccttcatcattcaaagctacttaactcatttcacagttcacacaccatcctaacccaaccaaacgaaccttttttctttcccataatttaatatttgaaatatactaagcagcacagcacagtaactgtttcttgctcactgggtttccgcaatctacatgcattcaaattgctactagcctctgccaatgacctcgtgcatttaacaccctaaacttaaaaagctgatttaagggtagcagaaaaaaaaagtactaatctattacttgtagtagtgtagtatatttaagcctctgccaattgagttaaaagagctgattgcaattatgaaactttacctgagtgagtggtaaagccgcaagaactgccccataaggtggcgctattctgctattttatctcttttccctcgtttcggaaggaaaaaacgagataagcacgctgcttaggaaggagttacaaggaaccttcccttatttgctgcccctttaagctatcccttctcagttataaatccgcaagagtaaccaaaccctttcattgcattgctcaactttcatataacttgaaaaatgttaccccagaagcaaggtgaagaaaccatgatgtcaaaccttaacgaaacaacgattgagcgtggtgaagagagagaggaagagaacgtgggtggtggttcacattccagtttgaaaagcattctttggcatggtgggtctgcttatgatgcatggttcagctgtgcctcaaatcaggttgcgcaggttctgctaacactgccatactctttctctcagctgggaatgctctctggcatcatattccaagtcttctatggaataatgggaagttggacagcttatctgattagcattctgtacatcgagtacaggaccagaaaagagaaagagagtgtcagcttcaaaaaccatgtcattcagtggtttgaagtgttggaaggtttactgggtccatactggaaagccattggcttggccttcaattgcactttcctcctctttgggtccgttatccagcttattgcttgtgcaagcaacatatacctcataaatgaccacttggataagaggacctggacttacatattcggagcttgctgtgccaccacagtgttcgtaccttcatttcacaactacagaatttggtctttccttggccttggcatgaccacttacacagcttggtacatgaccatttcagccattgctcatggccaggttgaaaatgtgactcacactggcccaaaaaaattggtattgtatttcacgggcgccaccaacattctctacactttcggcgggcacgccgtcacagtggaaatcatgcatagcaatgtggaaacctcaaaagttcaaatatatctatctttatgctactctttatgtgttcacactcaccctaccatctgctgttgccgtttattgggcctttggtgacaaactcctggaccactccaatgctttctctcttcttccccgctctggttggcgcgatgccggtgtcatcttaatgctgattcatcagttcatcacttttggatttgcttgcacaccattgtattttgtgtgggagaaggtgataggaatgcatgacacaaagagcatatgtttgagggcacttgctaggttgcctgtggtgataccaatctggtttttggctattatcttccctttctttggtcctattaactctgctgtgggggctcttctggttagcttcaccgtgtatgtcatccctgcttgtgctcatatgctcacttacaagtctgcttctgcacgacagaatgctgctgagaaattgcccttcttcatcccaaactggacggcaatgtatgtggtgaatgcatttgtggtggtgtgggttctagtggttggatttggatttggagggtgggctagcatgacaaactttatcaaacaggttgacacatttggactctttgccaagtgctaccaatgcccgccaaaagtccctgcttccaacaacacaatgctgcatcattgaaaattatatatgttcttctgctttaaacatatagggacacatcagcatctccacccttgtgtatttcccctatctttttgtttaatctctctagctataaatattgttaatgctgatgttcccttgtgtagaaaggcaacattgttatatttcgctttcgaatcattttggttaatcataagcatgcactatagttatagcatatgtagggagtgatgtttggcaattggcatatagcgacctcaagtatagcctgcatgtttccaataatgtctttgcattccaatataatcatttttttcttctccaaaaaaaaaaaaaaaaaaaaaaaaaaaaaaaaaaaaaaaaaaaaagggggggccgcccttaaggaggaaccattattaccgccgccttcctacgacataatttttctattatggcgccaaataaaattaatctgccggccgtttttcaacaacgtgactgctaaaaacacggtgtcgcccaactaattaaccttgttgcacaacatccttttttcgcctggtgtaataacaaaaaggaggcccccaatggtcgttcttaccaattgt

SEQ ID NO: 28291 - DNA, 531 bp, Glycine max
  unsure (1)..(531): unsure at all n locations
  Clone ID: PAT_MRT3847_125548C.1
ttcccggggggacccacgcggcgcgaatcaatgcggattgggacctaaaaatatgggagttcggggtngctcctgctaattgcggcgagagccantgcatgagcgagtgtgtggggactcgggggggtagggggccagagctcctactctggggggagaactatggggcatctattgaggtgtgggcagttgggtgtgtctttgcggagcgtgcttgggcgaaaaccgagttttccctgggtcagagtgtgtcaaccaggtgaggtggagtatcaatatccttgggaggaaaggggggaggagattgagttcattgataacccaaaggggananaangatatcaaatcacttccttattctcctggaaccggggggtccaacttatcctatggcgtcattggaattggtcttctggcgaanatgcgtggtttcnatccaacaaagagggcaggggcactcaaggacttcaacacccttacatgggccctctggatgatcctaactgtgaccctncaggcgggattccaatt

SEQ ID NO: 28292 - DNA, 527 bp, Glycine max
  Clone ID: PAT_MRT3847_125549C.1
ctagctatctcgatcgaactgtccaaggtcctgtcacttagtgatgatgttggttttggaggcatcatattataggtagggattagagttaatagccgttcacgaactgttaaattacataattatattattattgttgtaacacgtacgccgtctaacgccaccgaacgccgatgaaattcagcgggttatacgttattacaaaaaataataattattatggtgtggttaaacaacagaagaacaatttattattataaatgctgctgtataccgaacaacggcgaatggaaatgaaaatgcacgtgctttactaaaaattcaacaccagtacgtgcgaaataaaccacaacaccaaaacaacaccaacgcaaacaaatcaagcacaactgctcgccagcagcagccactaaaaatcgccaccgttagcaacacattcggcggctgcgtgtggtgattcggtacttgtacgtgcaacacaaactggtagtcttatggttattgcacaacgggttagggcccccaga

SEQ ID NO: 28293 - DNA, 561 bp, Glycine max
  Clone ID: PAT_MRT3847_12554C.1
cttcactttttttttttttttgtgtatttgccttgtttacatcttttgttttttttttttctccttttttattgatttaacctaaaaaagtgggatcggcaactggaactagtgcggtgacaactccgtagcaatcaatatacttaattccttttgaggccatcctccaataatttggtagagcccaaagctgaataccctccaccattcccctcacgagcctttgctgcccatgaatggagtctccataacaagtctaccatcgcttggaaacacaagggattgctccttgctggaaaaaggaaacctcgctctgactagagaccaaaaaagggatgactttcaaagaaattccgcgaggcctcataaatgaatgtactggacatgatggaccagggtattcgcactgaaaaaacaaaattgtgattcgtagctcgaccagctagtatatgggcacacaaagtgctataaactcgacggtgaaaaagtccctttccagatggaagtccaatacagaaacatcctttcggatctgaacttccaaatcgagtcccctggcca

SEQ ID NO: 28294 - DNA, 700 bp, Glycine max
  Clone ID: PAT_MRT3847_125550C.1
ataagctataaaatttagatatagataattagatataataataacccaacaactgctatttgcaatttggccttgagagaaggatggacttacaaatgaatatcctgcaatacagttaccaagatgtcgaaccaaactctgtattgtgtctgtcacatatcaaatatcaagtgtgtcaaatacaaagcctcatagaaacaatggaagttcaatgttggctaaatcatagaacaaagtataaatatatagagacactaaagaactttcagactagattgtaattataacaaaagcttgcagaattagagacaagaaatttcctgggtgaacaaagagcacagttgctcacccctcccccatccttgtgcctgtttcacaccatctaatcacagtggtttccaccttgttttatgtatacctatatccatagttgattttgtgtacaacggaaacaataagatttgaacctaaaacctaatacaaattacccaaatcccataccattaggctgaacctagtgagttttaactgaggtgatttgcttcttagggatgtgcaagaagcattattcccaaaataatagagctcataaacttgatcaccaacgaccagtaaccatggataaggaggaagagacttgaggaaaatgtaacctaccaccatcaaatccacaccaattgaccaaaaacccacgcgtccg

SEQ ID NO: 28295 - DNA, 181 bp, Glycine max
  Clone ID: PAT_MRT3847_125551C.1
ctctttccttgggtcggacataacgtaaatcaaggggttgtacgttgtgcagacaactatggtgagtacccagatatctgaggctgaggaataataggaggcagattgaggtaaaactatatgtcctcccacagttatgtgcctaattgaaaaacgacgcactgcagatgaacaattcaag

SEQ ID NO: 28296 - DNA, 392 bp, Glycine max
  Clone ID: PAT_MRT3847_125552C.1
ggaacattacaagaaaaagaaaacgagtatggttttgtcattattaattatgccatgtaaaataattaatataagattattttaatcttgagtttcaatattttgtggtctacatcatgtaagacataaatgtgtgaaataatttgtttgagattattttaacttatttggtagtgttgaatttgagattttttaagatattttttttggaggcaattttttttagtcgattaaaattattataattgataaagtttttcgtccaaataattaatactatctatgtaagccaaaggtgcggaaaatgagtagtaaagcatagaaaacagtaggagtaaagagaaaaaggatgaggtagagagaaggtgggagtggcagagagaagattacaa

SEQ ID NO: 28297 - DNA, 567 bp, Glycine max
  Clone ID: PAT_MRT3847_125553C.1
atctggcttgagaactctctgaatatctatactgttcttgtttgaattgaatttgaatcacttttcatttatgttgattaactgtcgagttttgtgcctttttgtttggtttttcttttttctgaagctagtgagctacagttgcgaaatagacatgagtcaggaccttagatgaatgggaaagattgtatatttttttttaatggtggagagaaaaaagtactaattgctcctttaatttgctgatattgtctttttgctgtttttggttttggtgagtttctatttgggccaacccttattatgaactataactcgtgaatatgtcggttgtgtggtgtctgtgggtttcgtgaatatgaggaaagagaagagaacatgaacagtatgttttgtgggtacaaattatttttctttcaagaattgttaacaactttacattttgaaaatggatatttgggagaaaaggcttggattgtggatgtgggactgattcatcagacagacacttaaaggcgggctattttaaaaagttttagaggatctgacaatttttacacttgttag

SEQ ID NO: 28298 - DNA, 270 bp, Glycine max
  Clone ID: PAT_MRT3847_125554C.1
ggttttatttcttcctcactgggtaaatatttttcccgaataggaaaaacattaacctcctcttaaatatgggccattggctctggttatatgccccacaatcgggattatttggaccctttggaaaggtttggtgatgcccacttttaaatggtggaccatgacccaaacctccccaggggaaaattccaatttttccaaaacccttcaatttctttgctcatagctttttttattatgaatatttgggcctactttggtcatttatta

SEQ ID NO: 28299 - DNA, 173 bp, Glycine max
  Clone ID: PAT_MRT3847_125555C.1
tacgctcgcaatgcgtctcgcgcttgccatttttctctaaattcaataaatttctaaaaaaaaaacgaggcaaatgaggtgaaaataacaaaaaaaaaagccaagccctatttgggatgagtgacccagaattcacttctttaaatggcgctcaaaatttgattccaaacaac

SEQ ID NO: 28300 - DNA, 440 bp, Glycine max
  unsure (1)..(440): unsure at all n locations
  Clone ID: PAT_MRT3847_125556C.1
naatctgatgccactcagccaccaggccctattgagcaatttcccccaaatcaccatcgcaccatcggatgcttcgtaacggagctgaacccaaaacccttattatatcctccaacgttcctaccgtctacgaaatcggactaccttcaaggcggcttccgacgagacacctccgcctccgacgaggacaacctctacaggcgcctgaaagccctccagcgccagctggagtgaatcgacatacagcaggagtacgtgatggatgagcgcaagaatctgaagcgcgagctgttccgatcacatgacgaggtagaatccgatacaggcggagccgatcgtaatgggcgcggtgcatggagagggagaccacaacaactgattgggctgatctcacagcggattcaactactacgatacgatcctcaccaccttcaatcgtg

SEQ ID NO: 28301 - DNA, 1767 bp, Glycine max
  Clone ID: PAT_MRT3847_125557C.1
cccacgcgtccgaattaatcatggggagagatgtttcaagatcagcatttgtgtttggatttggatcattcatcatagtctcatcttcttatgcaaaggatatcaatctaagtattatttcagtgatgtcctatataagtcttgtttatctcgctgttatcttcctatatagatccttaatttgcagggggatcataaacgttgaggactcaaattatgttgtgggagaagaagatgcaatttggatgctaaaattaatcctcccttacttgaatgagttcctatcaaaactcaaatcacaagatacccgaggctcttggcatctaatggagtgtatggaatttatcatcagttgttgctcgcatttgggcagtgttcgtactatttgcagccttcagatattatcaacaacattatttggtgagagatgaatgtgcggatagatgaagcaggatgtgatgaaacatggcaagaccctgttggagttagaccggaacacggacctgcaaccaactttagtgataccaataaaataaagaaagggttctaaaagtatgtgttgatgctggcagctagttgtaccacatctaaacaggctggtccaattgcatgcaccgttgctaatttcttttaccatcttatcttttttttttttatcactgatattcactactacttatgtttggtgacctttttatatttctttggaataatcactttttgtttaaatttagagaaattagtttttggttaagcatataatttatacttcctatacatgtcgcacattctcagtttagttctttcaagtcaacacttattaaatcaatcttatacttgtaaacattcactttttttattcaccaaaaaacatttgtcaccgtacccctacttaatttggtctttatatataatatatttttattttaatttagtccttatatgtataacatattcttaatttgatcctatatctagagactaaattaagaaattaaaagtcaacgtataacgatagtgatcaaattgatagcatttgcatgtatagagactgattgaatattctttttacaaataaagaccaaattaaaatatgcaacacgtacggcgattaaatgtttaatcttagtttttatgctttaataatttgtttgatatgcaatgtgctagtagctttgactaattgagcctggcacatagacatgcacacattaatgaatggtgtggtggtgttctatttttgtagtgttcgtactatttgcagccttcagatattatcaacaacattatttggtgagagatgaatggggggaagatgaagcaggatgtgatgaaacatggcaagaccctgttggagttagaccgaaacaaggacctgcaaccaactttagtgataccaataaaataaagaaagggttctaaaagtatgtgttgatgctggcagctagttgtaccacatctaacaggctggtccaattgcatgcaccgtgccatgttttcctttaaaactttttttttttttaggtttcacatggaagtttcttttgtctaggctgtaaatttttgttcagttaatataaaggtttaatttagtaaacaaatccaccacggttcaataggagaagggaataactttttttttaaaggaggacgtttgtgttctgtaattagcattcagttaaaataatttatttttattaaaaaaaaaaaaaaaaaaaaaaaaaaagcggccctctaccggacccgggctcacgcatgcgtgcgcgt

SEQ ID NO: 28302 - DNA, 854 bp, Glycine max
  Clone ID: PAT_MRT3847_125558C.1
gttgtgggagaagaaggtgcaatttggatgctaaaattaatcctcccttacttgaatgagttcctatcaaaactcaaagccttgttttctggagatccaggtaccacaataaagttggcagtgttgctctttgttttggccagatgtggcagctacataaccgtttggaagatggccaaatttggcttctttggagtttttactgtaccaaagatatgctcttcgtattctgcacagttaactgaatatggaaatttttggattcgtcgattccgggatgcatgggattcatgcactcacaagaaagccgtggctcttggcatcttcgggcttgtatggaatttatcatcagttgttgctcgcatttgggcagtgttcgtactatttgcagccttcagatattatcaacaacattatttggtgagagatgaatggggggaagatgaagcaggatgtgatgaaacatggcaagaccctgttggagttagaccgaaacaaggacctgcaaccaactttagtgataccaataaaataaagaaagggttctaaaagtatgtgttgatgctggcagctagttgtaccacatctaacaggctggtccaattgcatgcaccgtgccatgttttcctttaaaacttttttttttttttaggtttcacatggaagtttcttttgtctaggctgtaaatttttgttcagttaatataaaggtttaatttagtaaacaaatcccccacggttcaataggagaagggaataactttttttttaaaggaggacgtttgtgttctgtaattagcattcagttacaataatttatttttattatggttcaaattcttaaatttagtttg

SEQ ID NO: 28303 - DNA, 357 bp, Glycine max
  Clone ID: PAT_MRT3847_125559C.1
caagactcttgcttcgacctctccctatttattccaaaagcctcagataacaacaactgcaacctcattcatcaccaccacttccaaacaagggatgcctccaccatcatcaaccctgtccaactaccctttcatcaaaaccacttttttcaccagcaccagcatggactgttccaacctcaacagcaaagcctaagccaagaccttggctgtctatgacccattacaggaaaaccagtggaacaaaaccctacttctataccattcacccagcaccataatatccctttagaagctttcaccaccaccccttctattatttccaacaccaacactggctccacccctttgcactct

SEQ ID NO: 28304 - DNA, 235 bp, Glycine max
  Clone ID: PAT_MRT3847_12555C.1
cccacacgtccggagatgcataaagcgcatacaggtcatgtattctcaaattctgaaagagcgatttatcagtccgcaagtgctaccaccactttctcagagataatggatgtgatgcccaaacacgacacaaatctatcacagcatgtgtctaccatacccgtgaaaccccgagctggagccccatttggagagactcttacattccaatcatacccatacctattagtcaatg

SEQ ID NO: 28305 - DNA, 822 bp, Glycine max
  Clone ID: PAT_MRT3847_125560C.1
aggccccacttctttctttgtaactggacgaggcaatggttcattgactggatcattgctacctaattcatcatcatcttctcagttggctaaagagtctcccctgatggaagaggtattagtgattgcacgaggacaacgtcaaatcatgcatcaactagacactctgagcaatcttttgcatgaatactttggagaaaggtcacgcctgggaagaccagaccatacaggaagaatgcgtgaagctgaatccgtcgccgtccccctgcttctgactctggccattggtgctgttggtgtgcttttgttcagaggtttgacatcccaaaaataatgtgcatatattttgtttcttgtaaaattgtcattaccatttaggagagaagcctcataagtatatctaatgcataaagggtttatgaaaacaattgccaatctgtgaggggctgcctcacattaagtggtagtagtagtggacgacgaccttaataggtatattttggcattcacttaagctgtaatatataagcttctgtatatcttttttttttttttcctcgttaaataatttgtcaacttggtggaatactgaacttgcatatagtattataatttgttctttaaaaccaacaaaaaaaaaaaaaaaaaactaacataacaggaacaaacgaagaaaaaaactcaaatttacggacaccaaaaattcaattaggggggggcccttttaaagaacccaattttaattacccggtgctggaaagtaaatttttttttttgggggccccaaattttaattccggggcccggttttataaacggggg

SEQ ID NO: 28306 - DNA, 337 bp, Glycine max
  Clone ID: PAT_MRT3847_125561C.1
gtcaagccggtgccaaatgcactagcaggcagtttgtatggctgtaggtgccacactgtggctagtcacacgctgttctagatgattcaatgtttcaccaggagtcacctatagtagtgttcaggtctgtcatctaataactactgtaaacaggtgatccatctaaatgctaatcaattcacatatagttatccatagttttatagacatctagatatatatttatgcaatatttctcagaatcttcaatcgaatcaatttcatgatgtgacttaagatggtttccacccgtcacacataatcagttttgtacgagattcctcaatcagtttcaaca

SEQ ID NO: 28307 - DNA, 2565 bp, Glycine max
  Clone ID: PAT_MRT3847_125562C.1
gtcgacgacccacgcgtccgatttatttaggtttcacgttcctatttaatgcgtcgtttcgtttggttgaagacttgaagacaattcctgtaatgttttcaagaatattaatatattaaatccataacaaaaaataactgtaatttatgcagttttgagtcatcattagtcccattttggttcccatatttgccttaccattatcattacaattttcctttttcaacagcacatgacttgaacatctttggtttcccctaatggcacaagatactgtttctggagttgactcgcctcggggacgtctattacgagatcaggttcaagtggttaaaaaaaaggattctgatcgctatgaaattgttcctatccaagattctttgtcatttgagaaaggattcttcatatttatccgtgcatgccagttgttggctcaaaagtagaatggaatcatcttagatcgagttcaccaaccgtttgccaaggagtcatcactcatctttctgatcaaatttcaacattagatgaaagaatggatgaattcacctcccgtattgaagagctgaattcaaagttcgctatcagaaaagattcagcaggcagtcaacaaaacttggctttacaggctgaggcccacgatgtctcaggcccgaagcctgtctttgttccaatatgaggcaatcaagtctagacctcgcatttgctaccggactgcttcatcaccttgctcagttagcgaaaggctcgagggcatctatgccttaagtgaaaaatgacgacctttgcttgatcttcgtgtttctgtcactggtggagttcattttgatcttgtcaagcgtgttttgcgggacattcatcgtgccggtcaagagcctgaagaaataattcatcaaatctctgaaacggtgtatcctatgtataaagcttttatcgagccagatctccaaacagcccatttaaaaattattaacaagtttaatccattctctggatttcagaatcccacctacatattgaagtcagcaagaactgtgacagttgatcaaataaaggcagttattgctgcagagcatactgaaactaaagaggaaacatatgacatatttcttctaccccctggggaagaccctgaagcttgtcaatcatatttgagaatgagaaaccgtgatggaaagtacaatctcatgtttgaggaatgggtgacagatagtccattcataatatcacctagaattacttttgaggtcagcgtgcgccttcttggagggctgatggccttgggatacacaattgcagctatcctgaaaagaagcagccatgtctttcatgatgataaagtgaccataaaaactgattggctagaacaacttaatcgcacctatgttcaggttcaagggaaagacagaaactattgcaaatttgtagcagagaaactggggttggatggttcctatgttcctcgcacttacattgaacaaatccagcttgaaaagcttgtaaatgatgtgatggcattgccagatgatcttaagacaaaactcagcatagatgatgacttggtttcgagccccaaagaggccctttccagagcttctgcagataggagaatgaagtatcttaatcgtggtatttcacaatcatattcaactcaaagggacaagattctacctaagctgactaaacttgctataaataacagaagattcgatgcaagagcactagaatcacctgcaccaattgctaaccaaggagtcatcacacagctttctgatcaaatttccacattaaatgaaagaatggacgaattcacctcccgtattgaagagctgaattcaaagttcgctatcagtaaagattcagcagccagtcaacaaaacttggctttacaggctgaggcctgcaatggctctggccccacttccttctttgtaactggactaagcaatggctcattgactggatcattgctacctaattcatcatcatcttctcagttggctaaagagtctcccctgatggaagaggtattagttattgcacgaggacaacgtcaaatcatgcatcaactagacactctgagcaatcttttgcatgaatactttggagaaaggtcacgcctgggaagaccagaccatacaggaagaatgcgtgaagctgaatccgttgccatccccctggttctgactctggcctttggtgctgttggtgtgcttttgttcagaggtttgacatcccaaaaataatgtgtatatattttgtttcttgtcaaattgtcattaccatgtatgagacaaacttcataagtatatctaaagcataaagggtttatgaaaacaattaccaatctgtgagggactgcctcacattaaagtagtagtatgttggcattcacttaagctgtaatatatagcttctgtatatcttttttttcctcgttaaataattcgtctacttggtggaataccgaacttgcattgcatatattataattgttctttattatcaaaaaaaaaaaaaaaaaaaaaaaaaaaaaaaaaaaaaaaagggcggccgccgactagtacc

SEQ ID NO: 28308 - DNA, 299 bp, Glycine max
  Clone ID: PAT_MRT3847_125563C.1
cccactcgtccgcccacgcgtccgcccacgcgtccgcccacgcgtccgtgagctggcacgcaaaaaagagaaaaaaaggcaacaggagttttgtttttggggagggtgcagctatggcattgcttccgggaaccactgttgaatagggtggcatcacgctaatattgcgacctgtcaacagcgttcctaccttgtgatggattgaatggcccaaggataagacatttgctcgccgcacaattttccgactttcctaattcgccctacttgactatgccccctattgagtcgaaccttgc

SEQ ID NO: 28309 - DNA, 363 bp, Glycine max
  Clone ID: PAT_MRT3847_125564C.1
gataacaaaaacatacattacatcacctcactgatctagaagagaaacaaatgcaaggttcgattgcaatgttacattccattcccctatgctatgtccttcccttggcctggactacaacacacctcccatcataacaacaagaccaaatggattggatgcaaagcaacggattgctttgaagacaagggtacgatatgaggtgaggttactttgagcagagaagcgacgcatcacgctaagcaaggcacagaacatgacatcctcacgttatgtgagccgtgacactcaatgcaatggcactttaattccaatcataacaccatgcccaggttatattacacaatgaactgatcaaagaat

SEQ ID NO: 28310 - DNA, 228 bp, Glycine max
  Clone ID: PAT_MRT3847_125565C.1
tccgtgatttataacatgattctatccgccgttcgagggaattgtgctttaaggcgttttgtatggctaatttctcttactagggacaccaacggcacgtgcctttggggggccgaggccccctactggtggtcggcaaactgactgtgggggcacgcgtaaattttaggccggattatgactttaagcgttttttcatgaaaaaaaatattgtttcctaaattcccc

SEQ ID NO: 28311 - DNA, 545 bp, Glycine max
  Clone ID: PAT_MRT3847_125566C.1
cattattgtattctgtcaaaaataattcttcatacaagtcacatagatctgaattcttgcttactagtgatctcaattagaatgctttattggttttcctctatttttcatattttagctaaccaatttatcacctattccaactggtcttctcacatttctaaatcatcttcgctatgtttaatttttcaaaactaatgataattttattataatttcagggcttgtgatggctttaattggttctctctttagtatacttgtggtaagaaatgcatttgactctctctgtatgtgatgtcataattctgttaggatgcacatgccttagacaaaaggccaaatgcctcttctgttaggatatgatgtttcattggttagtaaaggatttttttttcatgatgacatcctgagtttatttagttcatgatcttcaccttacacacacacatcaacttagtaaaactatttttatagttgtaaacagaaaaggaaagatggagaaagagggattagtttgttgtgctctctttggcttcacttga

SEQ ID NO: 28312 - DNA, 425 bp, Glycine max
  Clone ID: PAT_MRT3847_125567C.1
gcggccgccctaaatttgggggggctatatatattccttatactgtaaaaaatttttgtgattacattataattaattaaaagttaggagcaatgggtggcgtgaaatcactaaaatataaagactatggtctctacttttataaatcaagacaattaattcttccagcatcagtgagggaaccgtgatgtggcagcttgttctagggagacttcctgaaaaggtttgatgatttgagggagtgaaccttttaggctgagggacatgataacattgggggatacgattaggttgcgtcctctgaatacaattagaactggaacaacgctgactggccacaatagaacattgtccatttgagggcctgctgggctgtgaccaatctagtggaccacatgagacacaccatattgtgaacccccaat

SEQ ID NO: 28313 - DNA, 232 bp, Glycine max
  unsure (1)..(232): unsure at all n locations
  Clone ID: PAT_MRT3847_125568C.1
atcccagaagctggaatattttatgaggtttatcaatcgattaacagtttttggtaataagatcataataataaccaaaaactgttaatcgattgataaacctcatgaaatatcccagaagctgggatattttatgaggtttatcagtcgattaacagtctttggttattattatgatcttattaccatagagttcngactagttttggtttgataaagcattccttcgttc

SEQ ID NO: 28314 - DNA, 146 bp, Glycine max
  unsure (1)..(146): unsure at all n locations
  Clone ID: PAT_MRT3847_125569C.1
ttttcaaatcataaatctcnctgctgtnnnttttganattngcatacttgctttggatanctgatggnatttnggcnggtcttngtnaagcatatnagtaatgtaactttgaatgatatttagttttgtnttcttgagtcaaaaaa

SEQ ID NO: 28315 - DNA, 1955 bp, Glycine max
  Clone ID: PAT_MRT3847_12556C.1
cccacgcgtccggatacttattgatctgtttcatataatgttgtatatcacagtcaaataactcacccaagacagaaaattttaagctaaactggactaagttaatcggcacaactctctttacacaaaccacataattccaaacagttctacagtccaatttatacacaatcacgaagaatcttttgttggagatgaaattggtaaaaataaaatagaagatattcactttgcaactgtatagtatagatcaattgtgtataagcttaattgcattaataataagatgtgttctcgtttagtgtttactggtatacaaaaaagaagaatgtgagaaagcaaaagagaaagaatacatttttcaaactaaaaaagcaataatacataagaagaaaagaaggatctgtgttcttgctcaatatatatgattagacagtgacactgcggagtacaacagtctcaacagtgagtccaggaccgaaaccaaatagcacaccccagtcaaggccttcgccggttgtgccaagtccattttctattgatttcttccgcatttgatccaagatgaatagcacacatgcacttgacatgttaccatactcgctgagcacatgcctagtagcttccattttttcaggcttcaagcctaacttagcctccacttggtccaaaattgcgggtccaccagggtgtgcaatccagaagatagaattgtaatcggagattcccaagggttggaaggcttcaaccaaggccttctcaatattcttggagatgagtccaggaacatccttgaggagatggaaagtgagaccaacttcgcgaaggtgtccatcaatagccccttcactgtctggaaggattgtctgggcagtccagacaagctgaaacaaaggcttttcaactggtaaggggtctgatccaacaatgacagcggctgcaccatctccaaacaaggcttgacccacaaggctatcaagatgggtgtcagttgggccgcggaatgtgactgcggtgatctcagaacaaacgacaagcacgcgagcacccttgttgttttcagcgaggtctttggccaaacgaagcaccgtgccaccggcaaagcagccttgttggtacatcatgtaacgcttgacggagggacgaaggcctaatagtttagtgagctgataatcagcaccaggcatgtcgacaccactagtggtgcaaaagatgagatgggtaatcttggacttgggttgaccccattccttgattgccttagttgcagcctcttttcccaactttggtacctccataaccaccatgtcttgccttgcatccaacgaaggtgccatatatgcacaaacactcggattctctttcaggatctcttcatttaagtacatgtatcgcttcttaatcatcgacttatcacacatgcgcttgaatttttctttgagctcggtcatgtgctcgctgttggtgatgcggaaataatagtcaggataggtactctgatccacgcagttgggaggagtggcggtgccaatagccatgacagtggcagggccttctgcacgttgcgccttacgaatctcttcaacactcaccatcctagctggttaagaaaagaatggaagtgggaagtagcaagtaggatagaaagggtatgatatgatgatgggggtggatgttggaaagtgatttggaaaggtggatatatatagatagttgatattggtaggtaggctaaggtacgtagatgctatgcatgcttcctctgactcgtggctgcgctttgtttcaactatgtggtgccccgcatggctacgtagactgatgactactctcttattttaacaacccaatatttttggttttttgtttattttttaatcaacacgttttcattaggagaagccacgaaagtatgaattatgattaggaaaagtcaatggtgaaggtcatagagg

SEQ ID NO: 28316 - DNA, 427 bp, Glycine max
  Clone ID: PAT_MRT3847_125570C.1
tgctgaggcaagtgtgagagccaggaagttggctttggcatggaaagagaggttggtgggtgatgatgacaatatgtttggagctttggggcttttgcatttggtttgtgcatttggttttgtctctgaattcagcttggatgagcttgttggcttttcggttgcggccccaactaatgaggaggacttcccagagctgtgccgggcggttgggttgacggagagagttcctgatattgttcaaaaacttatagataaggacaaacatattctggctgtcaagtatattcttgagtttaatcttgctgacaggatttcacctgttcctattttgaaagcttgtgtggatgaagctaagaaacttggtaaaagacttttccaggaaagaaagtcattgaatgagagtatgtctagagaaattaataca

SEQ ID NO: 28317 - DNA, 348 bp, Glycine max
  Clone ID: PAT_MRT3847_125571C.1
ccttcaatacccaaaacatcttgttttgtgtctttcgttctttttctctcaacaatggatttccacaccctctcaaggaagcaactccagaccctctgcaagaagaacaagatccccgccaacatcgccaacgttgccatggctgacgctctcgctgctctcaacaaagttgaaggattggtgattttttgaatccaatcgagggggatgctggaaccccaagtgttaatcatcgtacggctgttagaacctcaactcaaaggaaaacagtcagagaagaagcagaaggttcgaaggtggaggcctcgacccggcgggttagagttgcagaagaagtggttgagctag

SEQ ID NO: 28318 - DNA, 1419 bp, Glycine max
  Clone ID: PAT_MRT3847_125572C.1
tctcattctattggctgaacaacatcgatccaattctgattttgcaatatagtaataaaaaaacgaatcaacgaacaaagcaaaatcaacaatcagaaactgaaaaacagtgaaaaccatcatcaccctgtaccttacgcacctctccataacttccatcttcgccgaatcacagcttccaccaccatcaccgccgccgatcaccgccgctacgccacgcgtccgcccacgcgtccgaaaacagtgaaaaccataacacaatacctcacgtacctctccataacttccatcttcgccgaatcacaactttcaccaccgtcaccggcaccgatcaccgccctacgacaaccgtgaaggcaagacacttggacatctgaatcattggtataaaatggtttcgtttgaaatgaatgatcggaagaagattggattaggcttaacgggatttggtatatttttctcattccttggccttatcttcttctttgacaagggattgctagcaatgggaaatatactctttgtttctggagtatccctgaccattggactgaaatccactatgcaattcttcatgaaacgtagtaatttcaagggaacaatttcatttggtattgggttctttattcttatcttggggtggcctattctgggcatgattgtggagtcttatgggttcatcatactcttcagtggtttctggcctacactggctgttttcttgcagaagatccctgttctcggttggttgtttcaacagccatatgttcgatcgttattggaccgctacagaggcagacgagtgcctgtgtaactcgtggaattttagaacattatgtagctgctaggaagcgcatatgtaagtcagtgtaaagaaaacactctcgtatggagacctaactctgaattctgatggtataaaattgtcataatcattttattcaaaggaaaatggaaaggaaaaaggtttttgtattcattttacaactcctttttagtccctttttgattctcatgctttatggaaaatcaattgatcatcggagttgtcagttctttaacttcatctacattactatccaattcatacgacatcattggaaaggtttctgtacttggggtgttttggtggcatttgtttacaactcgtcataggaatataatgattttaagtgatatcaaatggtgttagtgcagcaatatggtacttgatatttttatttctttatctgtaatacactcttacagtgagagagttgggattggagcagtcgatttgatgtatgcaaaatgaatgcaaattgaaaccgtgaaaccattattttccctttgtgtgtggcattggccaatttgatgtatgcaaactgaaacagtggtcacttcttatatgatacgattcgtaatggttccgtttaaaaa

SEQ ID NO: 28319 - DNA, 203 bp, Glycine max
  Clone ID: PAT_MRT3847_125573C.1
cggtacgcgattcggaattcgagggtacgacgtcacgcgtgactgtcatagagcctatcgctttggatgacactcaatagcgcatctgggatattaaatgttacaggtctggttaatattttggccatcgttcccaaggattctgaacgattgagcttgaaataaaatttactgttgttcataaaactgaaaactgtaatggc

SEQ ID NO: 28320 - DNA, 309 bp, Glycine max
  Clone ID: PAT_MRT3847_125574C.1
tacagctgctacaagacgtcactccggtacagctgcaacacgaccacacaaaggtacagctgctactcgacgccctgacggtactgcatcagagaggatcacatcctgtgaacttcacaccatttcacaattccgagtttggatactccatctgcagattgaaaaactgtcctaatgttcagtaacattcctggtttttaacgatacgaaataaccatcgtcactcctgatcttccaaaccctccccagacattaccttcctcatagggaatcccttactagcattttcacaccatgatatccaagttt

SEQ ID NO: 28321 - DNA, 306 bp, Glycine max
  unsure (1)..(306): unsure at all n locations
  Clone ID: PAT_MRT3847_125575C.1
cttntatgcgttggtggtactttatacactantctgaaataggaggataatcaccatatagaaaatatagacataaaccataaccattttggaccattgcccctccattccatttaccccattgattattctcccacctaaacctattctgtattaaattaaccttggtttgttggagcatacatctcattcgtaggcacgggtctgattgtgatcaacctaaaaattctgatctttatgacttcctaattcatattcatataccctatttcatctttctaacttntactattttatttcacccaa

SEQ ID NO: 28322 - DNA, 1356 bp, Glycine max
  Clone ID: PAT_MRT3847_125576C.1
ggctcgaggcatttttggaaatgtggccattgcagcccgttattctcagcgtgttcatggattgaagcgtgtgtttataattgactttgatgttcatcatgggaatggaacaaatgatgctttctatgatgatccagatgtatttttcctttcatttcaccaagatggaagctatcccggtactggtaaatttgatgaagttggaagtggagatggtgaaggaaccacattaaatctgcctcttcctggaggttcaggtgatactgctattagaactgtgttcgatgaagtcattgtaccatgtgctcaaagatttaaaccagacatcattcttgtttctgctgggtatgacggccacgtgttggatccactagctaatcttcaatatacaactggaacatattacatgctagcgtccagtatcaaacaactagcgaaagatttatgtgggggccgatgtgtgtttttcttggagggaggatataatctgaagtctctttcatattccgtggcagacacattccgtgctcttcttggggaccgaagcttggcatctgagtttgataaccctaacattttgtacgaagagccatctacaaaagttaagcaagctattcagaagataaaacacattcattccctgtgaggtcaaaatagaaactgacatgacaagcatctaaatgtctagcattaataatttccttttctgtgggttcaatctataagtacatgtctttacactcttgggtgggcattctcccacttatcacatagaagcaaaaccattgtacaggattgcttgtggtctttgaacgagtctccagttacagtttctatatgccatgcagccatattgatcatgtggtcatagccatatacataaaggagtaaaccctaattttatatatttacttcattgaggaacactagcaacacaatttttaacacactcttattagcacattctctctatcaaatgaaacccatgtaagtctcaccaaatgatgcatgcctcgtaattttttttaatgggtttcactttccatttcgtgagtcatatgtagcttttacccaataataaagagttgaatgcattaataggatctctaagaactaccgaacatgttacttgtgggagaatttttataatgccattctttgtagattcaatagtggcatttactgtgtctgtgttgtaggaatctgctacttgagccttgttagatagatcaaaagcctcctcctattgggctaggtgggtgtatcaattatcatgtatgttagcttctttgatttttttttttattatcagcaaatcaaaatatattaaatagatgaccacctggctaatctcaa

SEQ ID NO: 28323 - DNA, 401 bp, Glycine max
  Clone ID: PAT_MRT3847_125577C.1
cttccaggaaccgggaccatttggaccagaattttgggaaacctttggcaggtggaaccggccacctagcggggccaaaaaaggatggctctcactgttaataacagttaaaggaaccggtaccactaaccatggctttccttgtaatggatccttggatatcgaacctaaaatccacccttaaccgagtagcatgggttccggtggacttatcctacattccacctgtggaaaaggtattataccaaaaaagggtggaacaaagaaggaaaaaaagggtgtggaatgacccttatataaaggaatggtactcccgcttcttctgtggggtagaagtgccctgtgttttgatcccataagtttacaacggaaaattttaaaaagcctctgaaattgcctcc

SEQ ID NO: 28324 - DNA, 474 bp, Glycine max
  Clone ID: PAT_MRT3847_125578C.1
atctatgagaattaaaaatagtgtaaaaaatttataataattcttatattttatttaataaattgaattagattcctttaataaataattatagcttaatttgattacaaatatcttgaatatgttaattccttttacctaatctttgccccacttcgataagtcttaaatattaattataaatttaaatatcatataaatattaaaagtattaaatgaatatacgttaaagttagaccttataataactacacatcctatcctacagtttcttttgaaattacagaggatttgacttcgtattccatttttgatgagccttgacatgtggcattccgactataatctaagcaataaataacaaagaatcgaataatatctattcaaaataaaggactgacttttcaacatcaatttttattacactacattttatatttactagaaaacaaccgctttgctctcacactattt

SEQ ID NO: 28325 - DNA, 593 bp, Glycine max
  Clone ID: PAT_MRT3847_125579C.1
cggtccggaattcccggtcgaccacgcgtccgcaaaaacaaacatttcattttctccgcaaccctaaaaccctaaaccgcgccatgccccttcattcctcctccttcgattccctctccaaatcccaggacctatcctccgccatccaatccgccaccaccccctcccaaatcgcatccgcgtgcgcctccatcgactccttcctgcactcgcactcaccggatcagtcccgccacttcttctccctcgccttcccaaccctaatctccaagctcttcggcttcgacgacccctccaatgcctggatccaccaccgccactccggcgacctcgcccaaaccctattctccctcctctcccccgccggcaacctcgccgccgccatcgccgccgtcgaccgcctctcccttatcaaatacgtcttccccgccgaacgcctccctcactggacccgctccttcctctccgacaccgattctcgctccctctccgatctctgcccctccctcttcaaaccctcaccttccccttctcaaatccaactcaacgtttttgaatactttttcttctggttcgcctactaccccgtctcg

SEQ ID NO: 28326 - DNA, 507 bp, Glycine max
  Clone ID: PAT_MRT3847_12557C.1
gagaagattgccaccgtcttgacccatccttgatcttggattcctagaatcgttaaggctcttgataccacttgttaaggaaaagagaaagaaagcaagaaataaatggtttattctgtgaaaggtacaaagttacatacacatatgcacgttcacgagccttttatttataacagaaagtctgtataccccatgtgtctaaaacagagaaataactaccactaataggaattactattctaacaggttggccaaatgggacctcagcctttaaaaatttcaggtctagataatgctcttggatagctttggaaaattgagcttcttaagacgacttgccaaaggtgtagcccaagccttttctgcattcccatattttatgtccacaatttcaacaatgtcaggtatctttttatcctttttctccctcactggagttcttaccattgaacatttatcagaacccaatatggatattctctatgtatttctgccattaatttttgt

SEQ ID NO: 28327 - DNA, 371 bp, Glycine max
  Clone ID: PAT_MRT3847_125580C.1
aagggtcagaagaatgatgcttgccgctattttgaggaatgaagttggatggttcgatgaggaggagcacaactcaagccttgttgcagctcgccttgccacagatgcagctgatgtcaagtctgccattgctgagaggatatcagtgattctacagaacatgacatcgctccttacttctttcatagttgctttcatagttgaatggagggtttccttgctcatcttggcaactttccctctccttgttctagccaattttgctcagcaactatctctaaaagggtttgctggagacacagccaaggctcatgcaaagacaagtatgatagcaggagagggagtgagcaacatcagaacagttgcagcat

SEQ ID NO: 28328 - DNA, 223 bp, Glycine max
  Clone ID: PAT_MRT3847_125581C.1
attggacaaaaatatcacaagtcattggaaccaatctgttcacgggttgactgtgaatgttcgaaaaatgtttgtcaaactggatgcagaattgtttcaagagtgtcacaggcagtttgaagatatggaggctaaacccaaagaattagaagtgcaaatggaatagaattggaatagactggcagaggcaacttcacataatggggaggatatggtcacagct

SEQ ID NO: 28329 - DNA, 122 bp, Glycine max
  unsure (1)..(122): unsure at all n locations
  Clone ID: PAT_MRT3847_125582C.1
gagaaggaaatcanaaatggttattgttgtcttccttgctggcgcaacaggaatccttcaacctcattctttaagaaccagaatattaaaccttatcccttaaggccaaaaaaaagtccttt

SEQ ID NO: 28330 - DNA, 134 bp, Glycine max
  unsure (1)..(134): unsure at all n locations
  Clone ID: PAT_MRT3847_125583C.1
atcgatttgagtganaatagtnttcatggtcaagtntcacctaagtggggaaagttccatagcntcacnagcctcatgntctcnatnantaatttgtcaggtgttannccaccaganctaggtggancgtncat

SEQ ID NO: 28331 - DNA, 740 bp, Glycine max
  unsure (1)..(740): unsure at all n locations
  Clone ID: PAT_MRT3847_125584C.1
ccgaaagagaaggaagagaaactatggcgtccggtgaaccgagagagaggcacagttgagtagcaaagcaatgagcgcagtgggtgggtttactctcactctcagtcccatcaatttgaaactcccccttctcccttccaatcgcctctttaaccgcactcccttcaaatcttccatttccttctccctacgctccaacgacgagcaacaacccctcggcctcgacatcgccgcactaaggtcagcttccgtgaggctcattgatgggaatcagatcatggtcggagttgtgtccaagactctggcccgtcaaatggcccaggattctgaactcgacctggtgatagtatccccagatgcagatcctcctgttgttagaatgatggattacaataagtataaatatgaacagcaaaagaagaaaaaaggacagcagaaaagaagtgctgctaatcggatggatttgaaggagctcaaaatgggatacaacatagaccaacatgattattctcgtgcgtttgaaagctgcccagaaatttttgaaagatggtgacaaggttaaagtcatagtgaacctcaaaggccgtgaaactgaattcaggaatattgctattgagcttattaaacgtttccagagtgatgttgnnngagcttgcaacagaagagactaannagctgtcgtgacagaaacatgtncatagnntatgggttccaaagaaagccgctctacagaaagctca

SEQ ID NO: 28332 - DNA, 430 bp, Glycine max
  Clone ID: PAT_MRT3847_125585C.1
ggggttaaggaagataaactatgcgcgagagtgaagcgagagaggggcacagttgagtagcaaagcaatgagcgcagtgggtgggtttactctcactctcagtcccatcaatttgaaactcccccttctcccttccaatcgcctctttaaccgcactcccttcaaatcttccatttccttctccctacgctccaacgacgagcaacaacccctcggcctcgacatcgccgcactaaggtaccgtactactctctctctctatttcactcatctcgttcgttgcaagcatagcatttatggattcgattgttcaagagcactttggttacgggaacaggtcagctttcgtgaagctcattgatgggaaatagatcatggtcggagttgtgttcagactctggcccgtcaaatggcccaggattctgaactc

SEQ ID NO: 28333 - DNA, 877 bp, Glycine max
  Clone ID: PAT_MRT3847_125586C.1
ctcttctgttgagtgggagcccgtcaaggaaggagggcgcgtgaagctcaagactcgttacgggaattttctcagagctaacggcgggttgccgccgtggagaaactccgttacgcatgatattccgcacaggaccgccacgcaggattggatcctatgggacgtggatgttgttgagatttatgtgaactctcccgcgagtcatgatagaccctccgctccgccgttgccggttgaggactctgttcccatactaacgagcgcacaggtgccgccgccgccaactgtttctgctagcttttcaaggcaacagtccaatgatttgtcacctaaggtggaagggagaactatatactaccatattgctgaagacaatggagaggtgttggatgaaggcgtgcaggggtattctttgattttcaaagggaatggagttgaagaattgactcgaaagtttgaggaagaaacagggctagagggaatcattgtgtgtaatcggagtccattgaatggaaagctttatcctcttcgcttgcagcttcctccaaacactgtcaccatgcgggttgttttggttcttcccttgtcaaatttggcaagagactttgaggaacaaggcttactgtgagaagccttattgagttttccaacgaagacctatgtatatgtactgatcgaagcgagttcagaatttagcaattaatgtgttctagtccattgcatttattaagcaaagttcatcgtggttctgtgtgggaagcttagcgttgtcatgggatgggtcataaatgaaatattcctttatcaatgacatgtgctatatgcgattctgacggtggatttttgtggggctttctttttattcaactcagcttta

SEQ ID NO: 28334 - DNA, 480 bp, Glycine max
  unsure (1)..(480): unsure at all n locations
  Clone ID: PAT_MRT3847_125587C.1
gttcgttccaggaaggtttcccgtcatcactgtatgacgtcctccttctttggggggggggggggggtgaacacgcaaaagagatgaaaagaggaacaggctgacggcgccagatgggatgaatagcaaggcatgagagctaagtacccgtaataataagtctatgccggaatggtcatcatacaaaaagagggacaaagcaccgtgccgagaaaaaacaagagacgagcttaaacggcacgacgagaaggacacgtattagttaatgaaaagaaagccaaaaagaaagtcgaataaaataaaggatatgtggagttgtgcgggaacagtaaaaaaggttattgcaagaaaagtgacagatgtacagaagcntggtatgtaaggcgttgtaatcaataattaaattgcccatggttcccgatttagttgttcggaggggcggccattgcaagccgatgcagaatagggataagagggttt

SEQ ID NO: 28335 - DNA, 357 bp, Glycine max
  Clone ID: PAT_MRT3847_125588C.1
ccacaatcaaacctcttctttcaggtccaattcactcgcttattcttttctttccatacacatgcagacaataagttcgaacaagttcaggactggcatggacttctttcaccgcgcgaaggcggtgcgcctccgcagccaccacgacaagtacctcctcgcggaggacgacgaggattcggtgacgcaggaccgcaaaggctcctcgaaaagcgcgcggtggacggtagaatacgtggctgaatacgataacataattcgcctgaagagctgttacggcaagtacctcaccgccttcaaccaccgcttcctcttgggcatgaccggccaccaggtcctccagacgcttccttcgag

SEQ ID NO: 28336 - DNA, 469 bp, Glycine max
  Clone ID: PAT_MRT3847_125589C.1
tacaagcacaggcgtgatcgttcttctagcagaaacaaccaacgagcctataactgtcaagctataaaacgccgggggaagccatatatgcactcaaacatttgtttacccgggataagtgtggtaagtaaacacacacagacgttttcggatcgggctgcacagttgacacgtatggtctggccgaacttcatgacatagcattgctgtcaggcgtgaacttagaaggagggagaaccgataacttcatggaaagactgagatccgtggagcctacacagacaatttcaggagtcatcctagaacatgagcctgtgtatgtaaggagggatattaatactgccaagcgttggctggttgctgactaaacactttttatgctgtgaatgatgcttcaacgcacagtgctcggggaagacgagcttgctcttggttactacaggatccacaaaggagtttctgcagatga

SEQ ID NO: 28337 - DNA, 765 bp, Glycine max
  Clone ID: PAT_MRT3847_12558C.1
attggacaaaagctattcactttgcaaatgtatacatagataatttatgtgttaagcttaattgcattaataacatgacatgttcttatttactggtatacaaaatgaagcaaaagagaaggaatacatttttcaaacagaacttacaagacatgagaaagaatataattagacagtgacactgcgtagcacaacagtctcaacagtgagtccagggccaaaaccaaataacacaccccattcaagtccttcaccagttgtgccaagtccattttctattgacttcttcctcatttgatccaagatgaacagcacacatgcacttgacatgttaccatactcgctaagcacgtgtctagtagcttccattttttcatgcttcaatcctaacttagcctcaacttggtccaaaattgctggtccaccagggtgtgcaatccaaaagatagagttgtaatcatcaatttctaagggtttgaaggcttcaaccaaggccttttcgatgttcttggagatgagtccaggaacatccttgaggagatggaaagtgagtcctacttggcgaaggtggccatcaatagcgccttcgctgtctggaaggattgtttgtgcagtccacacaagctcaaacaaaggcttttcagctggcagaggatctgatccaacaatgacagcagctgcaccatctccaaacaaggcttgccccacaaggctgtcaagatgtgtgtcactcgggccacgaaatgtgactgctgtgatctccga

SEQ ID NO: 28338 - DNA, 516 bp, Glycine max
  Clone ID: PAT_MRT3847_125590C.1
ggctcgagctactaccttctccagacaagagtttacggattcgaatgtgggttcgccgccaaagaagatggaggggaggactatatactaccacgttgcagaagataatggggatgtggatgatgagaatgtgcagggttattctttgaatttcaaagggaatggggttgagcagttagctcgaaagtttgaggaagagactgggcttgagggagttattgcgtgcactcgaagtcctttgaatggaaaactctacccttttcgattgcagctttctccaaacaatgtcaccatgcaggttggattggttcttccctaatctaaagtggcacgagaatttgaggagcaaggtatactatgacaagctacattattgctggagccttgaatctactgaaatgcaaggcctatgtacgttgtgatccaaggcgtgtttcagattttatgtgatagcatttaacaatatgttgcataactgcaactatttcaagtgagttcattgcatttatgatgcag

SEQ ID NO: 28339 - DNA, 774 bp, Glycine max
  unsure (1)..(774): unsure at all n locations
  Clone ID: PAT_MRT3847_125591C.1
cgaagcncggaatgggggtcgaggtcactcttattcatcctctgatccaaacgaagtaacgaaccaaccaatcaccctgtctttctgacccaaaaacatagtcccaaatcgaacaaaatcaatcaactaactcctccaacgttgttgttattatgcagacaacaagttccaacacctccggcgccacctcgatccgttccggcatggagctcttccaccgcgcgaaggcggtgcgcctccgcagccaccacgacaagtacctcctggccgacgaggacgaggagtccgtcacgcaagaccgcaacggatcctcccgcaacgccaagtggacggtggagctcatcccggagttcgacaacatcatcagactcaagagctgttacggaaaatacttgacggcgtccaaccagccgttactgctcggcgtgacggggcgcaaggtggtgcagagcttgccgcggcggctcgactcctccgtggagtgggagcccgtgcgcgacggcgcgcaggtcaagctcaagacccgttacgggaactttctgagagcgaacggtgggggttccaccttggaggaactccgtgacgcacgatatcccgcataggaccactacacaggattggatcctctgggatgtggatgttctcgagattcatgtgggggtccctggttcgcctccgattccgcactccgattcgcttgtttgtgagtccatactcttctgctgtacataaatctaccactctcagacagagtacagatcgatggagtcgcgc

SEQ ID NO: 28340 - DNA, 3999 bp, Glycine max
  Clone ID: PAT_MRT3847_125592C.1
ccacgcgtccgcacgcacgtgcacaagatggagtttttcacgaaaacgagcgtggtgaagctgaggagccacctggacaagtacctcgtggcggatgccgacggcgcgcgggtccgccagagccggaggagctccggcagggggacgtggtggacggtggaggaagtggcggcggaaggagggattaataataaggttcgcctgaggagctgccacgggaggctcttaacggcgacagagacgccgtttctgctaggcatgacggggaagacggtgctgcaaacggagttcgaggccggcgcggatttcaagcacgagtgggaagtgatacgcgacggatttcaggtgaggttgcggagctggagcgggaagtttctgagggccaacggagggacgccgccgtggcgcaacaccgtgacagtggacgaaccgcacagctcggcgactagggattggatcctgtgggacgtggagcctgtggaggccgtggaggagctggtggatgagtttttgtgtgagaatgacgacgtcgtttcgtcttttgcttcggatgatgtattatcggtggattcggagccggcgtcgccgatgtcggttttctctctcagttcgccgccggcgagacggaactccaagctgatgctgatgcgaaaccggccttgtctttctcgtaaatttcagttgaggccctgaggaggaaccccaacacccacctcgcatgcaacgccctccaaacaaggacacgattcaggtggtggtgctcctgtcagcggacatcgtggtacgtgaagttgtggaccaaggaatcacgtctcaagtataacttttgcaggagtctcaaactcgataggcttaaaacctggtccaatctagcctcttgggcttgtatcgtgactaggatgttttagcttaacactaaagtagttgtggaagggtacctcgggaagctcgtcagccattgtagttttaagtcagtcttaaccaatgccttagggagttaccataaggtttcgctggtgaggcagagcctctgcttccgacacaaatcaatctttctgatcatatattattcttttgtttttttaatttattctccatacacatgcagacaataagttcgaacaagttcaggagcggcatggatttcttccaccgcgcgaaggcggtgcgcctccgcagccaccacgacaagtacctcctcgcggaggaggacgaggagtcggtgacgcaggaccgcaacggctcctccaaaagcgcacggtggacggtagaatacgtggccgaatacgacaacataattcgcctgaagagctgttacgacaagtacctcaccgctttccaaccacctcttcctcttgggcatgaccggccacaaggtcctccagacgctcccgtcgaggctggactctattctggagtgggaaaccgtcaaggaccctcgaagcgtgaacggcggacggtatacgagaatgctgaatacgataacataattcgcctgaagagcagtaaaggccagtacccatgatattccgcacagaccgccacgcaggattggatcctgtgggacgtgatgttgttgagttttccgtgactcctcctctgttgagtgggagcccgtcaaggaaggagggcgcgtgaagctcaagactcgttacgggaattttctcagagctaacggcgggttgccgccgtggagaaactccgttacgcatgatattccgcacaggaccgccacgcaggattggatcctatgggacgtggatgttgttgagatttatgtgaactctgcccgcgagtcatgatagaccttccgttccttcgttgggggattggagctgtattaccatctcgaaagttcgaggaagagacagggctagagggaatcattgtgtgtaatcggagtccattgaatggaaagctttatcctcttcgcttgcagcttcctccaaacactgtcaccatgcgggttgttttggttcttcccatgtcaaatttggcaagagactttgaggcacaaggcttactgtgagaagcctttagagttttgcaacgaaagcctacgtatatgtagttatgtactgatcgaagccagttcagaatttaggaatatgttctagtccatttcatttattaagcagagttcatcatggtcctgtgagggaagcttagagttgtcattgcatggatcaaaacagcaatgtcctttcatcaatgacatgtgttataggcgattctgatggtggattttgttggggcttctttttcattaactccagcttcaatataagcatgtgttgcatgtggattccgggaattttgttgtttgatggtttatgtaattttttgttcatgattttttctctaggtggatataccgcatgtaaatagtataagttttgtcagcaatagaagattttcttttatcagatataaatataaatttctaatattcttcataaatttagaaatatttttgtttcacctgtggcttgtggtttctgggaattttgttgtttgatggtttatgtaattttatgtgcttcatgattttttctctaggtgatgtacggtatatcagtggtatagaggttgttattttaataatatatctttttaaggaattagaagtattttttaataaaaaatataaggctttccattattgttggagtcttgaatctactgaaatgcaaggcctatgtacgttgtgatccaagcgtgtttcaaattttatgtgatagcatttaacaatatgttgcaaaactccacctatttcaagtgagtccattgcatttataaggcagagttcaccaaggtccaatggaggtaacttaaagtttccatggcaaggttcatatcagcaatatcctctattaagtggtgtggaagggttgtagatgattctgatggagatgaaagtctttgttaggcttcctatttattagtgctatagctttaatctttagcctattcttgtggattcagatatttgttgtttctttctctgttggtaattttctgtttttcatgtttttttaaggtgtatcatttgtatagacaacttttatcagaaaactagaggtatattttttattcatatataaatttaaggtattagaagcattttttaatcagataattttttgcctcatttgtttgtatctaatcaagtgatcacatcgaatgattttttttttgtaattatttgaatggatatccaagatatgtagtcatttcttttttatgccaaacaatgtcaccatgcaggttgttttggttcttccctcgtctaaagtggcaagagaatttgaggagcaaggtatactatgacaagttagattattgttggagtcttgaattgaatctactgaaatgcaacttgtgattcaagcgtgtttcgaattttatgtgataacatttaagaatatgttgcaaagttccacctgtttcaagtgatccattgcatttataaggcagaattcatcaaggtccaatggcgataccttaaagtttccctggtaagggtcgtatcagcaatatcctctattaagtggcgttgaagggttgtagatgattctgatggagatggaagtctttgttggacttcctatttattagcgctgtagctttaatcctgtatcatgtggattcagatatttgttgtttcttgctctttttggtatttttctgtttttcatgtttttttaagatgtatcatttgtatagacaacttttatcagaaaagtagaggtatattttttcagtcaaaaataactttaaggaatttgaagccttttttaatcagatataatttttgcctcgatgatgagaatgtgcagggttattctttgaatttaaagggaatgggggttgagcagttggctcgggagtttgaggaagaaacgggacttgagggagttattgtgtgcactcgaagtcctttgaatggaaaactctaccctcttcgcttgcagcttcctccaaacatgtcaccatgca

SEQ ID NO: 28341 - DNA, 301 bp, Glycine max
  unsure (1)..(301): unsure at all n locations
  Clone ID: PAT_MRT3847_125593C.1
ttcacattcagcatattctttgctctagactgattataaccatttatttattgccattgtagcatacgaataacgagggataggaatagatgagtacaatgatcacccttacnnnttagttgcancgaancgannggcacctancatagctctgttctgaaggtacaatgatagacagaccagatcctactattaatatgaatatagtgttccttcccatccacagggaaaaaagatgcagggtgtgatcatggtttccacagagagggtgcgactgcagtcatggaannnacctcgtatg

SEQ ID NO: 28342 - DNA, 201 bp, Glycine max
  Clone ID: PAT_MRT3847_125594C.1
gcacgagctcattacaaaaatttataataatatttggacaatttacaataggttacaaacaaaaacaaattttttttaactgtaaacattagtttgttagctttatttgaaatatctggtgatggacaaaaagttatgataatcgtatctatcctcctgaattaatcttaaattaaagacatgctagattctcttttcatt

SEQ ID NO: 28343 - DNA, 347 bp, Glycine max
  Clone ID: PAT_MRT3847_125595C.1
aaaaaataaaaaagacaataaaaaaataaaaaaaataaaaagaagaaataaaagaaaaaaaataaaaaaaaaaataaaaaaattaagaaataagagctggagccggtagcctgatatgttctagcttagattgaatggatgtcttagagtttgtgatttgcctttccattggcatgttttatgtgacgctcattgcttgctcacattgtggggaggtacactgtttgcatgccgtgctttcctttaggggccataacacacttctctgaattgctggctgcttttctgttattctgaaagtcagtgcctggattagatgttattcgtgtcaacttgttggtgtaatg

SEQ ID NO: 28344 - DNA, 522 bp, Glycine max
  Clone ID: PAT_MRT3847_125596C.1
ggctcgagtgaacataaagagctgagaagagaagcatgttcgtcaatggcgattaagctctccgcatcagaaaaccgtgaaaaccaacctccaaatgaatggccagagtctccaagctccaacgcctgccaatccaaaacacctttctcacgcgccccatcgccatcaccaccaacacttcaccccctgaaggaaaactaagactctcctccctcttctcacactccgaagcgcttctccaaaactcatgccaaaacgctcgccacctccttcaaatccaagcccttctcgtcacttccagcctcttccgcaacccctacttggcacgcaccattttgagccgcgcctcacacctatgcgacgtcgcttacacccgtgtgatctttcgaagcatcaattccctcgacacgttctgcgtcaacatcgtgatccaggcctattctaacagccacgctccccgcgaagcgattgtgttttatttccgctctttgatgcgtgggtttttccccaacagctacacct

SEQ ID NO: 28345 - DNA, 340 bp, Glycine max
  unsure (1)..(340): unsure at all n locations
  Clone ID: PAT_MRT3847_125597C.1
acgaggaactagtctcgagttttttttttttttttaaagagagaatgcacaactttgattctgcagataaanaatcagaaanaaaataccttgttaaaacncttatgtgaanttctattaagtttaccgaaattgaagcgccacctttaattggaaatgcanntatatttagtgggaaacccacataaatttcattctgatgaantgttagaaaggggtgttgcaaagtattttctcttgaacctaagtagtccgggaagctagtgtttagaattcttaaggaaatcagaactttcttgggtgtcatgaaaggttctgggagagccccaaattaactgca

SEQ ID NO: 28346 - DNA, 452 bp, Glycine max
  unsure (1)..(452): unsure at all n locations
  Clone ID: PAT_MRT3847_125598C.1
ctcctagctggatcttaacggcgccttttttttttattttganacaacgcaattattctgagggatgaccaaccttatgacaaagaaaaaactaacacattaagagacaaccaatctcaaaaggtaaacacattatattactaaacagcacttgtgggtgtgaaggcccatgataggtaccttctatggcttacgccttggcttgttacctgggtggcatatatatacagcccacaaactcctgtgcgaagttcaggggaacacacttgacctacaaacatgtgccacaagccctgttgacaattggcttgaagggactgaccttgtttgacaatctcaatcatgtctgattacctttgttccccttacgataagaggcaaaggaaagcgaaatttatcttgctctttttatgtaacataagaaacttgaagaaaaccacagaataacccca

SEQ ID NO: 28347 - DNA, 502 bp, Glycine max
  Clone ID: PAT_MRT3847_125599C.1
aaaaggcaagggaagtttttttgaggaaaggacataaataaattttttacaaagcccagtaaaaaaaaaatagctcccaaagttatcaaatatcaaatctatgatatgaggacccaataccctatgaagcacggcccccccacccttttgtggggcccgatgttcaacccacgtccgggtaagggtccaacacggacacaacacccatactacgttttatttttgggacattacaggggtaaacgggcccgggcccggggcccgtatcggggtcaatacttcatagccaataacaagcaaaacggaagggtagtttcaatggggtataagtggcataaaaaaatttaaaaacataaactactcagtcctggacgggagcaaaaatataaagtggggaaccgagcttgttttaagaaaccttttgggttttcacccttaattggtggagcggcttttttctctaataaaccaatggggcctttccctttctcttcttttcaag

SEQ ID NO: 28348 - DNA, 1407 bp, Glycine max
  Clone ID: PAT_MRT3847_12559C.1
gcaactgcatatatagattacttgtgtgtaagcttaaatgaattaatagtaaaacaagttcttatttattggtatacaaaaagaagcatttgatgaaggcagggcagggaaaaaaaatcaaaagacagaataagccttgatcagccaacaatacatatgaaaaaagaaagatttgttgtcttgacaaaatatgattactgattagacactgacactgcggagcacaaccgtctcaacagtgagtccagggccaaaaccaaagagcacaccccaatcaaggccttcaccagttgtgccaagtccattttctatagacttcttcctcatctgatccaagatgaataacacacatgcacttgacatattaccatactcgctgagcacatgtctagtagcttccattttttcaggcttcaagcctaacttagcctcgacttggtctaaaattgccggtccaccagggtgtgcaatccagaagatagagttgtaatcagagattcccaagggttggaaggcttcaactaaggccttttcgatattcttagagatgagtccaggaacatccttgaggagatggaaagtgagtccaacttctcgaaggtggccatcaatagccccttcactgtctggaaggattgtctgtgcagtccaaacaagctgaaacaaaggcttttcaactggtaagggggtctgatccaccaatgaaagcagttgcaccatctcccaaacaaggtttaccccccaaggctatcaagatgggtgtccagttggccccaggaacgtccacttcagtgattttcagaccaaaaccacaagcacggggagcacccttgttgtttctggctaggtctttgcccagacgaagcactgtgccgccggcaaagcagccttgttggtacatcatgtaacgcttgacggagggacgaaggcctaatagtttagtgagctgataatcagcaccaggcatgtcgacaccactagtggtgcaaaagatgagatgggtaatcttggacttgggttgaccccattccttgattgccttagttgcagcctcttttcccaactttggtacctccataaccaccatgtcttgccttgcatccaacgaaggtgccatatatgcacaaacactgggattctccttcaggatctcttcgtttaagtacatgtatcgcttcttaatcatcgacttatcacacatgcgtttgaatttttctttgagctcggtcatgtgctcgctgttggtgatgcggaaataatagtcaggataggtactctgatccacgcagttgggaggagtggcggtgccaatagccatgacagtggcagggccttctgcacgttgtgcctgacggatctcttcaacactcaccatcctagatagctagctagctctcgagccgaatt

SEQ ID NO: 28349 - DNA, 542 bp, Glycine max
  Clone ID: PAT_MRT3847_1255C.1
cgacattataatggaacttagcattgaccacaaaatcactgctaacatcaaagcatgaataaaaaaaaagggtcgactttatacataagtgtttaacaaaactgataatgttagtgttcacccaaagtcacacatattagcatcggtcatgaccaacgccactcatcaaactactcaaaccaccaaattcttcgcacaatttgaatctcctttctactttcacaactgttttgaaagtaaaaaaaggtttggatcaacaatgtagctgatttaacaagagaaaatagatttcacaagctcggtcactagaatgttgtgtactgtattccacatgaagtgtgtcacggcccacgatgctaaataaatttagagcttcatcagtgagtcaaatggttgttctctattaacctcctcctggtctgatcacgtttctgcaagttgatgctacgggagtttaattcccaagaatctaattccccttatgggtttgccttggataggatctgatgcatggatccccttttgattttgattcacagatt

SEQ ID NO: 28350 - DNA, 467 bp, Glycine max
  Clone ID: PAT_MRT3847_125600C.1
ggtatatcactatcatgtgcatggtttactctatagtgacatcatatccaagatgtgatgagacagctcactgttcagacaagagaattgctttggtggccagggcaagcatactagtatatgcacatatggcatcttggacatatgtatctgtgcacactgttgagctgatactaagtttactatggagcatgtggaacataggatctttattcattgatctgacaacatgcgaacatgagacccatactctagcagcatcatactgatgaagagctgacagcatatagtctgcctacgatacgagagaagtcatacggtgctaaaactctgagatggttagaggaaacaccttatatgaaaaatatcattctcatgctcgcccttgatgtgacctgcatggtgataggagacggtattattacgccacctatatgtgggatggcttcttctgactgaagctgaac

SEQ ID NO: 28351 - DNA, 113 bp, Glycine max
  Clone ID: PAT_MRT3847_125601C.1
ccatggagactatctacatttatcgatgctttgggacgtgatccacttactatggaacccgcagattacctccctccacggagaactctagttgacctcttcactcttactct

SEQ ID NO: 28352 - DNA, 300 bp, Glycine max
  Clone ID: PAT_MRT3847_125602C.1
ctgtgttttttgttttaaataacaaggactaaaaaagtctttaaacacttattattttgatgaacactacgcttaaggaagctcttttatagcccaccattgggctatatccccccaccacaggaaaaaatataagaattccttgcccgggaggaatgtaaacgggagttaccaccgactgaacttggagatacttgtgtggggcttgcgttccaaaatatcttgcaaatcccctcatattggaccccccatatggaatggtctcccccaaggcgcaataaccgcggggcccaaaaatgc

SEQ ID NO: 28353 - DNA, 614 bp, Glycine max
  Clone ID: PAT_MRT3847_125603C.1
tgcaggagcagttgaggtaggtacacacagaagtgatggtcagagacttaagtgtgatggcattggtgaaaatgaagtgcaagagttcttggacagtgtgtgtccaatggagggggcactttcaccaggtgagtattggaacatatattcttctgcacatcaaatggggagctgcagaatgggagtcaatgagaaagaaggtgcagttgatgaaaatggtgagacatgggaggctgaagggttgtttgtttgtgatgctagtgtgcttccaagtgctgttggtgtcaatcccatgatcacggtccaatcaactgcatactgcatctctaatagaatagcagattatcttagaagggattaaataatctcagaagtttgttgaattttctttttcattagaagcatgctgttttagtttgattatcaaatttggtgtgtatttttactataatgttatgtatcaaatggaacttccatttccatgtatcctttagtaaagaaaaagtttatattaggaaatttgcatgatcaagaagatatcaacttcaacgaaaatttatgtggaattaatttacatgcggtttatcaataagaaaaatctgaaatttgaaccc

SEQ ID NO: 28354 - DNA, 395 bp, Glycine max
  Clone ID: PAT_MRT3847_125604C.1
gttcatcgtcggcagaagcatgtcattgtgatgatcaagcaatgcctacaacgtgccatgggtagaaaagtatcgtcccatcaaggtcgccgacattgtcgtcaacgaggacgccatctccaggaaactgttctcaaactaaacgcttccgatgataggtacgtttttgttatttctcgattcagttttcaattctgcacgattttctgttaatttatcctttcacttttggttatagatgatttgctccatggttgaactaacaggtggagaagttgagggaaatgagtccactttatgaatttgtcaaggaaggtatcaacatcaaggacattcaatgggcacagcactgattattatcaagctctcagattgcaatgcaagtgatgggaaga

SEQ ID NO: 28355 - DNA, 412 bp, Glycine max
  Clone ID: PAT_MRT3847_125605C.1
atatgctataccattagctttgttacatgaacgcaaaattgtattgggcgccctggattgtgacaaccttcccctgccatccattggctctaatcagcaacattcttctccgcatgaagataactgtctcttctttgctaaagctggggatggaacatatatgccaacaccgggcgactctacacacactacggtgcatgtctgagaaattgacaatccacaggaaccaccattattcaaaccatttcaaacaccacactccttgcctgactcatctagctcaatcacagaaacacctgctgccaaagcaccacccgccacaactgatatgcaagcgaactatggagctttgtctacagaagatgacgctacatatttgcgtttccctcacacaagataccctgccaccata

SEQ ID NO: 28356 - DNA, 228 bp, Glycine max
  Clone ID: PAT_MRT3847_125606C.1
cccacacgtccgtccacgcgttcgggtggctgtccagttggcagcaaggggagcttttagggaaggaataacaaatgctggaccgaggatgcttgagcctataatgtacgtagacgttgctactcctgacgaacatgtaggcgatgtaatcatggatctcaactcaagaagagtacagatcaacagttttggtgacaaacctgttggtcttaaagtggttgagttcct

SEQ ID NO: 28357 - DNA, 434 bp, Glycine max
  Clone ID: PAT_MRT3847_125607C.1
cgcagtcaactccatcgtaagctgacaactatcctcactgggcttaatggacagactaatattgctcaagaagagttagcgtaaaatgccgaacaagtggctatatgctctcatagtacaaaagctctagccttgcacaccaaccacgaatttaacgacaaatgtctacaccatattactgtacgccatagtattcggattaaagcacctattagtcaacaaaggaattgtcctaacaaaatgaatcgaccacctattgacagacactttgacataaacaatgtcaccgatgattgttcttgatacaaatcgatatcaaccttatcttatcattgcacagaatggtttgagatacttaattaaaagcactcttgaactggctaaagtgacatcacaactgtgtattgatgacgtgcatagagtgcttgctgata

SEQ ID NO: 28358 - DNA, 634 bp, Glycine max
  Clone ID: PAT_MRT3847_125608C.1
tcatcctctctctccctctctcttcgattttgtgaatcccagaagaaacctacacattcataaatcataacatatcttattcttaaaccacaatcattttttcatagggtaacgtttggtgtttttgagcacacgcttttgaaaaccaatgaagatggttctgtctgggttctctgtgctgctgcacattgttctgctctcaagactctgttttgctggcgacccaactgttttcactgaacttcgtgtatcctacaccactgtttcacctctgggtgttcctcaacaggtcatagctatcaacaagaagtttccaggacctgtcatcaatgttacaaccaataaccatgtaattgtgaatgtgtacaatgaattggatgaaggccttctcctttcatggtcgggggttcaaatgcggcgtaactcgtggcaagatggagtccttggcacaaattgtccaattcctcccaattggaattggacatatcagttcctagtcaaggatcaaatgggaagcttcttttacttcccttctcttggtttccaaagagcctctggaggctttggtccctttgtttgcattaatatgggaaactattcatattccttttgcactgacggataaagagatttt

SEQ ID NO: 28359 - DNA, 332 bp, Glycine max
  Clone ID: PAT_MRT3847_125609C.1
gacacatttctctgtttcaacttgcattattttctattccctccttcaacccttttgacattctctgcgcggacaatgccacagccttttctcagcttaccctcttaaactaaactccattgtcttctcttctccccccccatcatcatcatcacctctcttctcattttcactataataaatagcttcttcttcccattctctcttcccctgtagtagccaacagacaccccaaaaatgcacgagagatcgatgaaagaagctgctggcacgtgcccacagaggagaagaaccccttccttctcctcttcgcttctcgacgccatttaccg

SEQ ID NO: 28360 - DNA, 1366 bp, Glycine max
  Clone ID: PAT_MRT3847_12560C.1
gcaactgaatatatagatgaattttgtgaaaacttaattgcattaatagtaatataacatgttcttatttactggtataaaaaaagaagcatgtgagggaagcagggaaaaaaaggaagagaaagaatacatttttcaaactcaacatgaaagaatgaataagaaagaaaaggacttggtcttgcacaagatatatggattagacagtgacactgcggagcacaacagtctcaacagtgagtccagggccaaaaccaaacagcacaccccattcaaggccttcacctgttgtgccaagtccattttctaatgacttcctcctcatttgatccaagatgaatagcacacatgcacttgacatgttaccatactcgctgagcacatgcctagtagcttccattttttcaggcttcaagcctaacttagcctccacttggtccaaaattgcgggtccaccagggtgtgcaatccagaagatagaattgtaatcggagattcccaagggttggaaggcttcaaccaaggccttctcaatattcttggagatgagtccaggaacatccttgaggagatggaaagtgagaccaacttcgcgaaggtgtccatcaatagccccttcactgtctggaaggattgtctgggcagtccagacaagctgaaacaaaggcttttcaactggtaaggggtctgatccaacaatgacagcggctgcaccatctccaaacaaggcttgacccacaaggctatcaagatgggtgtcagttgggccgcggaatgtgactgcggtgatctcagaacaaacgacaagcacgcgagcacccttgttgttttcagcgaggtctttggccaaacgaagcaccgtgccaccggcaaagcagccttgttggtacatcatgtaacgcttgacggaggggcgaaggcctaatagtttagtgagccgataatcagcaccaggcatgtcgacaccactagtggtgcaaaagatgagatgggtaatcttggacttgggttgaccccattccttgattgccttagttgcagcctcttttcccaactttggtacctccacaaccaccatgtcttgccttgcatccaacgaaggtgccatgtaagcacaaacactcggattctctttcaggatttcttcatttaagtacatgtatcgcttcttaatcattgacttatcacacatgcgcttgaatttttctttgagctcggtcatgtgctcgctgttggtgatgcggaaataatagtcaggataggtactctgatcgacacagtttggaggagttgcggtgccaatagccatgacagtggcagggccctctgcacgttgtgcattacggatctcttcaacactgaccat

SEQ ID NO: 28361 - DNA, 152 bp, Glycine max
  Clone ID: PAT_MRT3847_125610C.1
gggacattcccctcccatatcactccaaaaaaaaacttccttcaaaacttaggttggaactcctggccatcttttggaccatttgatagagactaaatattttagtcttaagaaaatcaagtatttggtatgtattcattttttatctaagt

SEQ ID NO: 28362 - DNA, 359 bp, Glycine max
  unsure (1)..(359): unsure at all n locations
  Clone ID: PAT_MRT3847_125611C.1
cccactctttctcccactcctccggctgctaacacggaagactgtaaaatcaaagggcggggtcttacaggggggcatgacatcaaccatancctttnttcattaattttttctctttcttttctcatttgtatttttgtgtagtgttgtgttgggcatttggtattacgatatgatacgtgcactgttatgtgagcctcaaaatcaaacagtggcacttcacttttatgctttaatcttatacatccaaccccatctttcaaaaacccatcatccttacaaatatacacatagttcagggtccgctatcacattaaaattataaaaagtgacatacataggtaacgtgaaaaatttaa

SEQ ID NO: 28363 - DNA, 358 bp, Glycine max
  unsure (1)..(358): unsure at all n locations
  Clone ID: PAT_MRT3847_125612C.1
tcgaactattnnncctgnnnnccacnngtntgantagnnngttnntnttgtngtggnnntagnatnnngtnanngagngnnnncgnnanngntngangtagnngtgtnntgngttnnannnnanntgncnngtgtgtntnnnnnntnttgtgntacgttnanntnntntgtttnttgttnnnntntngagactgngtaggnngnnnggcatgnnnantcngcnttntntatntncnncnntnnntgttatatcntnncctgccnngnttgtantcgtgcntttngtntnngtgtgtttgnnntntnntgtnctnngtctgtngtntcggtnattattntgtngntgnantttcgtttt

SEQ ID NO: 28364 - DNA, 415 bp, Glycine max
  unsure (1)..(415): unsure at all n locations
  Clone ID: PAT_MRT3847_125613C.1
acgaggcggcgtggtccccgtcgccacgtgcctcaccgtcaaaggcgccgaagacatcctcaacaagcccaacgccttcgagctctccacgcgctccgacaccatgtacttcatcgccgactccgagaaggagaaggaggattggatcaactctatcggccgctccatcgtccagcactccagatccgtcaccgattccgagatcatcgattacgataacaactcctccaagcgctgacaaccacgcgctctcaatccacgcgcctctttcgttacctgaacagagtgggagattttcgacgatgtaattaagtttctggagttatgagctgaacaattttcttccaattggaaacgctcgattgtagattattatagtttgggttcggttnaaaactaaaaaaaaaaaaaaaaa

SEQ ID NO: 28365 - DNA, 832 bp, Glycine max
  unsure (1)..(832): unsure at all n locations
  Clone ID: PAT_MRT3847_125614C.1
ctgatcatgacatgtcttcagcctccaaagcaatgctctttcagcaaagaaacaactctttgttgagatctaataatgcaactctcttctctgatggtcatcaccaatcacaaatgttgagcttctcttctccaaagtcagattctttgttgatagataaggcttcctcaaatgccacattgcctttttcttcccaccactacgcgtccgtgtgtgtatgcaaaggttacaattcgggaagcataagcatgcatggggctttggctagtgtgagagggccattcactccatcacagtggatggagcttgaacaccaagccttgatctacaagtacatcacagcaaatgttcctgtgccaactcatcttctcattcccatcagaaaagcacttgattccgttggcttctgcaacttctcatctggactcctcagatccaactcgtgtatgtaattaactcttcttttacccaaaaaaacaaaataaaataaccctgtagttaaaagggactagttgttagtgctgtatatacactctttttttttaaaaaaaactttgaccttttaacagctactgtactctaaaattagtctcagtttaaaattttaaatagtactgttttagtatattctaaaggactagtttaatttaatttaatgtatgagtgggtataaagacatgggaagaaagaatgacaaaacttgcattattttctttgaataccttntggttgtatttcaatcaaaatcagagttttgcctgagtaatttacttaaaaaaaggtttgcattaaaggccattagacaacatggtatgctatgatcgggggattc

SEQ ID NO: 28366 - DNA, 632 bp, Glycine max
  Clone ID: PAT_MRT3847_125615C.1
cccgagagagagagagagagaatcttgtgcagcaacgcagtgttgtgagtgagttgggttttttctttggttttcctgagctgtgttttattctctttatctctctctctgccctctcatcttcgagctccgatggcgagcctgtggcgcgcggcgaccggcatgacggaaaacgccaccgattacgacggcgtcgagttctggtccaaccccgagcgcaccggctggctcaccaagcagggcgagtacatcaagacctggcgccgccgctggttcgtcctcaagcaaggcaagctcttctggttcaaggaatcctccgtcacgcgcgcgtctcgtccacgcggcgtcgtccccgtcgccacgtgtctcacagtcaaaggcgccgaagacatcctcaacaagcccaacgccttcgagctctccacgcgctccgacaccatgtacttcatcgccgattccgagaaggagaaggaggattggatcaactctattggccgctccatcgtccagcactccagatccgtcaccgattccgagatcgtcgattacgatagcaacaacaactccgccaagcgctgacaaccacgcgctctcaatccacgcgcctcgttcggtgatttctcctttttctt

SEQ ID NO: 28367 - DNA, 490 bp, Glycine max
  Clone ID: PAT_MRT3847_125616C.1
attcttttttacatattagagaatatatatgttagaccttttcatcaatatatgtcatctttcttgttttaaaaaactaataagctattttttttttgtggaacggatatttttaattgctttcctgattaaaatatataggtcgctccgattaaaatatcatatcatcataactttgcataaacgagcaaagcattggattcttttcctagcatcaatatatttggtttatagttagtgggtaatgataagagttaaataagaattatttttttctccataaaaataaagttaaagtatctttaaaaataattatttaataattatttatgtttaattgttaagaattgatatttttatttacggcttacagatataaaaaatggagggattaaaagtaagaagatgcagaaatacgaaaaaagatgaaggtttgagcatcaggtccagtccaagacacgctcaacgcacaacttacactaagcgtgaa

SEQ ID NO: 28368 - DNA, 992 bp, Glycine max
  Clone ID: PAT_MRT3847_125617C.1
aattcggcaccaggaatcttgtgcacacggtaagggcaaagccagcaacgcaatgtcgtgagtgagttggttttttctttggttctcctgagctgtgtttattctctttctctgccctctcatcttcgagctccgatggcgagcctgtggcgcgcggcaaccggcatgacggacaacgccaccgattacgacggcgtcgagttctggtcgaaccccgagcggaccggctggctcaccaagcagggcgagtacatcaagacctggcgccgccgctggttcgtcctcaagcaaggcaagctcttctggttcaaggactccgccgtcacgcgtgcgtctcgtccacgcggcgtggtccccgtcgccacgtgcctcaccgtcaaaggcgccgaagacatcctcaacaagcccaacgccttcgagctctccacgcgctccgacaccatgtacttcatcgccgactccgagaaggagaaggaggattggatcaactctatcggccgctccatcgtccagcactccagatccgtcaccgattccgagatcatcgattacgataacaactcctccaagcgctgacaaccacgcgctctcaatccacgcgcctctttcggtgagttctcctttttcttctttttccttttgttttactatgattgtgtatattactattactattatatatcgatcccgatcgtgctcgttcctgtgaggaaactctgtttatgtacctgaactgctatcaaattgtaatgatttttagggctttgtggattttgttttggatcaatcttttcgattatgttgcttctcactttcaactatagttacctgaacagagtgggagattttcgacgatgtaattaagtttctggagttatgagctgaacaattttcttccaattggaaacgctcgattgtagattattatagtttgggttcggttaaaaactaacttcactccataaatctaattcaatatctttgttttcttg

SEQ ID NO: 28369 - DNA, 1771 bp, Glycine max
  Clone ID: PAT_MRT3847_125618C.1
gccagtttggaaatatataatttttcttttccaaaccccattaaaacacttcgggcaccaccttgctttcacacagcttgtcactctgaagtgagatctctctcattcactcatctcccactcctcccaatccactctcatccctctcctcatgataattaattgactcatcgtcgtcatcaacaactctatctgttatttgaattcattcgaacacaattttcttctctgtgagctaataacaatgcaagacgcaattgggattccagcatgcttctcttctgcattgaaatcgagtgatgatcacacaaccgtgacccgttcaggccagagcgtaacaaagattgctgaccagtgccgcttgatcaccatgacatggtgcaaaaacatgatactccatgggctatcgggcacatgtccatgtacagaacaaagattgctgaccagtgccgcttgatcaccatcacatggtgcaaaaacgtgatactccatgggctttcggtatcagtggaaggcccagaaggaaaggcacaatactgctgcaaggtggagctgaagccatggtatttttggagaaaacaaggttccaagcgcttcatcgtacacggtaacaaacccgttgacgttttctgggaccttaaaggtgcaaaattcaacggcgagacagaaccaacctcggagtactacgttgccgtggtgtgcgaccaagaggtcgtgcttctgatcggtgatttaaaaaaagaagcttacagaagaactgggtgcagaccagcgcttattgacccaattttggtttcgaaaaaagaacacatttttgggaagagaaagttctctacaagagccaggtttcacgaaaaaggtaggtgccatgagatctcaatagagtgcaagaacaagagcaacaacaacattggaggagatggagataagattcagccagagatggagataaaattagatgggcacgtggtgatccacgtgaagcgcttgcaatggaagtttagagggaacgagtcgattcatctcaacaagatgagagtggaggtgtattgggatgttcacgattggctctttagtcctggtttgaaacatgctttgtttatttttaagcctgttttgtcatcatccaatatttctctgtcatcatcgcattcaatttcatcatcttcaccaccgttgtcatcatcatccacaccgttatctactcaaacggggagttctgggtcgctggaagggttcagtgtcagcgagtcttcagagttttgcttgtttctatatgcttggaaggttgagcagtgaaaattgaagaaaaaggatcgtgccatggtgtcagcgtaacggtattattattaatattgtgatggacttattgtatcatctaaggggaaaaataacgatgggaaatgacttggtggctcttcaagttatggagaaagaatgcaatggtaatgatgatgacgttgagaatggtttgggacatgaaagaaagagagagagatttggattgagaagggtggtgaggcccagagagttagttacagctggggttgaacaatggcgcgcataaatggacaaaaacggattgaatcgcacacacatgcccaataattctccatgcttccacgtcattctacatctgtcatctactgctttggaaattctttatctctctcgatctgatcttgagaagcgaactatgtatatgtaatatatgttttttttttctaaatatttatcaccccaaaaaagaaaaaaaaaaaaagaagaaaaa

SEQ ID NO: 28370 - DNA, 887 bp, Glycine max
  unsure (1)..(887): unsure at all n locations
  Clone ID: PAT_MRT3847_125619C.1
aaattgaaaaagaaatatccctaaaagggaaaccactccttaccaaccagaagaataaaagaaaataataancgattagggagattgtgcccttcaaggcctaaatttcttatgcctctcctctactcccatgcgagaaaattcttccctctgccacatcccattactgttttctccttccacccaccgatgttttctcctttctcctagtgcgattcctattcctccgtatactcgaatgactttcatcgaaaaaatgaatagtgccattagcttatgagtcagattctttcttcctagttctagcccaggctggctttcgttaaaaggggaaagtagatacctcaagaaattgttgagcatactcaatggcaagttggttcttcaactggtttttgagatcctgagcagataattggctcgacgaccctctcgattgatttgagaacgaatccattgcttccccgactgtgtagtgtagcttagaaactctatgtttgccgcctaatagaagcagcctggcaattgttaaataaccccaaaaaccctaattcagcatttctttatggcgctggacttgtagtccagcccattcccacattacaacttacaggctccattcattctacttctccgagttagaattattaaaattttgatcgaaataaaaggtttaaatataattttaatttttctattttataaaatttattaattttatattttaaaatataaatatttaatcttttattttttaaaataaaaattcataattttaatctaattttaaatttttttacatttatttttttatttcatacattttaattaattatattatttcttgatgatatcttaaacgaatatgttagatttatgattccatt

SEQ ID NO: 28371 - DNA, 311 bp, Glycine max
  Clone ID: PAT_MRT3847_12561C.1
attcccggtcgacccacgcgaacgatacaccactgcactgctctcactcactctatctctctctctctgcaactctgcgattactgtgacccttgctggttatactctctcctctctcattttatccatcatgactgtgctgagcttacctaaaacattggcatcgatcgggggtgccagagtgcttctcatactatgaccaatgccggggaagctgagcgccctctccggttactatgccgctacatgtgcccaaggagagacaagggacatctcctgcgtgctggctgctctgtagttcactgtgatga

SEQ ID NO: 28372 - DNA, 304 bp, Glycine max
  Clone ID: PAT_MRT3847_125620C.1
actttttgcgctgtgctctaacggcgctaaccctgtgctgacagcgacttgttgtgaagctgaagagtatcaatatctatgggtgatgagcgtccttttgcatttgctaacttgtatgtaacaacggattcccttaaaaaaagcgcattactatgtgcaatgagcgtgttttagtttttcccggatcgtgaagtggtccctgttgcccatctactgaacctctgagggctgtgtacactgatggtgcgggccgcggtttctgagaaaccgggtttactcccgctgatgtgcacgatcatagctc

SEQ ID NO: 28373 - DNA, 444 bp, Glycine max
  unsure (1)..(444): unsure at all n locations
  Clone ID: PAT_MRT3847_125621C.1
gctcggttttcggctcgagatcnnnaggggggcagaggcttctngctnggaggctctcctggncgaacgctggcgaagtggctgctagcctgtgatgaggagcactggctttataacttaccngggatgagaatcgatactcaaacaaaaaaatatcccctcccctctngagacgtgccnttcgtgcgcgggtnttggtcatctaaatgcccnctttggtagatttgcttctaaaaatgactaggacccgggacgaagaaagaaataacgttttcttgtctgatccggtgcctctaatggccctattggatgaatctaacatccttcggcgagatagggaggaggatccttgatcacctcggccctggggcctcccgagatttcggcgcccttctctttccgccagattctacttatgccgtgggcacctgtctcccgctctgg

SEQ ID NO: 28374 - DNA, 325 bp, Glycine max
  Clone ID: PAT_MRT3847_125622C.1
gttcgtgttcgtcttttttttttcggacctaaaagtattttttctggaaggcaaagctatatagaaaaaaatttggaccaagaaaataaacggcacaggcaaatagattttaaagaaaatgattcatggacaccaaataagatagtttctacttgggcaggctttgggacagcatttggcaggaacctttactcttcattttattcactatcatgcccaaaactgatagcccccacgccggcgatcaactaagctttcctttcctcatagagccccttcttcatgcggtacctctagggctccgtcgggggctctctatcagatt

SEQ ID NO: 28375 - DNA, 510 bp, Glycine max
  Clone ID: PAT_MRT3847_125623C.1
agcgttgagtgagaagttttatgtgaagctggatgtcttcacgtttaataatttaattcagggactttgcaaggaaggtcgtgttcatgatgctgcaatgatccattattcgatggttgaaatgtggctccaaggttttccaaacttggaatgctgtatgaggccatggcgctctatgagaaaatggtctcgtgtggtcatgttccggatgttgttgtatttgactctttgctaaagggctatggtttaaaaggagagacagaaaaaatcatttccttgcttcatcaaatggctgataaggatgttgtcctggactcaaaattaacttctaccatcttagcttgcctttgccacatgtcaagagatcttgatgtagagacaattcttccaaaattgtcacaacaaagtgaacatacatcaaaaggagcaaccattaaatgtcatgagctcttgatgaagccgaataatgttcatccagaactaaaattatatgttgcacaatagtcgttg

SEQ ID NO: 28376 - DNA, 370 bp, Glycine max
  Clone ID: PAT_MRT3847_125624C.1
gttaaaaacaatatttttggtcaatcaaacttttggttttgcccaacaatctgtgaaaaccattgtccaacacccaaaaattcctaggggggagggggcttaaccacaatacatatctgtggaacaagggccaacagaacatttttcggaaaaaaaaatgaattatattccaaagcgataaactcaattaagctggccaaaataacaaaaccctttgtcaacaaaaactatttttggggggccaaatacaacttctcgctcttgacagttatattctttacagaggaaacacagcttctaaaccttttgaaatcatgaaccagggtatacagatcataaaacaaagcttgttgacattcagccctttcct

SEQ ID NO: 28377 - DNA, 129 bp, Glycine max
  Clone ID: PAT_MRT3847_125625C.1
ggctcgatgctaaacctctcttcttctgatagattcacttctcgatttttctagttttggtttacattttcggtttccgatctaatatcgatgcgattcgccattagccggataatagagtccttcggc

SEQ ID NO: 28378 - DNA, 289 bp, Glycine max
  Clone ID: PAT_MRT3847_125626C.1
tacctggaatggacacaccaaatgggtttttgcctttaggtttttccccgagtatggccacttgattctctctgccgcatggataccaaggttaaaatgtgggattgtttcaatccttgccagtgtattaaggaccctcctgggacactctatttgccgttcggatatctagtttcatcaattactggtaccatgttttttacttgctgggtattaacataattttaagttttgggattcccagcacgggcaagggattttgacattttgcctcggacaaatttccttc

SEQ ID NO: 28379 - DNA, 667 bp, Glycine max
  Clone ID: PAT_MRT3847_125627C.1
accctatctatgaacactcctcattatcctcttctctagcaaagtatatatagtacggacactgttagttaactaattagttcttaatcaccctatggacaccattcgcagtaccaccaccatcagcgtgcaacaaagaacccccacaaagaaaaccaagcccaagaaaaagaacacccctcacccagtgaaggtagtgtacatatccaaccccatgaagatcaagaccagcgcatccgagtttagggctttggtgcaagagctcaccggccaggacgccgagtccccgccagatcccacccgcttccacggcctaattcaccctgattcctcctcttctgtcgatcacatcaaagaggaggaggacaatgttcacagtgtgaattgtgttgttcctcccgcagtcgccgacgaaaatatgagcctcgccggctgctacgaggaggaacaacaacaacagccttcctcgatggagagtataaataatttcgagccgctggacgacgacgacgttttcacgccccagatgatagagaacatctccgccctgctcccagcaagtgtattctatgaatcccctcatcttaatcactggtgataccacggatggatgcagtgtaattagttattatattatggtccttctatcctcggtaaggtcaagctc

SEQ ID NO: 28380 - DNA, 454 bp, Glycine max
  Clone ID: PAT_MRT3847_125628C.1
acatgcaacaatttaagcaaatcgataagaccagtctatcaaatgtgcatgagcactcgatcagtgagcaagaacgcactatgtcaagggtggcaagaaataatgtaactatatagtatagtatacggatcgataccttatatatcacagagcggtcattaaggggccttagctgatgatgcgggctagttccctttagacgaaggaacttatccatcattgtcttactgggcgagcttgaccctaggaattctgagggcagaggtagtattgagagtgatgcctagaaaagggaccgttctcacgggccagactgaagcaatgcttaaagaaacgctgtttacacaacatgctgaggctccacgaaatttcgcgagaacgagattgcactcgccttgaggggaatcaaacccctcagcgccactcatccgttgattctatgacatcagacgga

SEQ ID NO: 28381 - DNA, 120 bp, Glycine max
  Clone ID: PAT_MRT3847_125629C.1
gttgatttgtaatgtatgtgacatctagcagaagcctgacagaagtttattgagattatgaaatggaggtttacgcgctgagtggaacctgaaggagtggaaaaaaatggtggtgatgga

SEQ ID NO: 28382 - DNA, 317 bp, Glycine max
  Clone ID: PAT_MRT3847_12562C.1
caggaccaacaaatgaacacttgttaaaaaaatgggtatcgtgttttcaacaatccccaattgcagggggttaaatgcttatagtacactataacctttttagatacaattcaatattgtttggcccaagataaagttacctacaactttttgtggtgatcaactggacagtgaaagcatttccaccaatatactacaaagtttattttatccattgtttggaaagattcctgaaaaatttgaaaattttataacatgctagaaggcacccttagttgtatgccgacttcgatagtaaccatgctggaaaggtttca

SEQ ID NO: 28383 - DNA, 380 bp, Glycine max
  Clone ID: PAT_MRT3847_125630C.1
taaaactacaattgatctctttttttgaaaaaaaaaaaaaaaaacacggacaagaaaaaatatacctaaaataagaaggaaaaaaaaattactttttttcatacataaacctttttttgggagggtgtgggtctcccatctcagggaagggaagggttgtttaagttgattaacgtcaaggacggggcgggcaaaatttttcttattatcaagaaactccttgcttttggtccaaaagggaggttaccttttcttgggagaaaaggtgttttgcagtttcttatacatcgaattttttggcttgtccaccccagataaacgggtttctaacaaaccccgaaaatacatttttttcaatacaagccaaaaaggaatttggg

SEQ ID NO: 28384 - DNA, 348 bp, Glycine max
  unsure (1)..(348): unsure at all n locations
  Clone ID: PAT_MRT3847_125631C.1
gggangcacgcgtacgtaagctcggaattcggctcgagatcacaattaacatcaccttatcttttatcctcatttcaattgcattctgattgcctcaaataaacttatactccgaaaaagcaaacccatatgaatgtggcttcgacccaacaagttctgcacgccttcctttttcaataaaatttttcttagtagccattacatttctactattcgacctagaaatcgccttactacttcccctcccatgagcgattcaaacaaccaataccactacaataatagcaactgcctttattttagtcactttttgagctcttggcctaagctacgaatggaacacaaaaa

SEQ ID NO: 28385 - DNA, 407 bp, Glycine max
  Clone ID: PAT_MRT3847_125632C.1
tcgtacgggtggcaggagaccgccggagggggaagcttttattgcgagtgagagccggggctgagaccgctatgtgtttttccttccctaagcctaaaaataaaatgttttgggaatcagattccactcacattcggcatattgtgtttttccatggccggcgccggtgaatcccttcgcaaattcctcgccgcgaagcacgccgaagtggaagcccaaggcaacgccttgcgcgccctcaagggcggcaaaggcgggaaacccgaaatttacgccgcaaaagaagccctaaacccgctgtagctcgaaaaaagctccattgagcactctctcctcggcgggttcgacagccgcgagggctttcgtgagtccgtggtgaacacccttgaacggcgcctcttttacat

SEQ ID NO: 28386 - DNA, 451 bp, Glycine max
  Clone ID: PAT_MRT3847_125633C.1
ggaattcggcacgaggtttttttcttcaactactatgccaccggccaccgtttgccgtcactagagacaatttccggcaacgatacaccctccaacgccaccattatcatccctcccctctctccttccctacttccttatttgtcacactacaaaattttacacaccggacatcgatacatctcttcgtttatattcataaatacgataggataaggcataactctaaaactggtttcaaagcacatgtaactttaaagagacatatcttgtggcgctggttgctagagcaccgtgacctttctctttcgtacgatggttgtcctcctcggcaccattgacgtcggcaagttcaacactgcggagatagacttcgttgcagatccaccgtctacagataggactgtcaaagttctagccgatggtgcatggtgatgatgcaggtagctta

SEQ ID NO: 28387 - DNA, 323 bp, Glycine max
  unsure (1)..(323): unsure at all n locations
  Clone ID: PAT_MRT3847_125634C.1
ctcgagccgttttaaaacagctcaaccttggtgaaggaacacttatagatgtcaaaacagaagttaattacttcgaatctacagacccaataccggcaggagtctacaaattcataaagaacgaaaacccaacaaatcaaggaaatgctcctggaagtagtcaagctacaacaccagtaaaaaaacaaaactcttcgccctctacttcttccgtttcctcaaagacaaacaaagtcccttggggtacgatattcgaagccanaatcaaattatatgacaagagagccgatgaattcgataaggaagaactttctgatcaagtg

SEQ ID NO: 28388 - DNA, 382 bp, Glycine max
  Clone ID: PAT_MRT3847_125635C.1
aaagaactagggaagaacattgaatacattgagtttaaggggaaggaacatggctttctcactcatgattcgcactcagaggctgcggaagaggtcgtgcaaatcattaaacgattcatgcttgaaaattctcattaattagaatatatatgtgtgaaacactgaagatcatcaaaggggattaggcttttcatatgtagtgatttaaagttaatccatgttttctagtttggtaaaatgggtaataaaatgtacgtaggttgcacatggaattgaaaatgctgcattgtaaaattttaattgctatcgtttgattttttgtactaatattctaaaaaaagttaatttacgtagtaatcatttttgtcttaaaaaaaaaaaa

SEQ ID NO: 28389 - DNA, 227 bp, Glycine max
  Clone ID: PAT_MRT3847_125636C.1
gctatgaaatcaatgccaaccaaatgccaggcatctaaaagtagctcatccgaagtgttgctggtgctgattcgccttcatacttagatgacatggtagacttaaattcagaggtagctgcttctgtagctgctttaagaaaggcaatggatgaggctcaagtaagaatgaaggttgcaaaagagttgatgagaagaaagaaagaaggttttcctgatcgtgtcaaa

SEQ ID NO: 28390 - DNA, 767 bp, Glycine max
  unsure (1)..(767): unsure at all n locations
  Clone ID: PAT_MRT3847_125637C.1
ccacgcgtccgcacatgggctgcggcgggtccaaggtcgaggacttccccgcggtggttctttgccgggagcgaaaggcgttcctcaaagctgcatcggagcaacgctacgctctcgccgctgcacacgtggcgtatttccgttcgctgagagaaatcggcgacgcgcttcacaagttcgccgaacaagacctcaccaccaccaccaccggttcctcctctccggttctcacattaccttccgaaaccaaaagcatcaacaacaaactctcatcctcttccccttccatttctcacgccgattcccccaacggttctcacttacccctctcctctggatccgaattaagttctccttctcattcttcttcgcctcatattcacgattccccagaatccgacccgcctccttatggatactatcaaaattaccattacgcccactacatgaagaggtctgtccctcgtggaaaacccatggtctacgaagagcccgagagacacgtggcaaccaatggacaatggcctgatccttcttacggccacgccaacaccggtttctacgggtttccaggtggggattacccttattaccctcctcctggaccgtcttattctccgccgcgtnctcctccggcgccggcgtcttctcctcgcgtctccacctgggacttcctcaacttcttcgataatttcgacaatggttacccgagttacccgcctcggtttcggtcgagtgcgagcagccccaattctaggaagtgaggg

SEQ ID NO: 28391 - DNA, 342 bp, Glycine max
  Clone ID: PAT_MRT3847_125638C.1
cccacgcgtccgcatgaatgccagcggtctcttttgcagggtgctgacgactggttaagactgcatcaagtcagtcatccagattttcagtttttcagccgttgatgatgttaaggtgactgtaatgttattatactttggccatttatgaatagtacctaagtatttgccagtgcctcctatggttcatttcttagatgccagacttgatgaagttggagttaataacctaattaattgactgaaggaaaatgaaaattggagaaaagatgtttagcactgtccttggtaattttctgcactgttttcttccgtaagaagtgaaagaaatcagacaagtat

SEQ ID NO: 28392 - DNA, 405 bp, Glycine max
  Clone ID: PAT_MRT3847_125639C.1
ctgattcgtacattctttattggtcctcttgctcctagtctcacgtgaacaaagaacatggtcattatggtgatggtcggattgggactattggacttactcgttgccggtgtttcattaatcattggtttggccttcattaccttgattgcttccattctctgctgccacagcgttattcaacaacaccaaggatgtcttgtactgagtgctgaatcctcaaatcgatgcacaggagacattcgtgtatatcattgatgcaaacttggaaggaaaatggagatggagacaaggcttcgaatacatgagtaacattgaccaactatgctacacctagagacaccattttggaatacacttgatacctatttcagtttgaatatttccatagggcatcatgcatat

SEQ ID NO: 28393 - DNA, 399 bp, Glycine max
  Clone ID: PAT_MRT3847_12563C.1
actaggcggtgggcgcccgtctttttttaccttgcgcagaggtccgattatagaatgtgataagatgtaaaaactttcactacgtgggaacatattttatataaaagacttatatcttgttggacaagctacaattcacaagactaattactgagagggaataccctcgattgcaagcgccgtacatagggaacattactccatggcacaggccaataacaggccaaaaaagcaagctcaattatgcatatgcgacaatgggaacctgccgataatcaatacacacgggcgataaaactgtctattcttgttaggagatgagtgcgcttatggacatgaacatttccttgaaccgcggccctcagttgtgtagctattaatactatgctgcaccggttc

SEQ ID NO: 28394 - DNA, 223 bp, Glycine max
  Clone ID: PAT_MRT3847_125640C.1
gagctatgacagcgccatcctacagctcggaattcggctcgagctgcccccgcaccgatcactctacatggatcacggtgaagactattacgcaaggtgtactacaggctagaccactcatgatcgcataaggatcatcgccattgggcatgtggcacgtgtccactgtaggccctccactaccactgtgcacgcgtttcacaagcatgatagcatcgacaag

SEQ ID NO: 28395 - DNA, 311 bp, Glycine max
  unsure (1)..(311): unsure at all n locations
  Clone ID: PAT_MRT3847_125641C.1
cttccgncaaaaaaaacgaaaaaaaaagacctagtttttcgtgccgattctacaggacaatggccttcacccaacctaattggcggtggcggataagatgagtgcgtgggctgcatcaagggctgaacttggtctgcttgtcttatatgtgggcaacgctgattcaagggaccaaatatgcaaggcactgccctttggttaccaatgttttaacaacaaaaaacctggttctgctcaaattgtttacctaacaaccaatttgtttcgaaaaggcttgcgtctttttaaatttgccaattacctacatgctt

SEQ ID NO: 28396 - DNA, 546 bp, Glycine max
  Clone ID: PAT_MRT3847_125642C.1
gattgaagaacccttcttttgctccacgtttcttcactctcaaccgttcgactcgttcgatatcaaccgagttgactcagatctctaagttatggaggagcaattcatacttagagttccacctaatgtggcagagcggatagagcgtcttctgaatgaaaacaatgcttcttcatctgaagacaagtcactagatttgtcatttagagaggatggaagaagtggtacgtttatgattgggaatgaacaattcccagcttctctattggatcttccttgcgttgttgaatcctataagacttatgatgataactctttgattaagactgccgatattggtcagatgattatggtgagggaatctggtgatgctgctccagatgtaattgagtacagacatggcctcactccacccatgagagatgctcgcaagcgtagatttcgcagggagcctgatcttaatctgagcaagaagaaggggatgagaatgcccgaggtgctaataaaaaatctgcacctaagcctgcaccaaaacatgatattcca

SEQ ID NO: 28397 - DNA, 1275 bp, Glycine max
  Clone ID: PAT_MRT3847_125643C.1
cgcaaaccctctttctcctttgtcttcctcaccctatctcctcctccgcacactgtcgtctcgcaccaaacctgtaactgcactgctgaacctgcaaacgagttggggttcgttactatcacgattaagttatggaggagcaattcatacttagagttccacctaatgtggcagagcggatagagcgtcttctgaatgaaaacaatgcttcttcatctgaagacaagtcactagatttgtcatttagagaggatggaagaagtggtacgtttatgattgggaatgaacaattcccagcttctctattggatcttccttgcgttgttgaatcctataagacttatgatgataactctttgattaagactgccaatattggtcagatgattatggtgagggaatctggtgatgctgctccagatgtaattgagtacagacatggcctcactccacccatgagagatgctcgcaagcgtacatttcgcagggagcctgatcttaatgtatagttttcattcacataacatttctattaacatgcctctctgcctaatatatatatatatatgctctcataaatacttttttttattctttttcccatttttcagcctgagcttgtctcccgtgttgagaaagatcttctcaaaatcatggctggaggaacagcggacaatcttgatatccttacatctttgcttgtgtcaaatagcaatttagcaaaattttcaatccttaaatacaaatctatgactctactttgaattgctctctttaaaataagtagttattgtgatcattgctgttgcttatttctttcccttttacttattcctttcctcacttatagacatatggggtcatgggataaactagagtctctatttggatcagtgaaaatagatcaactttggttatttccttgactgagattctcatgtggaagcagctgagcaagaggaaggggatgagaatgcccgcggtgccaataaaaaacctgcacctaagcctgcaccaaaacatgatgctccagagaatcttactaatgcaggggaacttgacaggagtgattctaaggaatctgatgactcagtcagaccaaatgaatatttatatcacaatgatgaaatgaaaatctgtatagtgtacattttgcagttaaatttgaattccatccactcttaaaatctcacctacagtagattttccattgtaggtgatatgtatgcactgttctgtatattttacaaattatgcattttcttgctatctttt

SEQ ID NO: 28398 - DNA, 366 bp, Glycine max
  Clone ID: PAT_MRT3847_125644C.1
cgggaattgcaaagaacaggcagatgctagactctggcaaatttaatcttagagatcttttgcccaggtggacacctcctgtgagcctttcttcgactaactttgccagagtctcacatccgcctgttcttcgcggttactgcaccggcggattcttggcgctcacacgcgtgctacgctctctaagaatctggttggcagcatcttctcgtgactgtgctcctcagctctggggaacccgctccgtaactggcagcagctctccttcagcacttgcgcctcggacatgtgatcgacaatctacctgataaacatggagcacatttattcatctcaatatagaaaataacgataccccttcacttt

SEQ ID NO: 28399 - DNA, 493 bp, Glycine max
  Clone ID: PAT_MRT3847_125645C.1
ttaacttaaaagtaatgcaaaaagcttctataattccaagagagaattatgtgttacactactgtcatacatgttctgtgagaatataagaagctaaagcagaaatttgcatccatatctatatatgtctacattagaaagtaatccaaaaagcttctatatctcagagagaattttgtgagttacactactgtcatacatgttctgagactatatgaagaactggtagaaatctaggattcggcatttgtataaagcacttcaggctcttaaaatattccctcactatattttgacaaatcatttgctacaagaacttgggagattagaggaaaagcttctgtatcgctatatcaaagggataagaaagcatctcggttggtaacagtaagctattattcacatttgatagaaagatatatgtgacggacaaagatcaaagcagggcggaaacccacagttccgagcatgagaaagaaaccatagcaaatgc

SEQ ID NO: 28400 - DNA, 157 bp, Glycine max
  Clone ID: PAT_MRT3847_125646C.1
gattctgtgaaatcatgtgcagtggttccaagagaaaaccttcccaaactgggttaatactgggggacgagtatggtagacaagaagggctgcgtcatgaaatttctgctttgctcgagttttcggccgccgatgatggaagggctttcagagatgc

SEQ ID NO: 28401 - DNA, 390 bp, Glycine max
  unsure (1)..(390): unsure at all n locations
  Clone ID: PAT_MRT3847_125647C.1
gtcgnaactggaatcgggtcgaggcgtggttacccaagggtctttagtgattttgtatcggcggcctggtctctctgcgacgatcaagaggggagggaacgnccttatcacatagcgactatggggactttgaagactttggtggtgggaaactctggacaccctcttatggacgtgttttggtccttacacgcatacaatcttactggaccacacgcgttaatcataaggtggggagattcagagcatgctaaagacgcttcgcgaggctcaaaggaggggtcttgcttgagaaaggaccgaacgaagcttgagactgcccgtgcttttgggcggctgtggttgcataatattgtgagaagagagagaagaaatggatcctcactggaa

SEQ ID NO: 28402 - DNA, 249 bp, Glycine max
  Clone ID: PAT_MRT3847_125648C.1
ctctagccctgcagatctagcggccattttataaggcgcatctcattatcggaatttgaccagagtcatttggggagtgagacacggaaaaggcgcccccgctttcgattatatgcatagcctttgctgcttcaactctttccaccaagtaggtggagggccttcttcatgtaactctggcaaaagcaagagcagtcagtcctcacaccaggatcgctatacccctagttaaaggaaagccaacccccc

SEQ ID NO: 28403 - DNA, 204 bp, Glycine max
  Clone ID: PAT_MRT3847_125649C.1
gataaatcccacaaaacaaagaaacgtgtaaatccgtcaaaaggggaaaggtagctagaggaaaagtaactgcacacaacacatcacagcgtaagagaattggattctaagctcgagagagagagagagagagagagagaagagagaaaggatcatgtgggtgtggacaagagagggaggttagaagacggaggaaaaaggaga

SEQ ID NO: 28404 - DNA, 411 bp, Glycine max
  Clone ID: PAT_MRT3847_12564C.1
ccacgcgtccgagtacatataattattagttcaagtccatcaaagtacaagcatttgacaccacagtgtgaagttcacaaagatgccaacacacaaaagtagcttctttcattcccaatgaacttaataagtacatatatgcttgcctaaagagcgattccagcagctaagtactcctttgtcacattttgtttgacgtttatggttttggcacaggaattaagaaaaataatggttgttttaaacttcataaaaactcttgtgcaatttcttagcatatcctgtctttcatattaattagattatccctcatctatactttttttatttgctcactctatagtaaatggttaaagatatttgatctgtttggataaatttctccataaacacttctagtagaagaatatt

SEQ ID NO: 28405 - DNA, 168 bp, Glycine max
  Clone ID: PAT_MRT3847_125650C.1
cccacgcgtccgcccacgcgtccgtggacgcgtgggagaagagttaatatgctggcagaggtgaattataccttcgagcttctgaacttgagaaagagggctaggagatgatctgtactaatgttggttgcccggatgcatgggaacatataccactgagctgatctc

SEQ ID NO: 28406 - DNA, 510 bp, Glycine max
  Clone ID: PAT_MRT3847_125651C.1
cttcaatctagtaaaaattttgtgaactggtgaatttttcaaaattgatattttgaagtattatgtatttctgcattaatattttgctgatctcactgttcatgctcattcaagtgtcattctgaattgaatgcttccaggttcactcgctgttaaaggacttggttcacaaagctatcagtgagactttggtatgttccgggcagtacttatttcatgttcctattgtatatctttatgctgtatttgatgttcacaaagctattgtgaaactttggtatgttcccagcagtacttatttagtttttctgttgtatttattggtgctgtagttgtgtttggtaagttttcgtgcttcatagtctagtgacaaagtgcagtttttaatatcatttacaacaacaacaataacaacattatcccagtaggtgaggttgcctatatggatcagacaatgccattgtgttcatttaaaaaccaaaattgaaagatactatccatcatgggatt

SEQ ID NO: 28407 - DNA, 375 bp, Glycine max
  Clone ID: PAT_MRT3847_125652C.1
caaccagttcatctagttatcgaagatgagagcgaagtggagaaagaagcgcgtacgacgcctcaagcgtaagaggagaaaggtcagagcccgcagcaaataaacgactcgcctcctcgaacactgtcaccccgccacctaccatgacaacggctttgcgaattaacggcaatccttgatgcggttcgcaatcgactcccaactcagctctcggagtattacgtcatactctcggcaacggaggcacgaccgctctgagtgcggagcgtgggtcgactgcaatttatgtctcggactgtcgcattgtgggcatatggggaactggttgaacttcccttcgaggatatcaagcgtttactgcacaacactcaggcg

SEQ ID NO: 28408 - DNA, 184 bp, Glycine max
  Clone ID: PAT_MRT3847_125653C.1
tggacttgaagggaacggccctgattaccacctgggggtagagtgctgtaaatgctccaccaatgaaaggttccacccccaaaatccattgatcatcccaaccaaggtcccttttgaagatgatatccacaccaaatactccaccacggttgataccagcgtcctggatatggatgtgtgccaa

SEQ ID NO: 28409 - DNA, 257 bp, Glycine max
  Clone ID: PAT_MRT3847_125654C.1
gttcttgcttttttgctttccccacgggatcgttaaaaaattgcccaggtgaggctcgggaaataaattgaactcccactggggggggggggaggggaacgtaacatttttgggatgggggaaaaacctcataaatttacttcgtgggggtcagactcccaggtcgatgggtgttgttttgccgggcccctatgtgctgggggcgtcttctgcgggtcctatgtcgtcgggctggttcctgcaccgggcaccacctt

SEQ ID NO: 28410 - DNA, 505 bp, Glycine max
  Clone ID: PAT_MRT3847_125655C.1
aattcccggttcgctctcacgcgtccggtgtaattcgcgcacgcgtttctgataagtgacttgtgaatttagtagattttgatggatgcatcaaagggattggaagcttctggggagacccttcgtgcagaagtgaaaacctttttcgattctgctcctcctttgcagaacagtgatgagataactcacaagttgaattagttcattcaacgcaattcttcagctaggagaattgtttgagtgacttctggtggcaccaccgcgccattggaacaacgatgccgttcgctatgttgacaattacagttcaggtcacagaggtgccacatccaccgagtattgttgcacttgccttgttaatgttgaataaaacttctgcaaattcttattttaaattctcttgtgaagaatagtttgcgtggttttgtcttaggtatttttagaaggctggatatgctgtttatttctgtaccggaagtgagttttgccctgaaatgtttccttg

SEQ ID NO: 28411 - DNA, 545 bp, Glycine max
  Clone ID: PAT_MRT3847_125656C.1
catgccttccattaattaccttgatgtttcctcaaataaattcactgggatgcttttcaataacatgtcatgcaatgatgatctccactttgtaaatttgtcttcaaatcttctgaaaggtgaacttcccacttgtttagaaccaaagaccagggttgttctgtatgctagaaactgcttatcaaacaagaaccaagatcagcacccttcagatttctgcagcaatgaggctttggcagtgacaatcataccccatcagcagaagcacaagagaacaactagtaaagcaattatcgtatcaagtatgggaggtcttgttggtggaatgttgattgtaggagtggttatcttggttgttagccgagttcataagaaacaagtagggaaaataccttcaaagtccactttggagcatgttatcagccaggagcacaatgaagatgaagtgaaaactactacaaggtccataatggagcatatcatcaaaagggttcctgacaaaggtgctgtggaaacactaacaagatccataaaggagtacgtca

SEQ ID NO: 28412 - DNA, 259 bp, Glycine max
  Clone ID: PAT_MRT3847_125657C.1
gacctaccttaccctatcttttcccttggttgacatggttgattgctggtgggcattgagcacacatttgtaagagaaaagaaaaagaaagtaggatggaaagacatgggccgagggaggttatgtacgtcaatgagatcatgaataagtattcgacaaatggtacagaaggataagagctagatagaactgtggaggatactgttttgggggtatggcgtggaacagaatgatcacttggcactggtatttgggagtg

SEQ ID NO: 28413 - DNA, 303 bp, Glycine max
  Clone ID: PAT_MRT3847_125658C.1
catagatcacgagacctatctatgcaacggtgcatcatttgattgcgcaatttgaacaggttcatcctgaggggtgacaggactaatattcatacagtggattccctgatgcataaatactatatcaccgatgcgctgatagatactattactagacgcacaactgataggcgatgtgatacactgccacatgaactctaggattcatttgagaacatgaacacacagagatgatccaagacataaacctctgaaacaggttatgattgcgactcttgcgtcgatactaggagtatatcacaa

SEQ ID NO: 28414 - DNA, 1021 bp, Glycine max
  Clone ID: PAT_MRT3847_125659C.1
ccacgcgtccgattttttgtaggaataatcaatcatggtaaaaaaaaaaagcaccttctctattttaagtaattcaatggcttacactgcaagtcttgtgttcttagcttccactttccttatcataaactttcctcttctggcaaacgctatcggatgcaatggaccatgcagaaccctcaacgactgcgacggccaactcatttgcatcaacggaaggtgcaacgacgaccgcgacgtcggaacccacatctgcggcggcggaatgccgccaaatccgccaccaagcggcggaagctgccagtcctcgggaaccctaaattgcggcggaaaatcgtatcctcagtaccgttgctctccgccggtaacttcctcgacgccggcgatcctgacgctgaacgacttcagcgaaggcggcgacggaggggacccgtcgcagtgcgacgagaagttccataacaacacggagcgtgtggtggcactctccacggggtggttcaacggcagttcgctgtgtttgaaaatgataaggatcacggcggggaacgggaggaacgtgacggcgaaagtggtggaccagtgcgactctgttaacggctgcgacagggcacacgcgggtcaaccaccgtgccgtaacaacatcgtggatgggtcacaagccgtgtgggatgcgctgggacttgactctgacgtgggagaagcgcgcgttacttggtccatggcttgaatcaaattttaaccactaaacaagaaaaatgaataatgaacaaggatcgacaagcattatatcatatggcttgttttcttcttaatttgcgctttttattttgtttttgttaccaaaaggatgggaaatgaaatgctcacatgcatgaacattccattctttgctttggttttaaataataataaaattatgctgatcactgcagttatgcactcatttgatatattttgctgcctcaacacatatatatgttgaacactatttgctggtcctgctttctatatttctcttctt

SEQ ID NO: 28415 - DNA, 500 bp, Glycine max
  Clone ID: PAT_MRT3847_12565C.1
ccacgcgtccgttttgttcttcgacagggaaggtggaaagatgcgataagatctgaactcatctctgacagtgccactgtacaaacgggaaatactcctctaatgcagcttgttcaagatgcggagttcgattcaagtggttttaagatacctggcctgaaagttaattactggctagatgagaaaagcactagcacagcagaacctgattcatctccatttattaaaattgaggcagggttggacatgcagataaagtgtcagcatagttcatttatacttgatccatttacagataaagaggcgagtctttctcttgatctaagttgcattgatgttgagcaacttattttgagagcagtttcttgcaataggcacacacgcctttttaatattcagagacaactgtgcaaaaatgttccaaattttcaagccccataagatgttgtcttgacacgagatgtttgcacaaaaaaggacccattgatgaatgcggagaa

SEQ ID NO: 28416 - DNA, 379 bp, Glycine max
  Clone ID: PAT_MRT3847_125660C.1
gtgtttttgttgctcatatttggacaagagattgcgtgttttatggagattgtcgagataaggaaatgaagtgctagagggggatggcatgaagggacaagttgaattaaaagtagggaagggtgactgatgacgaagcatcacattcactggtggttgttggcttgtccttgtgtggttctgctttatcttaatttcatgtcatgtgctgttcctcttcactcctcctttggtccttcatcactcatggacccctttctttttttctgttactcatttcacctatgtctctgacttccttctatctctcttggcacactatttcactggggataaaaaagaaataaactagtgttgcacaagacacactatttctaat

SEQ ID NO: 28417 - DNA, 226 bp, Glycine max
  Clone ID: PAT_MRT3847_125662C.1
ggtggatttcttgggattattagcatatacatcttatggatgtagctacttgcttaatctccacaccgccggcggtcatgctgatctggtttacatgccttctgtgcagattgccaaagacgtttaaaagatctctgatcaaacatcgcgcagcttcactttcatgcaactcaaaaaaattcttactaatgctccttcacccattcattatctctgtgtttcgaag

SEQ ID NO: 28418 - DNA, 435 bp, Glycine max
  Clone ID: PAT_MRT3847_125663C.1
caacaacgaccgcgccggcggtcaccggagaacaacacattcccggtcagtttcctggaccgaccgggctccggttacccggaaaccgccgcgtccgcttcagcctctcgccatccacaaacgcagcgttttggagtggcccagcgccggctgcgacgatctcggtgattggtctcttccaccgacccctagagggtccaccaaaacaccagattcgggttcgggtcaagttttccagttcaagaaagactattacgcgttctacgacaaggaatgttcgagaatcgcggagcacgtgtacctggggagtgacacggtggcgaagagcgtcgagcttctgcggcggcacgggatcacgcacgtgctcaattgcgtcgggttcgtgtgccccgagtttttcaaaaccgacttctctacaagaccctctggctgcgt

SEQ ID NO: 28419 - DNA, 369 bp, Glycine max
  Clone ID: PAT_MRT3847_125664C.1
gggggttaataaaattgttggtttttttttttatctcaagtttaaaagaaaaatgaacccacaagtgttgtaatggtaatagtcgtagtaagcatccaaaattacaatgggctgggtcatacctaataaattaattaccaatgggaatatgtttggctctcacttccatttggtggcaacaatggcggccaaaaccacaaccctttgggaggtgccccattcattggcatacccagcaatgaccttcaccatggtatttcccaagaccatgggcaacggggagttaacgggtgggggcccatcagggcccccgaagtcaacgggcacaagggggtcattacaccccgagggggtacccctgagcccaat

SEQ ID NO: 28420 - DNA, 448 bp, Glycine max
  unsure (1)..(448): unsure at all n locations
  Clone ID: PAT_MRT3847_125665C.1
agtgacaaattggaagttcagaanaggccctgtgaggcctgtgcccctnaccaaaactgcccannnatcntgganacagatcatgcnactgcatgccaatcggggctcggctctgcncggttgctgcccaaactnggtancgggaaaggcncgttccaaancaagnagggcnccctctctgtgggaaaacnctngnaaattgggtntgctngggaaggctngggnagggctttgcnaggctngcgcccaaagtnttccaaggccctgtantntttggggggnaaccaaggctttgaaaagaanagggtntnattnggcccctnccaaaggggggtgcccccccaaaacaggcaanagggtntttcncgggttgganaggctntgcaaagggatntgtgtnggctcgttaggaaaagangcanaggaaanagganggatttggaaagga

SEQ ID NO: 28421 - DNA, 318 bp, Glycine max
  unsure (1)..(318): unsure at all n locations
  Clone ID: PAT_MRT3847_125666C.1
atgntngtnnannngtannaanntnggaattcnganngngaggggcnnctcgngaataancaattgtnnntgnngtncaagnancnngtatcganaaganncctntgataatgngntatccncngtataaannntaannncnntcnnntgnnggntcaaggtnnaggntnaaactgacaaagannnagnncnngtatgggnnncatnagangaagattntagagattgnatntggtntnnnatgggagnaanntttnttgnattnttnngatngntnncttcattnngnatgntnnagnnnggtatgagggannggag

SEQ ID NO: 28422 - DNA, 514 bp, Glycine max
  Clone ID: PAT_MRT3847_125667C.1
gggaaacctttttctaaatcccaaaaccataattaagggaaacaaaaaacttctttggtaaaccaatttcgaggggggttcgcccctaatcgcccaaggggaaggggaggggaaaatttaatcttaaaaaaaccccccggcttttttcccatttaaaaagccggaaaaaacccctttttttttaaagacccccctttttaataattccctagggcccctaaaaaaaaaaaaggaaagctttaagcacccaaaatcattgttcccaactaggggggggcaccataggggttaaaaaacaaaaaagcattgttagtaccccgggcaacattgggcatcctacccctaaaaaaggccttgatcttcccattcagcgccttcccggaaaatccatcgccggaagggctttcattggtcaaagcaaaactgacccctgtttccacgttgctaaggggcccggggaagcccccccccttaaccttacaaagctggggccccttcaacgaccgggtggggg

SEQ ID NO: 28423 - DNA, 260 bp, Glycine max
  Clone ID: PAT_MRT3847_125668C.1
attgtgccaagtgtcaggtctgaaggaatacattgcagccaatcctgcactccaccatgaaaatggcaccacaattgttcattccaaattgtctgatgcttctatttctagtgctgaatatgaggatgaaatgcaggatgagttttatgatgcaattactgctgattcatcaacatcagacgaagaaagtgatgatgatcagaagcttgttctgcaggagccaagagtcaaactaaagaatatttcatgggcaatcacaa

SEQ ID NO: 28424 - DNA, 141 bp, Glycine max
  Clone ID: PAT_MRT3847_125669C.1
tataccgcgcgaggccactcaccattctgataaacatggctccatatcctaattaccacacacctcaaatattagcaccatatatattgtacggaccacatctatactacatccatgcatttgaaaatgcagatcacacca

SEQ ID NO: 28425 - DNA, 294 bp, Glycine max
  unsure (1)..(294): unsure at all n locations
  Clone ID: PAT_MRT3847_12566C.1
ccggaannncgcanncagagaaaggcnnnagggggaacagcncccccaagaggaagngcagcggcnacggcaagcangaggagaaggagaacaaccggnggngcggccncnggaggagcagcnggaaccangcnccaannnnacacagangangccccnggacncaagaacnccccaaaggnngnncgggaaggagcannggcnncanagcanngggggccanccnncangngangggcaagcngnaccccgngcgnagggaggcnnagagaanagancaagaagggagggcca

SEQ ID NO: 28426 - DNA, 295 bp, Glycine max
  Clone ID: PAT_MRT3847_125670C.1
aagctcgaattcgctcgagatcttcaaatactctatttctatcttccaatcctgctcctgggttgagtgatttttaaagggggagacctcctcaacctcgcccatttacaaagaaagctctctcccctattgaatggccacacaaagctcatgtgcctaccataactcatccttgaagagatccattccatgctaaagataattaatgctcctgattcaaatgattactattgatttactgttgaccatcaatcatgttgattcacaaagagcaggtccaagcttttccaaacaa

SEQ ID NO: 28427 - DNA, 610 bp, Glycine max
  Clone ID: PAT_MRT3847_125671C.1
aaaaaaaaaaaaaaagggggggggcaaaaaaaaaaattggtttatttaaacacaaacccggggaggggcacagcaaagggcccaaggattggccccaactaacaaaaggggacccccattaataaaaaaaaaaaacagaccagccccaaagctagttacccaaaaagggctttttaaaaaaaagaaacccggggcaaaagttgaaaaaaaatttaacccccttaaaagggaaaaacttttttgggacccaaccccccccccgggcaaagggggctttctccaccccccatttggattttcaaaaaaacccaggaaaaacccccccaacaggggaaaaaatggggggggcacccccggctcccccaaaaggaagcaaaactttcccctttggggggctttaaaaaaaaaaaaaaaatcccccccgtttggaaggaagggcccggattaaaacaaaaatttcggggagggccaaagggttttaaaccattggggaccctttgggagcaacttttccctgggagccattttacaaacaaaaaactttacgttttttggcccccaaaacaccaaaaaattgggcggcccttaaagagcccccctgggcccaaaa

SEQ ID NO: 28428 - DNA, 292 bp, Glycine max
  Clone ID: PAT_MRT3847_125672C.1
aaaacaccatcacataaacagagtgcattttaccacttataatggttgtattttatttactgtagtacactgtatctggttatggaatatggaccatcttgttgtttataatggtgattctgtttttttatggtgccattttataattttgagttagaacagtgaataaaaaaaaaaaaaaaaaaaaaaaaaaaaaaaaaaaaaaaaaaaaaaaaaaaaaaaaaaaaaaaaaaaaaaaaaaaaaaaaaaaaaaaaaaaaaaaaaaaaaaaaaaaaaaaatttgggggggggg

SEQ ID NO: 28429 - DNA, 132 bp, Glycine max
  Clone ID: PAT_MRT3847_125673C.1
agagtttttgatgtacctcactgaccaggccatggagatgagaaccagactttcttgagctatctatttcttttcactaatagcctaatttccaaacatagccttgggcaaatgtacagaaaccgaggtaga

SEQ ID NO: 28430 - DNA, 598 bp, Glycine max
  Clone ID: PAT_MRT3847_125674C.1
ccaatttattgtttcatacttcctaaaaactcaaaatcctctctttaccttctgtacaaggactctccactaatctagctaattaattaacaatcatatttctaacatgacttaaaaaatgcaacttgaattctgctagcatataatataacacatatattatatttgtatttccctgtatataacaaagaaggtagtgaataagaaagaaaccatatctgctgattacactatatttgttgctgttgccaccaaaaccgagagagatcaagctatctatctcttgttgtgtaaagggttggatcctgttggcactctgcgtttctcagacataaactctctttctctgctgcttcggattggagaatttgcccacggatgaaaatcttgatggcttgaagtagaagggcctgagaatttgatcctaatggcatgaactcttggtgtaaggaacagaagagcgaggaagaggaacaagtggaagtgcttcatgttcgtagttttgtttgtttaataaggcctcggagaaacaaaacacagagtgatggaaatgcaaaaagtttggtgtaggataggctttgtttatgttgtgcctcgt

SEQ ID NO: 28431 - DNA, 419 bp, Glycine max
  Clone ID: PAT_MRT3847_125675C.1
ggtctaaccccgccccttttcattcaaaaaaatggcggggaagaaacatcattaataatgtaactttgggcaaattttttagcggcggaaaacaataaatattggtttaatatacaagttttttgggctagtactaccgctttgttgatacatctaggggctgggctaattaacattttccttcttttttaaaacgggcaatcccccgccaaaaggcaaacggcaactgcacttcatgaaaaattcatttgaacattggcattggcaccctcataaaattcatcatcgccccggatgggcttggcttgagggggctctgaaaaaagaaaatttaaaatcaatagactaaactttggcccccaattgggccggatagggaaaaagggattttttcccaaacattttaacaattttttttt

SEQ ID NO: 28432 - DNA, 239 bp, Glycine max
  Clone ID: PAT_MRT3847_125676C.1
agtgagcgtatgaatcgaccacacaaaagtggtcagggcttgtctgattacagttctcagcttgcattgtcatctactctgtcattgcatgggaaccgataaaaccttggtcgaaaaaccatggctgaagaagatacaacttgcaagacccatcattttcgaggataacacagggtgactatctatctagcgcccttgacagcacccagcagctagctgtacgcttacattggacaatt

SEQ ID NO: 28433 - DNA, 1963 bp, Glycine max
  Clone ID: PAT_MRT3847_125677C.1
aagctcggaattcggctcgagcctcactcagctacaagggcagccatgttggttaggatcaataccttgcttcaaggatactcaggcattagatttgaaatcatggaggccatcaccaagtttttgaaccataacataaccccatgtcttcctctacgtggtacaatcactgcatcaggtgacttggttcctttatcatatgttgctggcctcttgattggaaggccaaactccaagtctattggacctaatggacaagttcttaatgctaaagaggcctttcaactagctggaatagatggtggtttctttgagttgcaacctaaagagggtttggcactagtgaatggcactgcagtaggatctggcttggcttccgtggtcctttttgaggcaaacttacttgtcattctttctgaagtcttgtctgcaatttttgctgaagttatgcaaggaaaaccagagttcaccgaccacttgactcataaattgaagcaccaccctggccaaattgaggctgcagctatcatggaacatatattagatggaagctcatattgtaaggcagcacggaagttacatgagattgatccacttcaaaagcctaaacaagataggtatgctcttagaacatcacctcaatggcttggaccacaaattgaagtaattaggcatgcaacaaagatgattgaaagggagataaactctgtaaatgataaccccttgattgatgtttcaaggaataaggcacgtcaagtctacatgctgggaatttccaaggtaccccaattggtgtttcaatggataacacccgtttagccattgcatcaattgggaaacttatgtttgcccaattctctgaacttgtaaatgacttctacaacaatggtttgccttcaaatctaacagctagtcgcaatccgagcttagattatggattcaaaggtgctgaaattgcaatggcatcctattgttcagaacttcaataccttgccaatcctgtcaccaatcatgtccaaagcgctgagcaacataaccaagatgtgaactctttaggcttagtttcttcaagaaagacagctgaagcaatagatatattaaagcttatgtcatccactttcttagttgctttgtgccaagccattgatttgaggcatttggaggaaaacttgaagaacactgttaggaataccgttagtcaagtggccaaaagagttctcacagttggcatcaatggtgagttacatccttctaggttctgtgagaaagacttgcttaaaattgttgatcgtgagtatgtctatgcttacattgatgacccctgtagtgcaacctaccctctgatgcaaaaattgagattagtcctagttgatcatgcattacaaaatggtgacaaagaggtgaattcaagtacctcaattttccaaaagattggtgcctttgaggaagagctcaatgcccttttgccaaaagaggtggaaagttctaggattgaagttgagaatggaaatcctgccattcctaaccgaattaaggaatgcagatcttacccattatataagtttgttagagaaaatttgggtacaactttgctaacaggagagaaagtcaagtcacctggtgaggaatttgataaggtatttactgcattgtgtgaagggaagttaattgatcctttgttggactgtctaaaagagtggaagggtgctcctctaccaatatgctgagaggctgctaccttttttcgtaagaaaaccaaaatttacttttcattttcctatgatgtatgtttttataaagctattggacatgtatttgaaactgttataggaatttgtatttcaatttaatatatgttctttatctgtaaacaacaaaaaaaaaaaaaaagggcggtcgtaaacagtgagctcaatatacaaagtttaaagtcaaaacataagacaaaaattacttccttcaa

SEQ ID NO: 28434 - DNA, 499 bp, Glycine max
  Clone ID: PAT_MRT3847_125678C.1
ggaatgattgccccggagacgacccagctcacgtgatccggctggcgcgccactttcaattttcacttttttctagataaattttgtcagcaataaaagcatatatgatgaatttggcggggacaggtttgaattattggagacctatctgacaccggaggaaaagcgaacgggaaccctcagtgcaggcccatggcaatgtaacaagacatatagccgctatactggacacatatgcattggaaataaaaccttcattaataagtcgatcctgacttcctaagaaatgagagctgctttactcccaaacttctaatagcacatttcaagaacagaaagatgctcacgagcttataaaaacactgcatttatcatacccttaacaacataccatgcgaacaaacgccgtcttgggatacataatatctaaatggtgcccaacgcgaaagaacacctcagcgactgcagagatgctgatgatcatgcatacagcccgctg

SEQ ID NO: 28435 - DNA, 696 bp, Glycine max
  Clone ID: PAT_MRT3847_125679C.1
cgaacatgattcataataaattactacaatattttaacataacagttgatcaccgacataaacgggtatacacataatatatcaatattattataaagagaaaaaccatttcctagtatgcttcgaagtgcttctgtctgtaacaattgcactgagcatatatatatatatatatatatatatataatattaaaaccatttcacactgggcattccttctctttggcaccttctattccttgtccattgttattctctttattgataactgggtacacttcacacgttcccaacgggttcaccacaacaacgtttttcattattgcctctagtgctttctcctcctttgtagcaacttccttattgttagttttaccatttctgtaaattgcatagagcaacatctgaagcagtcccaatgtgaagccaagaatatttgggatagcaatgcatatgtccttgagtaagaggccatagaaaaaccacattacggcacttagggtgaggaaaagtgacaagttaaacggcataaactcgacattcttggttcgaataacctgagccacaatgctgagaggtgccgcaaaaacaccaactgcaatagatacacaaacccatccaacgacttggacacgtagggagccatgtatagcaaagtaggtgacgaggaagatcaaggcgaaggaacccacgttc

SEQ ID NO: 28436 - DNA, 223 bp, Glycine max
  Clone ID: PAT_MRT3847_12567C.1
gaatgggaggcttccacaaccaacgaacaatttgaacgaattgaattcactgtttgctgcgaacggcttctcccaaactggcataattgctctcatatgtgcgcacaccctcggattctctccactgaagcaagttcgacagtaaaatatacagtaccccagtggatcctatagtgtactaatcaatacgttatcgcaattgcaacaaatgtgcccgaagaac

SEQ ID NO: 28437 - DNA, 684 bp, Glycine max
  Clone ID: PAT_MRT3847_125680C.1
gaaagaaccaaagacatgcaagtactcaacttgggcagagaattcgagatgcagagcatgaaagagactgaaacaattaaaggctacgctgaccggctgttaggcatagcaaatagagtgagacttcttgggaaggactttcctgatgaaagaatagtgcaaaaaatcctggtcactatacccgagaagtatgaatcgaagatatcagcattggaggagtctaaagacctgtcaaccatcaccttgggagaactcataaatgctctacaagcccaggagcagagaagaatgatgagacaagaggaggtggtacaaggtgcgtttcatacgaaagcacaaaattcaagaggtggcaaagacaagaagaacaacaaatggaggaacgaaaaactagaaggcttcaacaagcagcaaggtgagacctttcctccttgtccgcattgcaaaaagacaaatcatcctgaaagaaaatgttggtggaggccagatgtcaagtgcagaaagtgtggcaatatgggacatgtagagcgaatatgcaagtccaaatcagaggaagcaaaggtggttgcggaggaacgagaagatgagcaactctttgttgcaacatgctttgccacaagcaatagttccagtgattcatggttaatagacagcggctgcacaaaccatatgaccaatgacctg

SEQ ID NO: 28438 - DNA, 222 bp, Glycine max
  unsure (1)..(222): unsure at all n locations
  Clone ID: PAT_MRT3847_125681C.1
ggtcgagctttgcggcggnnccggtgngtgacgggggnggcgnggnggngnnnttggtcngggggggggnngnntttggtgnttcgtncgncttgttaagcgcgattcttgcnntggtgctgnggctgggngctnttnttttnnnctttgncctgntcctttttgncgngnttttnctttttttgtgcgggtgggtnttggttttnggttttntttttgggt

SEQ ID NO: 28439 - DNA, 378 bp, Glycine max
  Clone ID: PAT_MRT3847_125682C.1
tgtttttattgaaggtttcaagcttttgtactccagggccaatggctacggggatcaatgtacctaccatctcatatgagagcaggtgaacactatgtatttaaatccccgacggacagagaaaactctgctgcagtgagagatctcagaacaacacaggtacaaacaggagcaagcctgaagcaacacccacacatttctaagcggtataagatatcatgggtagactctcatgtccggaccgttacatacactctgcaatgctcactgatgcgccttaacagaccaagcgtgctaatgcaaaaaacactatggcggttgcgccaatgataggcttaatgaccatccctgtggacaccatgctgactgcgaaaacac

SEQ ID NO: 28440 - DNA, 506 bp, Glycine max
  Clone ID: PAT_MRT3847_125683C.1
cggttgactttcaaagcactttgcacaaatcacattgcatcatcatgggcagggaccatcgcaatgctatcgcttaattaaccagccggataccgctagtccgtaccaattctgagtcgactgctcgacgcccgacgaagaggccccgaagggcccagacccaatccgtgccccgaccgagacgcaacgacccggtctagacgcggaagcacgctgagcacgtccaccgacagacgacgggttcgggactgggaccaccatgcccagccctgagaggcaatcctttccccgaggttaccgatccattttgccgacttgccttgcctacattgctccatcgaccaaaagctgtataccttggagacctgatgcagttattagtacaaccagccgtgggaggcactcagtcctccggattttaaagggccgccgggggcacaccggacaccacgcgacgtgcggtgctgttccagccgctagaccctaccttcggctgagcctgttcc

SEQ ID NO: 28441 - DNA, 542 bp, Glycine max
  Clone ID: PAT_MRT3847_125684C.1
ccacgcgtccgcggacgcgtgggcttcccaccttcacttcacttgtgttgtgtgttaatttctctctctacccaaacaaagaaacagagtcacgcacacaaaaacatgtcccgccatcgccggcaagcttcccaggtcctgccgccggagattctcgccggcgaagacctcgcaaagtcacttgacctgacccaacaagttgctgatcaagttggaaccaccaaaagcaccacttatttccaccaccaaccaacaacaccaaggcaggcaaatcccttctccggcgaccgccgctaagaagtcactgccaccgggaaaatctacctgagtagttagttattaccatatatgatcaaatggtgtatgtggattccataaaaccctgtgtttttgcttcattttgtgtttgtagttacctttaaggatccttttttttttctttttctttttttggtctttctttttatttgaataataaattgtgacataatgggagtggaaatccatggccatggaatatgtagccaccaatgttaatttgt

SEQ ID NO: 28442 - DNA, 535 bp, Glycine max
  Clone ID: PAT_MRT3847_125685C.1
agtgagaaacatacgttatataacagaataaaaattcaatttgaaatctaattcttatttacatgcatattgagatcatggaaaacaaatacattgtgtctctctaggccacataaaatcacctatgtacaagaaataagaactaagaaaggcatcgaaacaaaaggggagtaaaattgtcgagccacaatctattgtgagataccctcaaaagagaaggctcttctttccttaaaagaaatgcaaggaaaactaactgtaacatttgtttcaatttattccgttgaccaacaagaagacgtaactcttacaaaaaaaaaatggctagtgaatcaatatgtgacttcctcaagtacagtgaaatactgccatgtcagttggctcatctactgctgcatccaagacacaattacaaattataagctacaggattatgaggtctcctgaaagtaaattgaccctagagagtgcttgctgggattggcattgaaggggacagggtgaagttttttttatttaccaccgattttttttt

SEQ ID NO: 28443 - DNA, 480 bp, Glycine max
  Clone ID: PAT_MRT3847_125686C.1
cccccacgcgtccgtacggctgcgagaagacgacagaaggggaaattttggaggtttcagtttaactccttccgatgagagccatggaggattggaatgatgaacagtgtgatgacaccctcaccatgaccaccgtttctcagcactttttcggcgatgattctgaaacgccaagcttctccatctccatcatcgagaacatgaaggaagactatggcctattcgtgtggccctgcagcgtagttctcgccgagtacatttggcaacacaagcatcgattttcaggagccaccgttgttgagctaggtgctggaacttccatgcctggcttggttgcagcaaaactcggtgcccgtgtcactcttactgatgactccaccagattagaggtgcttgacaacatgagtagggtttgtgacttgaacaaacttgagtgcaatgtgttgggattgacatggggagtttggcatgcattcatat

SEQ ID NO: 28444 - DNA, 282 bp, Glycine max
  Clone ID: PAT_MRT3847_125687C.1
ggtatgataagcgaatcatattgatacacacctgaccagatgacaacacaaacactctcaatgacactaaatgctctactagagatgaccatcccttaactaaacagttggatgcagaaatgctatctaagagaacagcctttgttaacactattttcgcatgggaaagacgagcatgcaccggagggcggatcagggaaatattctctgccaagagaaatatgttcatagggcaagaaccagaccacctccacggaccatcaaagtcatcgcatcctacat

SEQ ID NO: 28445 - DNA, 572 bp, Glycine max
  Clone ID: PAT_MRT3847_125688C.1
ggctcgaggtttggtgtcttcaccttgttctttaacttgattagcggctcgaggcacaactgtttcttctgatgcttatggcaacttggatatctgtcatcagttagaagtttcagttaatgcagccgctgaaatgatttttgatctgcagaagaaacttgaagctacttattcggaacatgaaataatgtgcacatcatataaagaaatgaattcaaaatgtgatgatctgcttgggaggaatgaattggctgttagtctattgcataagatgtacagtgacctgaggaaacttgtgtttagtaatggtgggactatggatgaagataagatagatttacaaagtgaagtgctgcctgatctgctgaactataatagctatcaacccatcttgaaacatattgggaatatattgaccgagaagctggaacttgagtctgttaccaaggagattaagtcagaattgatgcacagggaaacagaattgaagaattgagatgagtgccttggtttagattctgtagtaagcttatagaaattgtctggtgtgctgaatgtgacatttcaagatc

SEQ ID NO: 28446 - DNA, 771 bp, Glycine max
  Clone ID: PAT_MRT3847_125689C.1
tacgggctggcgaagaccgacaagaagggggggttttagaacaaaacataaagtacatttatctaaaaaaacatttaaaccaacagaacacacctacctacttaaagggattatgaatattaagaaatgccttttttattatgtgaatgccaattcggtattgacaatttggcatggagattaccctttcttggaatgtgactttttgtgggactcgagcagagcaagcaaggtagcgtcttgaagagtttcaaagccaaaataatgtgttatagggtggactgtaaaacctgtgggaagtatacatgggggggatgtggtgatcacttgaccaccctctacgccagcattgatgagggaatgcactgtacgtgccgctcctggccgggtgttgttacacgcacacgcacaaccaccactcagcaacctactcaatccaataatcccaaccaagggaataggaattctcaaaattaacgaagctgcgttggattctgatacgcagcagttcttttcgggttatatgacacgcagagggatagagatcggtactgtcggggtactagtgtatgttaaaagtgttaagggggttgatattaataatgtaatgtagggatggtcatgtgaaactgaccaacgtagacctgcattcttttctatgttaatggatctattaataaagaataaattcctctgctaaaaaaaaaaaaaactcaaaaaaaaaaaaggtaatcattttcccttagtgattttatttacgccgaaaaaaaa

SEQ ID NO: 28447 - DNA, 522 bp, Glycine max
  Clone ID: PAT_MRT3847_12568C.1
cacaaatggacaaattcaccatcattttcaactcaattatacattatagctattattttgcatacaacctaacccgaaatttcatatattcataattgtcacacctttgattgttggaattcaacacattaaaccaaactattcaacaaaagaaaaattattacataattcaagattatcatagacaatctggaataattttcaaatgatacgtaattgagtttttaaactctttttttatattaaaaaactcaattacatatcacataaaatttcagtaggaccatagatatataatggtcttagattatgcaataatttatcttccagacacaatgatttacaaaaatattctaccacttctcaactgaagaaatggcggggggaacgatggggagagaacaggcgaagaggggagagcatccccatgaagcctggggaagcaagaccattgatattctggtgcttaagcatgttgtaacccacatgttcaggtcggttcccatttctaaattgtttatt

SEQ ID NO: 28448 - DNA, 569 bp, Glycine max
  Clone ID: PAT_MRT3847_125690C.1
gcgaaatattcatgcttgccgttggttgatggctcagagaatattgtgcaaagttccttaaagattgagcagccaccggttttgacagtctcagcatcaggatgtttctataatttcttaaaaagttaatcaagtatatttatagagcacggctaacagctcatgtctgtgataaaaatactacagtctatagtagaaactacaaaaaatgctagtaatataaacattcattttgacaccctcatgaaatcaaagttggtctcattatttattgtgtgtttagttatacttattaagaaaatttgttcttttctttctaatctcctaagagctttaaaaaaaatactttatccaaaataatcccaaacgaacacatgcttagtgggttccgcatggattttaatactttacccaataaagaatgtggtgttagcattcttctaaaaagtaacagggtttcaattcagagacggattatgccacaacattctcagattgttaacttacttattccacattttatcattaaaatgaaaagcaaacttttggagaatttcaagttaatctca

SEQ ID NO: 28449 - DNA, 400 bp, Glycine max
  Clone ID: PAT_MRT3847_125691C.1
tctccgtttttttttgtttgatgatattaatgttttgtttctaaaagttagcatttagtctggaaacgttatagtctcaaacaggtttcacgtctaaaaacgtttgatgattgtaaattgtagtaggatgttgtctaactgtattgtgcacgttaaattgtcagcgattatggctgaaggtctattgacccttatctgaccattgatgtattgactgattatgttaagagatatttgaagctcaaactggaacgtatactagttcagaagatgttggaggagacactaggtggagatcaacctatagccataaaaatttctggcatgaagttgcaataaagagagactgtaaattgatagagcaaatttcatgatagacaggaaagaatgttcttatttg

SEQ ID NO: 28450 - DNA, 582 bp, Glycine max
  unsure (1)..(582): unsure at all n locations
  Clone ID: PAT_MRT3847_125692C.1
gcttggcggaaacggcgtcggcgttggaggacgagccgcgccgttgccgacaaatagttcttcagcttcaacgtaggtttcagttcctcaaactagctcataagtatccttgtgctgcggaagacgagtgtcagtttcagttatatctacgctctgtttatttggttgctaggtagcgtttggcttaattacacttcatccatttgaaatgaaaggttcaaaacttggtgtgggtctcacaccactacactttactttaattcaaatatttcacctcttttcatctcaattcatttttctttaaacagcccctaagtaaatcagaggaaataactatggatattagttatgaaagtagtttagtttgtattgtaattaataataagtaataacggaaggatcaagaattgaatgctattgtttgagccattttgtgattacaaatgacgcagggaagagcatagatgatgataatctgtttgtaagccatgtgatcttatgttagtttgaggaattttgaacttcaaggttgcatgatttcaaacttcatatctaattctgcttcgtctgatctgcnnngat

SEQ ID NO: 28451 - DNA, 426 bp, Glycine max
  Clone ID: PAT_MRT3847_125693C.1
aactgcatcgtgggattttaagatctatgcatactagtcgctatgtcatcactaggatgaatgttggatattacacgaacaagggctgtgatcagagatactggactatggtgtgattgactgctcacaaaggtttatcaactgttaaactgacagggctcaaccgatgttgaatcactcagccttcagaggacaacatcatctggtgtgatcacatacactatctagagagtaactacagcgatatcttgaaagaatttaccgcactaactcgacggtcgattatcttgcgactacatgatgtctgtggtcatcagccttctgtggagctacgtatgcatacaaatatcttgcttgacatctgtgatgtagcagattggcagaacataggtattattcggagatgatgaaatcttgtgagaagga

SEQ ID NO: 28452 - DNA, 316 bp, Glycine max
  Clone ID: PAT_MRT3847_125694C.1
gtgcactcttgtgtggaacgacccattgttcttgaagaccaacgcattctatcaagcggtggggatgttgtttctgggacttcgggtcggatatttaatatgctccgcaaacagacacttcggacatactatattaaaacatgtctattgcatgatgctgatcaaatgctttcccgcgggtttaaaaagcagatctatgaaatattccagttgcttccatctaagagtcaagagagactttgatatgctacaatgcctcccgacgcacttgttatcacaacgaaattcatgaacaaaactgtgacgatccttgcaa

SEQ ID NO: 28453 - DNA, 293 bp, Glycine max
  Clone ID: PAT_MRT3847_125695C.1
tggggctttatgccaatcttcagattggaccttatgtatgcgctgagtggaactttgggtacatgttgcttccataatccatatttctctctctctctctctctctgagtgcgtgtgttaatatgttgtgattctcaatcgcattctttaatggtgtactggagaggaattactgtatggttgaagtatgttcctggcgtaagcttcagaacggataatgagcctttcgaggttggacttacaattccatcgacatggcttctctatattgtctcaagtcttggataatctat

SEQ ID NO: 28454 - DNA, 579 bp, Glycine max
  Clone ID: PAT_MRT3847_125696C.1
aaattaaattatgtatcattttccattcaataagttcaagtaacacttatacatgaaaaacatgaaatagtaatactaaaattgtgaataaaaataataataaactaataagaaaaagtaaaacacatagaaggtgcaatctagacggttctactctattctgtaggctttcctacctgttccttcagttgagcatgctttgcttggtttctcagccagtggttgcattggaagttgccgccactgtaacaaattatttcttgtcgtataatcatgttgtgtgcaccatttgtacaaatactgcaagactggaacaatagatagagggaatgaattggcttccacattagtgtagatcatcaacatttactcaaaatacctaacctcaaacccataagcaatgttacctcaacagaagttaaaaaaatagagaagtaacagagggtttagatgcaaatcaattgtaataaatttgacttactaaatgcacgtatcactccctaccagaaacaaaaaataatagagtaagggaaggaaggaacataaaaatagaagcatctcactaccggcacagacact

SEQ ID NO: 28455 - DNA, 1208 bp, Glycine max
  Clone ID: PAT_MRT3847_125697C.1
gtacctagaattcggctcgagaagtgacaagaccattgacggaagaggagtcgatgtttacattgccaagggtgctggcatcacggtgcagtttgtgaagaacatcatcatccatgggatcaaggtctttgacatcgtgattcgtgagggtgggatgatcagagattctgagacacattatggtttcaggactaagagtgatggtgatggcatttccatctttggtagcagcaatgtttggattgaccatgtttccatgagaaattgtagtgatggactcattgatgccatcatgggatccactgctattaccatctccaacagccatttcacagaccacaatgaggtgatgttgtttggtgccagtgacagttattctgatgataagatcatgcaaatcaccttggcattcaaccacttcggcaaaagattagttcaaaggatgcccagagttcgatatggttttgtccattcggtaaataatgactacactcactgggaaatgtatgccattggtggtagcaagaaccccaccattatcagtgagggtaaccgttttattgcccctgacaaccaattcgctaaacagattacaaagagggaatacgcaccagaaaacgtatgggcaaattggcagtggagatcaattaacgatgtgtacatgaatggagcattttttgtgcaatctgggcctgagctggctagcagaccattctcaagagaagacatgatcaccgctaaggtaggaaattatgtaggaaggcttacacgctattctggcaacctgttgaagtgcagagtgggtcgcccttgttaattatcctttttcccattaattctcttcctcacaatacccataatgatagaatggccaaggatagaaacaagaagagagaaagcaagaaaattgtatatatacgccatatgcttttgaaaaaaataaaaaattgattgattttatctctgccagaagatgcccgggaccggtggggtgtggtggttttttggggggtccccctcctccggttcagggggctttttcttgaatgttagctatcccttccattttttttttgctgaaactatggcagccaacatatctattaattattgagtatatagtcagctaccgcaactggtacttggttttagatgtttatgtatcaatgttatatttataactattaataaagacaattattttcttt

SEQ ID NO: 28456 - DNA, 396 bp, Glycine max
  Clone ID: PAT_MRT3847_125698C.1
cccacgcgtccggctatatcctacgctatggtccctaaagtgcttgttatggtagaaggtactgatcgagcaacatctaactgccatgggtcttactaccagacattccctgtacaaagcaaaactgctctctggggtacctacatggctccggtgacgtgtcgccagctcaaaggcttgacgcgaacgcacaacaccttatcagtggtctttctggtgctagctcttgcacatagtgcatatctgactacgttcttggagaccactcctgatcatattccaaagcgagtatgctgcaatgcttattcgtatgctactgccataaaaactaccaactaacatggttttgctttgtacgttcacgacactaccgcatataatatccagccttatggt

SEQ ID NO: 28457 - DNA, 233 bp, Glycine max
  Clone ID: PAT_MRT3847_125699C.1
tctcacgcgttcgcttgtcttcctctctctcaccctttgaaattctattacttgtattttacattctcaactcgttattgactgtggttcactcggttcatatctcatgcccaattttggtgtctcacttattggttttccacatatggagtgattaaacaagatggctttgggaaacggcagtctgttggtgggtgattaaaaatcgctgcctgaaaggacacaccctactg

SEQ ID NO: 28458 - DNA, 3138 bp, Glycine max
  Clone ID: PAT_MRT3847_12569C.1
tgggttaccgccactgccagtttacccggttccccggactctccccgggttccgaacccaaccgcgttcccgatctttttccattctctccctctgttaaaaggagaagctcacttcactttccattgtcacttgctcctttctcggaaccctctcttcttcttcttcgttttctcttcgcgagtgagaacccaccaagggtcaaaacccggtttccgcatttataacacctggctgggcctgcgcttacttgttggacgagctgaacttaagatatatattgcgatctaatttaattacaactctgtatgtgaattctgcttgcagctgatggcgcaaattctgctccatgggactcttcatgccactatctatgaagtcgataagctcaaaattggtggaggcaactttttaaccaagatcgtacaaaacatcgaggagactgttggtattggaaaaggtgtcactaaactatatgcaaccattgatctagagaaggcacgagtggggaggaccagaattattgaaaaagagattaaaaatccaagatggtacgagtcctttcatatttattgtgcccatatggcatcaaacatcatatttacagtgaaagatgataatcctattggggcaaccttaattggaagagcatatgtgcctgttcaggagatcttgcatggtgaagaaatagatagatgggttgaaatattggatgagcataaaaatccaatacatggacattccaagatccatgtgaagttgcaatattttgatgtttcaaaagaccgcaactgggctctaggcattagaagtccaaaatttcctggagttccttatactttcttttcacaaagaagaggatgtaaggtttctctctaccaagatgctcatgtacctgacaattttgtccctaaaatacaacttagtgggggccagacttaccaagctcatagatgttgggaggatgtttttgatgcaatcactaaagcacaacacttaatatacattactggattggtctgtctatactgagattactttggtaagggattctaggaggccaaagcctggaggagatgaaacacttggtgagcttctcaagaaaaaagcaagagaaggtgtaagggttttaatgcttgtttgggatgatagaacttcggttcctttgttaaaaaaagatgggttaatggctactcatgatgaagaaacagaggagtatttcgggggcactgaagtgcattgtgttttatgccctcgcaatcctgatgatggtggaagctttgttcaggatttagaaatttccaccatgtttactcatcaccagaaaattgtagtcgtggatggtgagttgccgagtggagattctaataagagaagaattgtgagttttgtggggggtattgatctctgtgatggaagatatgacactcaattccattcacttttcagaaccctggacacagcacatcatgatgactttcatcagcctaactttggtggttcttcaataaaaaaaggtggtccaagggaaccttggcacgacatccattctcgacttgaaggccctattgcttgggatgttttgttcaactttgagcagagatggaggaagcagggaggaaaggacttacttgttccactgagagagcttgaagatgtcattattcccccatccccggtaacttatcttgatgatcatgagacatggaatgttcaattatttagatccattgatggtggagctgcttttgggttcccagagactcctgaagatgctgccagagtggggcttgtcagtgggaaggataatataatagatcgtagtattcaagatgcttatattaatgctattcgacgtgcgaaaaacttcatctatattgagaatcagtatttccttggaagcacttatgcttggagtgctgatgatattaagcctgaagccatcgatgctttgcatctaatcccgaaggagctttcactcaagattgttagtaagattgaagctggggaaaggttcactgtgtatgttgtagttccaatgtggccagagggtgttccagaaagtgcatcagttcaggcaatattggattggcagaggagaacaatggatatgatgtacaaggatgttgttcaggcgctccgggccaagggaatagtggaaaatcctcgtaactatttgacattcttctgccttggtaatagggaggtgaagaaacaaggagagtacgagcctccagaaagaccagatcctgatacagattatatcagagctcaggaggcccggcgcttcatgatttatgttcatgccaagatgatgatagttgatgatgaatacataatcgttggatctgccaacataaaccagagatcaatggatggtgccagagattctgagattgccatgggtgcttatcaaccatttcatttggctgccaggcagcctgccaggggacagatccatggtttccgcatgtcgttgtggtatgagcaccttggcttgcttcatgactctttcctccaccctgaaaatgaagaatgtattaagaaggtgaaccaaattgctgacaagtattgggatatctattcaagtgagtcacttgagcatgaccttcctggtcacctgctccgatatcctattggggtttccaacgaaggagttgtcactgagcttccaggatttgaattcttccctgacaccaaggctcgtgttcttggcgacaaagttgattaccttccaccgatccttactacttaagtttcattttataagcttgttaataaaatatagtacttatgttgttagagtgagcaacaattgtaatggttctgtagagatggtttcattctgaagattgccttccagattttaacaatctgatgatgagaaggcaatcagcttgtatgactctatctgcattatgatacatgtttatcgggtttcttaactacgtttaaacattgtagctatatattgtgagtttttctgtggaaaattattgttcttttctctccggagaaaaaaaaaaagactggtttctaatcaatgtttccttttctccaaactttgttcacaaaatatagcaagagcttgtggggttaagttcccattcgtttgcatagaaagagggtgaaatcatg

SEQ ID NO: 28459 - DNA, 229 bp, Glycine max
  unsure (1)..(229): unsure at all n locations
  Clone ID: PAT_MRT3847_1256C.1
ctgctatnccagacttaatgaagtagataaagtcattcagtgactctaatttattttgtggttgtatatttagggcttataatatatatgtatatgtactgagtgatttttagccgttattatttaaatagctgtgaatagatattcgtttgtagtcgaattttggatattccttagtttgtgccaatagagaatataacaatttcatatataatgcgacatatatata

SEQ ID NO: 28460 - DNA, 2497 bp, Glycine max
  Clone ID: PAT_MRT3847_125700C.1
ctctctcactcttcattttcagtaagagagagcgacttcaccttcaatcccatttcaaaaccgctccttctccttctccttatttataagacttctctctttctctctcttctttgccttttggttttctctaataccatgtaaagaaaaaaaaaaatacaatctttcaatcagcaaaatctacagtttcaatctttcggatcttgttggtgttgtgtgtggatccttggatcgtgatcctctactcaatcctcattctgggtcggttttctttctggggggctttagatctctttgttctgtgcacttcaggtcactctgcttgcatcggtggtgtttcagtgtccaacttttcatggcattttgactacccttttgccaggctagtgtgagtgatggatccaattaaccttttacctgctgatggggttgaagtagtccaccaaaatggtgttcatgatgaaccttcaaattctggagacgatgatggcgtttcatatgatttagaccccagtgttactgaaactgctgcaactgtagctctaaatgggaacttcgataatttccatcagtcagatagtgctgcatctgataactcatttgtggcagaaatcaaagaatcaaatgacaacattgatggcactaatatgaccattcctaaggaagaggaagttaaaatatcagatcaaacaaagcaatcaagagcaccaaagggtcttgtcaagaacaagaatgcaaaggctccaagttccagtggtgttcatgcaagtttggtgaataagagcaaaattggaaaagataaagaagcatcttcatctgtttcaaatggtacttcagctttagactctcgcccaagacagtctactaaaagcagcagatctttcaatgaccggcagacacaattgtctaagcccaagcacccttcgaagtctgatgcaacatcttctgaagtatcagtggagaagacaaaaccaaaatcatcgagaaaagaacccattgataaagttcaaggagaagcagaatcttccttaagttccaacacagaagatgccaaacctcaaagggtgggaacacttccaaattatggattcagttttaagtgtggtgaacgagctgagaggagaaaagagttctacaataagcttgaggagagaattcaggcaaaggaggtggagaagagtaacttgcaagcaaaaaccaaggagacccaagaagccgagattaagatgcttaggaagagtctgaattttaaagcaactccaatgccaagtttttaccaggagcctgctcctgctaaggcggagctaaagaagataccaactacaagagcaaaatcacccaagctcggtcgtaagaagagttcagcaaattcagagtcagatggaaacaacagcagcagttcacgactagctcgtttaagtctggatgagaaagtgtcagagagtaacctcactaagggacctactcctcctgtccatcaaaagaagccacaacgaagatctcttcctgctcggctggcccctgaaaggaacagtgtatcaaattcaaggactgcaccaacttcatccaaggctatcaaagatgaaaagtcctccttgtctagtgctgctaaaaaacataccaacttatccaatgctacaggagaggagaaagccaagacgattgcagcaaatgaagagaaaagtaccttgtccagtgaaacaagtgatgctgtgctgctgaatgtggttcttccttcagataagccaagtgaagaagtgtctcatgtgaatggtgacatagcagttgaagagaatcctcagctctccttggcaaaagaacctatcatggcagcgcattgaacaaaatagcaggttactttctgagaatttgattcatcatctggtgagatattatagaagcatatgactcagattatttgacaatgaagaaggcttgcagatttgcattatagtttgtgttgtcaattgtcatcatgatgtccaagcaacattgtttctttatgtgtttacccactctcaatcttgccggtccagtcctcattctctttcgcgcttgcagcaatgtgtacttaacaatttgccaggttattctagttgatgttagtttggtatatgtgcagcacttgtctgtttagtgaacatttatttggaggaaaattttgagaaagtttgccatctgttgatggttcaagggcttcttgttcaggcctttgccttgtaaacaaatttgacattgtctcatgtacaagctgtttgtgttgtggacacccttctagctgaatccatatggatcaaattctgctttgtcgtacagctttggtttttcatggatcaaattcttctgttactataagaattcagtttctgctcccattgtagtacattttggctattaacctttccttatgcacagcatgcaataaggccaataagtacattttttatttatcgttatcttcgaataaggtaatgaatttttcttataatttgtctcg

SEQ ID NO: 28461 - DNA, 738 bp, Glycine max
  Clone ID: PAT_MRT3847_125701C.1
ctctctcactcgccatttccagtaagagagagtgacttcactttcaatcccatttcaaaaccgctccttctcctaattataaatcttctctctttctctttttctctctcttcttcgtcttctgtttttttttttctttctaaaatgtaaagaaaacagttttcaatcagcaaaatctacagtttcaatctttcggatcttgttggtgttgtgtggatccttggatcgtgatcctctactcaatcctcattctggtcggttctctttctggggttttagatctctttgttctgtgcacttcaagtcgctgcttgcgtcagtggtgtttcagtgtcctccttttcatggcattttgactacccttttgccaggctagtgtgagtgatggatccaattaacattttacctgctgatggggttgaagtggttcaccaaaatggtgttcatgatgaaccttcaaattctggagaggatggtggcgtttcatatgatttagaccccagtgttcctgaaactgcagcaactgtagctccaaatgggaactttgataattttcatcagtcagatagtgctgcatctgataactcattagtggccgaaatcaaagaatcaaatgtcaacattgatggcactaatatgaccattcctaaggaagaggaagtgaaaatatcagatcaaacaaagcaatcaagagcaccaaagggttcttgtcaagaacaagaacgcaaaggcttccag

SEQ ID NO: 28462 - DNA, 504 bp, Glycine max
  Clone ID: PAT_MRT3847_125702C.1
aaaaaaaggggggggggttttaaaggaccattattttccctacttttttacggtaacaaccgggaaacccgaacaaaaggggttccgttaaaaagccccccggggaaaaaaaaaggtgttccttaaaaaaaagaaaaattttgcccaagggtgggggggggggtatcactcccacaaaccctattaagcttatttattttaaagggaaaacgcgggggggggggcttttttggttttaaggtccccccaaaaacttaaaaaagggggggggaaaaaaggggggcataaaaagtttaagaaaaaaacccgtatttttgggcccaaaaaaagaatttccttaaagccccaaggggggaaacttttttaaacattcccccaaaaaaaagggaaaccccgttaatcgcccaaaacaagccaaatttttggggctttttaagcttaacccctttgaaacgggggaaaaaatttggggggggggaaaacccaaagcctccaaaaaatcca

SEQ ID NO: 28463 - DNA, 378 bp, Glycine max
  unsure (1)..(378): unsure at all n locations
  Clone ID: PAT_MRT3847_125703C.1
acacttccttagttcaatatggggaagcncttcactctctctcctttcttccctttgcttgcaacccttgtcaattgcatgcttggcaataactccaaccagcccaaccaattgcaaatcaacaacctccaagccttgggaacccaacaacggctttaattccaaaggtggttggatcaaacctgggactcccaacaacctgaactcaaatgcgccggtgtgacaggttccaaactcacactcacaagcgaaggggtctacatgtgataccacacacattatacccgggggatcttcacagcccacagggaaagggcacatggggttgcaaatcccggatgtcctgagacatttgtggagccacaagaacaatcaaac

SEQ ID NO: 28464 - DNA, 262 bp, Glycine max
  Clone ID: PAT_MRT3847_125704C.1
atgcaatgaaaagcttttcagttaaaaattcaggtgtttaaaaaacatcagtgtctcgtcaattaaatcacaagttccatttagatctagttcaaagttaaattcatatccattgacaggtgcagtttctacgggccaatcttccatctctgtattgttatttcttctttgtagctagaggatcataagaaacattctcatatatgttgccttcaataatgctcttattccctggtgctcatccttggtcactaaatccatc

SEQ ID NO: 28465 - DNA, 165 bp, Glycine max
  unsure (1)..(165): unsure at all n locations
  Clone ID: PAT_MRT3847_125705C.1
taactaatgatcaatcctcgcaaggggcanctgtcatacttactaaggagtgagtgccttcacgcctctagcacacacaagactgggccgcggttgagtatttgcaccgcagagacagagaggaaaaagaaacgccaacaacgatggctgagaaaggatcaccac

SEQ ID NO: 28466 - DNA, 265 bp, Glycine max
  unsure (1)..(265): unsure at all n locations
  Clone ID: PAT_MRT3847_125706C.1
ctntaattggtncgngattctncanccatagacatggncanngtcacntctgcagncggtgctattccctcatttcactggnctnaaggcaatcgcatgcaaagttagggncgnagttaaagtctcagctccccaaggccacaaggttngggcatcaagggcntcgntgaaatacgttngagtctctgttgtggncactgccgcgagttgcagtgntggntaccancncnnnnnccattnaagttttggctgggtggtgatgacg

SEQ ID NO: 28467 - DNA, 464 bp, Glycine max
  Clone ID: PAT_MRT3847_125707C.1
actggattataattgcctatccaagataatcgctctgtttgggagctagaaaggatagtcccgctcaaaacggacacctaccacgcgcacctttggggaggcgccgacgaatacagtggcgactaaaaccgatcgcaagtcacactcctgccaccgtaggactgaataagccttacacgctttaagcccggaacggtgggtctggaggatatcagacagtgccttaagagcactgaactattgatactagaactaccattccggatgctcttcacaaagatcaatcacgatttcaaaacatatcttcagttccagagcactgatgtttctgaccttgaggaaaccgcagatgattatctctatggactgttgaacgacaccaaactctgcgatatttacgccaagagagtcaccattatgcccaaggatatgaaacttgctcgcagaatcataagcgatagagc

SEQ ID NO: 28468 - DNA, 546 bp, Glycine max
  Clone ID: PAT_MRT3847_125708C.1
aggacaaaaggaaaaggccccaaattcaatttaaggggaccctttaacccaaaattatagaggaaaaccgcccaaaaaaaaaaaaagggggggagggtctaaaacttggcattttttttttgcccctaaaacattgaaaattttaaaaagggtacccccaagtcccaacaaaacttttaacacttggaacaacacaacctttaggaacaaaaaaatttacttgccaagtttgctttgcccccaattcaaaaatggaaaaaaggtcccctggaaaaaacatccccgttagcatttccaagggcagccccgttaaaaaacttggcaaccaaatggactcttttgacatttttttgtttttggacaaacatgttaccaaacctaaaaagcttttccaaaatcattttgggctggtaaaagggtggagggccattttttgagttcacaagctttttcccaaggccggaaacaccaaaaccaaaaaaccacttcctcacttcggaaacaaaaacccgggccctcagggcaccaaaaaaatcaatggattgg

SEQ ID NO: 28469 - DNA, 153 bp, Glycine max
  Clone ID: PAT_MRT3847_125709C.1
aaacggcatagggtggaaggagaggcattttttaaatacgcatagaagaacgttcattcaaagaagctatggggctacttgcactcctattagaactgattacgtgcgttgaagtttccccccgaacagcgaagatctttgatattgtgaaaa

SEQ ID NO: 28470 - DNA, 293 bp, Glycine max
  Clone ID: PAT_MRT3847_12570C.1
aagatacaccaccgacagcatctagttcttttggaaacgagaccgatacaacgaattttgatgaatacagatggacaggaatcacactcccacagactttcgcatgcacaacactgacgctggaaaaaaagagtcgcagaagagagaaacccattcacacctctcacaatttgcttgtctaccaacattacgaattgttgactgtaggtgagagacccataacctttgcggattccccagcaaagacacaccatgactcgatggtggctgaacgccttccatgcacagacatg

SEQ ID NO: 28471 - DNA, 582 bp, Glycine max
  Clone ID: PAT_MRT3847_125710C.1
aacactctaccaaaagcatgtttgcttatcctctccaatttcacgtctacaagtttttaacactgactcctactgcacttatcaaaaaagtgttcaggggctcccccaagcccaacacaatgaaacacacttttacaatatcacttgagtgaccgggcaccaaaaacactattctggtaccttcgcttgttattagaaggaggatgacgtaaggaactttagtgacgagtagcgtgctgcgtataactcaagacgctggaccacatagatgaacccacccttgactgtggccgacgttcgctgtggaaccaccccgaacccaaccattgctagacgtgcgcgctctggctgaccctgtttacgggaggatcctttttctgaacctgatggcatgacccccagagtcgcagtaactggcatgtgcgtacacagctatcttatgaagccaaggatgctctcctatggaactatctgccatcgattacgagagcctcatcctaaaaagccaggataaccggacttgaaaagcttgccctacttatgaagctctttgccgtatcgcctgcttatctgtgtcatgac

SEQ ID NO: 28472 - DNA, 143 bp, Glycine max
  Clone ID: PAT_MRT3847_125711C.1
gggacatggtgagttatcatgaaactattaatgctattgcggcgacaaaattgaaggtgcatcatgttactcatgaaaatgaagcttattgctgataagctagttatcattttaaactctcttagttaattctgttgctgatc

SEQ ID NO: 28473 - DNA, 183 bp, Glycine max
  Clone ID: PAT_MRT3847_125712C.1
cccacgcgttcgtccacgcgtacgcactgttctaatttatttctgaaatagaattccgttggtctgggtctctatctctcgtggcagggatgggtggcacaattgttgctgacgtacccacaaagaggggaaggggcataaaggccctgaaggagaaaaccccatcaacgaacgatgctaaca

SEQ ID NO: 28474 - DNA, 289 bp, Glycine max
  Clone ID: PAT_MRT3847_125713C.1
tcttaaaacctacttgcggatcaaatgctcccgaacggatgggaatggaagtcctgcagagaagacagagcttcatgatctatgtgagaaacaagggcggagaccatggaatgataatctgaggagacctgtgtcagacctgatgactatttagcagaaggggtcagaggcgtcactatcaaccctgctgagtgttcatagaactatctcatcatagaatgcttacaatgatcagttcacggaacttggtcaatcgaggaaagacattgaaagtgcatatagagaactt

SEQ ID NO: 28475 - DNA, 234 bp, Glycine max
  Clone ID: PAT_MRT3847_125714C.1
gctaggcctattgtgtggtgaatacacaaaagtcttttggggtaaatgggcggatgggaaaactgactgtcccaccgggcactttccgcagcgataaatgactgcctctaattataaggtgaggagctggtgcaaggaatgctatcctgatgagtatgccaaatgctgtttgttcactgtggaaatatattgtgggagatctgggcttagaaagaactaagatgacttctccct

SEQ ID NO: 28476 - DNA, 199 bp, Glycine max
  Clone ID: PAT_MRT3847_125715C.1
attaaaaaaaaaagattgcaaacacacccctttgctcatatacattgggcttgatttacgagaattaaattctgctaccgggaatatgacagttaagggacattcatgaaacagagaattgaaactgttcgagtgttataaaagcgggtgggatcaaatcaatggcgtgggaactaaaaatggctgggaaattgccaaa

SEQ ID NO: 28477 - DNA, 688 bp, Glycine max
  Clone ID: PAT_MRT3847_125716C.1
acatatcaattgaaaccgtccttgccacttgaattcaagaggataatctgtcccttgttacccccaccaatttcctcgcacgccagtgttccttcgatcggcctcaaccctccttcacccccatcttcaagatgactgcccggccattgtcgcacatcctccgggcgcgctgcctgcttcgccagcctcaaaacatccaggcattctctacccgatccagtctccgtgctgcggaccacgggggaaccactatgatcctcccacccggctgggctgttcgggtgttcaagccccgggccagaaagttaccaagaagggaaggctggggagaacatttgggtacctaccggatttcattgggaaggcttttttgggtcggctggttgtcgccataccgtctttcaagcctgatacttctatacaaacgtgggctctcgaagaggcccgacggagactcgaagctgagggaatccttgaggaccctgacaaggtcaagaaataaacgccaaatttgtacactgtacatagagatcaaagagggactatttcggtttatgcctgtactacctgcgacggcagatatgatgttccggtctcgttcttagacaggttttttttgcatgctcatctattttcgtttgttccttgttgtatcactttacacttttcgaagtttctttccgtcatg

SEQ ID NO: 28478 - DNA, 468 bp, Glycine max
  Clone ID: PAT_MRT3847_125717C.1
tttttttttttttttttttttttttttttttttttttttttttttttttttttttgtttttttttttttttttttttttttagggaggggtaaaattttttaaaaaccctaaaagcccctaaaaaaagacccccggagggttccccggttggattttccaaaaaatttgggggccaaaattttctttggggcccttgggaaaaatcccccccaaaggtgggggacccttaaaaaggggggccaaaggggcacaccctccttaattccgggcctataaaacccttttaaaaggggggtttaaaaaaagtggttttaacatttttttggggggggactaagttgaagcccccagggggcccccgggggaaattgggagcctgggggggggttcccccccaacaattcccttggggggggggccaaaaggggagaacccccggccccgggcctagagggggtgtccccccc

SEQ ID NO: 28479 - DNA, 385 bp, Glycine max
  unsure (1)..(385): unsure at all n locations
  Clone ID: PAT_MRT3847_125718C.1
acccctcgccttcaccttgnatagtgtttctctgtctcatggcctcgtagcggagcctttctctcttttgggagaacatggccttcatctcctccggtgaacttaattcccttgtttatccctaccttcaagcatcaggtttcacccctgctccttttacttttggttatgaagctggcttcaacatatgctccattgatgtaaatttgtgtgccggtccgtgctcttgctacatttgcttcagaagggtctacaccactttgtgatggaagcccacttgtgttattttcatgcctacctggaatatgtttttttattctttcaacctttggatcttatcacgaaagatgtgctttcacttacgcaaattataattttaagaaca

SEQ ID NO: 28480 - DNA, 843 bp, Glycine max
  Clone ID: PAT_MRT3847_125719C.1
ctttaggcatcaaacgatccaaatagtcaagttaggaaggtcattgataatgagtttccagcaggtgataaaccttttgtgtgggccttcaaccttcaactcccaaccaaggataactatagtgccatcgcatattttacaaccaaagagacagtccttgaggatttgctaatggacaagttcttgaagggtggcaatgcattcagaaactcgagacttaagctgattgccaacattgtaaaaggtccttggattgtcagaaaagctgttggagagcaggctatttgcaaattgggcgtgccctttcctgtaaatattgcacaggggagaatttcatagaagtagatattgatatagggtcttccatggttgcaagtgcaatagttcatttggcatttggttacatttcaacattgactgttgacttggcttttcttattgagagccaagctgaatcagagcttccagaaaaaatatttggtgctttcagattttctgaactcgatcctgcttcagctagaacaattgagccatcagatgttgtgagttgtgacaatgcacaaacatctttacctactagattgtggaagtcaattggacagggcttttcccatattcttcattcaggtcctctagaagatggctctacttctggttcagaacatactaacgatgtagatcacaaagataatccaactgacatcacgaactgatatactggaggaattgaaaggggtatggagttccatttgaggtcattattcttttagccatttttttttatgattcggttcatagcatctgttgtatgtcttaattcttgcctatggcagcattttgcaa

SEQ ID NO: 28481 - DNA, 164 bp, Glycine max
  unsure (1)..(164): unsure at all n locations
  Clone ID: PAT_MRT3847_12571C.1
acatgagcnacccctcttcgttaatttcttcttaagaccaatctgtgaanagtttgacttttcttgtnccncgaatcccgagancacaanccaaatcaanctcctantgtaacnnaacctatngctagcaagttggcaaatngcgttctagcacnggcaanttg

SEQ ID NO: 28482 - DNA, 1737 bp, Glycine max
  unsure (1)..(1737): unsure at all n locations
  Clone ID: PAT_MRT3847_125720C.1
cagaagcgtgcttgcttcgttgcttgggaggttcaattgtatcagtatatactcagaagccatgatattagttgatggcattccattttctacccattcatctcaccctcagggaaaggatattctacttgatttgttggaaaatcccattctggtatcagcctcaaactctttgaaggctaactcagagaggaagttctcagtatctgatgagtctagtccagagagatcaaaatgggtttatatattccagagagaatatgctaccgttgaccccgcccttgttgattttgttggcaccgatgaagcaacaacgtgtgttggccttgttattcggaaccaaaagaatggaatgacgtcagttgcccatatggattcaccaaaaattgtagaaatgggcctctcccaaatgttatcatcactcgtcgacaacagtttggagactgagtttgatgtgcatcttattggggggtttgaagatgtctcactgcaacatgcaaatggtagcacagtatcagaaagccctgcagatttggatggttattcctttcctctgtgtttaaagattgttcacactttatggtcaagagaggagaagtttcacatccgaactatctgtgttcttggacataataccagaagggattctgatggaaacacataccccctttttcaatggatttgtggcggagactacaacaggaatcatcatcccagctatctttgatagaacttctagatgtccagatgaaattgtcagaagaatacgagtatccgtgtcttatgaagatgccaactggaacggaaagttactagaaacatatgattctggcattgactgtttcaaaatcgctccttgtcgctggactcttcgccaaaatcatattgcttcatcacttctgaactattctgattccgaaattctttcaatatgttctacatcacctactgctgaagcctcagattttgtggagaatttaaaaaggcagtggaattatttgatcgagcatccacactggacagaaacctttcccaagaaacagcctcgcacttttgcaaggagttcttctgatggaaggtggataaggtgttgatgacattccaaggttgcgtaggctaatccttgtcaataattagattgccttattaaaatggtcatctctcattaaacgtttcatttctcattcctgttaagttatcaaattgcagccatctttagttttgaactaatatgatatttaattatcattgtgctgagaaaaatttctgctaaggacaacactaggaacatggttaagccagaagaaccatgaaaaccataagcgaaacagaaatggcgtgaagattagtcactattccatggctcttgtcaaaattgaaaaactctatcataagcgtgggatatagcgttctagtcagagaaatgagagcaacatgttctctaatacattctttcaaacacaagttatcccagtgattgaaatttattaggacttactagtacaatattatgtgtgtctcacttcttttgaacgagtcccaacaaattccagctaatggaagtgtcgaaaagtttgtattgaagattngtgttattctttttccaatagtattgtgcacgttcgcacaatttccactttccattgacagttggtctcacatcattttctggattttggattagtgaataggtgaggcttaaaggtttgcaataagcattgatctttcccatcatca

SEQ ID NO: 28483 - DNA, 264 bp, Glycine max
  Clone ID: PAT_MRT3847_125721C.1
tgtcaatgaacaccttgaaatctgtccatgtttcctcagaagccaatcaaacacaagtccccaccaattctttttccatgcaaacattagatgcatctgtccaaagtttagtgaaatcatggcagagaaggcaaagatggctgcatctattcaccaaatccagcccacaagatttgaatattaatagagcattatggcgtactcatttggccaattttctggattcaacatcggttcgcgtgtttacaatctcattgctcattg

SEQ ID NO: 28484 - DNA, 309 bp, Glycine max
  unsure (1)..(309): unsure at all n locations
  Clone ID: PAT_MRT3847_125722C.1
tcgcangcacgcgtacgtnagctcgggaattcggctgggagnagacgacagaagggggagggcggcgccccttgcaaaanannnnnnnanaaaaaaanaaaaaancggcncnccccttnttnanctctngtccccggnttttnttncctnccngntacctnanngtttnccgttttncccntngtnnncncnttttaanccttggggnattcnngnncaantnttttnccnttntnaattttttncccncccaatttncccnaaaanaaacnnnnnnaaaananangntcnngnttntagcgcnccngt
